United States Patent Application Publication US 2008/0114160 A1 - sequence listing, part 73

SEQ ID NO: 27010 - DNA, 3398 bp, Oryza sativa
caatgggaagccgatgtctaagatgatggttgatggtggggcttctgtgaatttgatgccatatgccacatttaggaagctaggcaggaatgttgaggatctcatcaagacaaacatggttctcaaagacttcagtggcaatccatcagaaaccaaagtagttttgaatgtggagctgacagtcggcagcaagactatccctacaacattttttgtcatcgatgggaaggactcctaaaacttgttgcttggaagggattggattcatgctaattgttgtattccttcaaccatgcatcaatgcttgattcaatggctaggcgacaagattgaaattgtaccagccgacaggtcagttaacgttgccagtgctgatttagctctttaggagatggatggtcttgattgcttgtctggaaaggtatgggaaggagattttctaaaggtgtctgattgtgatatacaaccattgaagatggagagcccaagttattattttgagggcgtcgtggagggttcaaacgtctacaccaaggacacggtagacgatcttgatgacaagtaaggacagggtttcatgtcggccgatgatttggaagaaactgatataggtccaggtgatcgaccaaggccgacattcatcagtaagaacttatctccagaatttaggaccaagttgatagagctcttaaaggaattcagagattgctttgtttgggagtattataagatgccaggactcagccgatcgattgttgaacatcggctacctatcaaaccaggggttagaccgcaccaacaacctccgaggagatgcaaagccaatatgctcgaacctgtaaaagctgagattaaacgtttatattatgcttgttttattcgtccttatcgatatgccgagtgggtttctagtatagttccagttatcaagaaaaatggcaaagtcagggtgtgcattggtttcagagatttaaacaaagctacccaaaaggatgagtatccaatgccagtagccgatcaactggttgatgctgcttcggggcacaagatattgagttttatggatgggaatgcagggtacaatcagatctttatggctgaagaagatatccataagacagcttttcggtgtcctggtgcaatcgtcttgtttgagtgggttgtgatgacttttggcttgaagagtgctggagctacatatcaaagggccatgaattacatataccatgatctaatcagctggttggttgaagtctacattgatgatgtggttgttaagtctaaagagatagaagaccacatagccgatttgaagaaggtttttgagagaactaggaaatacggcctgaagatgaacccaacaaagtgcgcttttggtgtatcggctggccagtttttgggatttcttgttcatgaaagggggattgagataactcaaaggagtgttaatgcaatcaagaaaattcagcctctagagaacaagacagaattgctaattttgttagaaggtttattttgttagaaggtatatttctaatttgtctggaaggttagaaccttttacaccattgttgagattgaaagccgatcaaaaatttacttgggggcagagcatcagaaggctttggatagtattaaagaatatcttagctctcctccagttttgattcctccacagaagggaataccttttaggttatatctatcagccggtgagaagtcaatcggctcggttttgattcaggagcttgaaggaaaagaaagggttgtgttctatatttaagtcgtcggcttttggatgcagaaacaagatattctcctgtggagaagttgtgcttgtgcttatatttttcttgtacaaggttaaggcattatctattgtccaatgaatgcactgttatatgcaaggccgatgtagttatatatgttatcggctccgattttgaaaggaagggttggaaagtggatattttccttaacggaatttgatcttcggtatgaatcaccgaaggcggtcaaggggcaagctatagctgattttatcgttgatcatcgtgatgactcaatcggcttagttgaagttgtgccctggactttattcttcgatgggtcagtgtgcactcatggatgcggtatcggcttggttataatttcccctcggggggcaagttttgagtttgcttatactattaaaccttatgcaactaataatcaggctgagtatgaagcggttctcaaagggttgcaattactcaaggaagttgaagccgatgctgtggagatcatgggtgattccttgctagtggtcagtcaattggtaggagaatatgagtgcaaaaatgatacattaatggtttacaatgagaaatgccaagagttgatgaaagaatttcggctggtgactttgaagcatgtatctcgagaacagaatgttgaagctaatgatttggctaaaggggcatcgggttacaagccgatgatgaagtatgtcaaaatagaagttgccacattaacagccgatgattggaggtatgatgtgcatcattatctgcaaaatccatctcaatcggcttctcggaaattgcgctatagagctttgaagtataccctgttggatgatgagctatattatcggacgattgatggggtgttgcttaaatgtttgaatgccgatcaagctaaggttgcaatcggtgaggtacatgaaggaatttgtggcactcatcaattggctcaaaagatgaagtggttgcttcgacgtgcaggatatttttggccgacattgctggaggattgttttaagtattacaaagggtgtcaagattgtcaaaagtttggagcaattcaaagagcgccagcatcggctatgaatcccatcatcaagccatggccatttagcatgtgtttggttctgggactaggtgggataggatgaaaccatccctgatttgaggattgggatgattccattcgggtgtttggtttgaagaataggatgatcccagttttttgtttggttcaaggaacgagggagggatgggatgagcgccgtttacaaccaccgacaacgccgtttgcaacaaccatggccgacgccgcctctgccctcacctccagacgtggtcgggcgggcggagaagcgcgacgacgcacggtcggccttcgcgtagagcagccgcggctcgacgacgacgacggcggcgaggtccgcgcgggagagggagagggagaggccggtggagaggagggcgagcacggccaccatcgcggtcgggcgggcggagaagcgcgacgacacacggtcggcccgccgccgagttccccgcctccggatccgtcgccacaaccttccccatcgctggatccgccgccgccgccctacacaccaccggatccgc

SEQ ID NO: 27011 - DNA, 2886 bp, Oryza sativa
tcccatcccatcccatcccagcaaccaaacactagaggttggggaattgatatgatcggtatgattaatacaccatcgagcaaaggacacatgtttatattggtggcaaccgattattttaccaagtgggtagaggcgattcctttgaataaagttgattctggggatgctatacaatttgttcaagagcatatactctatcgatttggtattcctcaaattattacaaccgatcaaggatcaatcttcgtgtccgatgagtttgtttagtttgccgatagtatgggtatcaaattgttgaattcttcgccatattatgcacaagctaatgggcaagccgaggcatctaacaagagtttgatcaaattgattaagagaaagatttcagattatcctcggcagtggcatactcgattggccgaagcattgtggtcttatcggatggcttgtcatggttcgatccaagtccctccttataagcttgtttctggacatgaggctgttttaccatgggaagttagaattggttcaagaagaacggagttgcaaaatgatttgacagccgatgagtattataatctcatggccgatgaaagggaagacttggttcaattaagattgagagcccttgcaaaggctaccaaagataaggaacgtgttgtggtgcctaagtccttttctgaaggtgaacttgtttggaaattgattttgccgatagggactcgagataacaaattcagcaagtggtcaccaaattgggaggcaccgtttcaaatttataaggttgtatccaaaggagcgtacatgttgcaaggactcgatggagatgtttatggacgagcactcaatgggaaatatttgaagaagtattacccaagtgtttgggttaatgcatgatcggctggtgttgccgatagcatgatagccgatgtattcacatcaccttgagatggccgattgactgctttcatgactgccagattcagtcaagtctgcagtagccaccatggtccacctactccaactaccgagccgacagctatcttggccgatgcattgttcaacatttggtacagatagccgaggaggattttgcctaaggggaattgtctttttgattctagagcttcggctataaactgccagttggttgtagcaccacaactggatccatagaagaggaacttttctagccacatcagcagaaaggctatatgctctcgagaggtgactgaccctgtgcccatgtattccgccacataaccagaccaaccacctatgctcttggtcctgaagtcatattgattcttggtgttcagactcataggattagccgatgaggtcacatccagaccggtgatcatggtgatatcaatcaaagttggggtcatcggccttggttgaacagaaaagcgttgatggtattggaccagaaataggtggcagcggccattaagggttcatccttagctgaatttgctatggggagggcaagtgcttgaccgattccaattttgtcctagtgtgtttgcttgcttgctgatacacgcttgtaccatgtggtcaagagatggccaagacgtaaaagtgtttgtccagtgacctagattcgggttggctaatctaaaaggaatcctattggtttcaccgatgatgaactcagtgggatcaagatcaccgattggacctaggaaatagtgtctctcatgcgacaaacttgggattgcgaccagattggaaaggtaatacgaattcaaaaggaatagagaagaataaaacaagattagacgacgaaaatcgatctattgcgcagaaaaaagggatctagccgatgggcacgtacctcagcatactcggctgatggcgcgatagacgggctggcggaggtcaacatcgccgtgggcggaaatttggccgaagaagaaatcacctggaaatcgccttgcgcactgaggggatcgccagagagagagaggacggagtttgcttcggcggtgaaaacggaggaaacagtgtgaagtttctcggggacaacggttagtatttaaagcgctgggtaacagtcggaaaacggcaagtgcagatttctctcggagtcgacatatggcaaatccaaaacattatccaatattccggacttggggggcatgtgttaacgaccaaatttggtaatccaaggatcggagatgaagaagaaatcgagatggagatcatcccggaaatggagtaaagatcggctggagtccaaatcggctgcgaccaggatcggcagagtccgagttggacaaggttagcctattgagtcgaatccgacaatgtgacacggcatacgttgtcgggttgaattaatgtgcttcatgaggattgccacgcatggatagagtcctgagaaggcaattgtatctattaaattaggatattttatgtatattccttagaaatatgtttgggcaaaagtctgccgcaaagacttaaggtgtcttagagtttgttagagataagagtcgtgtccgacacggacttgttttgtaatctctggtataaatagaccccgagccccatgtaatcaaactaacacacgttcaatacaatctcggcacatcgccacccttttactttcattttgtttcgacgagttcttgctttcgggttgagctgcattggtttcgatcttcaacaagaggtaaaacttgttatggcggcttgcgttgtcgggattagtgcttccatctttatgatactctaatcttgtttatgtaattcgtcgagttatcatatgccttatataatctctggcaatatcactatctaacctccaatcggctaacgtctgttactagacggcagccgactaggttaaatatcgatgttgacttagattatata

SEQ ID NO: 27012 - DNA, 5873 bp, Oryza sativa
acatttattctatatgcttcgttgatatgttagatctgccctctatgctaagatcttgttgcatttacatatattaggcctttgtttagtatattctacttgctttaatatcttagtatagagtggtatcggagtattagccggtacatgctagatctatctgatcggctatgctatgaacatatatagtcccattattaatatatatttcgatctaagtgatttatactgtctcggcatgacgaccgatctatcccaatcacttaatttaagtatatattgatatgaggagtatatattgttaatatctacaactgatcgagtagatttagttccttcctaattatttatgactgccgatcgatacatatatgacatcggctccaagataaatgatatgtcatcggcacttagccgatcggctatcgtttataggtttaaccgcggtttctttgtcttttttccttgttgattgcaggatcaaatcaactggcacgctagcatacccgaaggcgagttttggacctgcactggagttaagcagatctcccaggcctcgtgtttttcatcaacaggcacgacgacgggttggcgtggtcggcaagttgacggcggcggcggcgtggagataacggcggccggtttcttagcggccacggaaggcgttggcggcggtgtgcgcgggtgcaacacgcgcacctggatgaggaaggcggctcggctatgggccgatttgggccggcttgggctgaggggagaagaaaaaggatttcggcccaaagtgaacagaaactgtttctgaattttgaagggggtttgggaaatggaattggattggatttatatttgaaaagaattttaataggaaagtttggaaggaaattatatttggatataatttccaaaagtgatattttctaatttgagtgcaatatttttggaagtggaatatagtggaatttatatagatgcactccaatgggggagagagagatataattgggaatgtgtgaggaaaatggagggaatggaataaataaaattttagcccaaaatatgtggtaggaaatctagaattgattatgggctaaatgaggttttggatttgggatggaaggatgaaatatatcttcttagcaaacgagcaatatttgcaatatttgtaatagtattattcttgtgccgaggaggaaatcaagccaagggaattaaattggcggctagattgaaaggaggaatttggatacttgagatttggaaagggaactaaggataggtttggaatcaaaggatgggtcgacaattaattccaattaaaattgaaattacaaagaattggtttggagggttttctttgaccataattcatacaaatgaaaagggttttcaactaaatttgaataaaaggaattttgtcgaaagaaggttttaatttaaaacccaaaatcaagaaacaccttaatttaactaaatatatttttaaatgaaaaacacaaaagaagttaaataccaaagagggattttatgcaagttagttttaggaggtctcactaattatattttcctaggtgtaggaagttattaaaaacataagaagcggcatgatgcaggattagaaaattgtaaattttcaggatgttacaaaaggataccgaactcagggaacgtatgtaatctacctaaggctaagacgatccaaggacaacaactatgtaggctggctaggctagagatgactttctatgtattttaattatctaatttcctatctgttgcttcaggcaccgacccgtgctaatctgccagcgtggttccggctatagctctatgatgtatccgaacgtggaggattactaggacaggattcagggctgtcaccacctgccatctacctctaacaaatccatgggatacacaacaaacaaaggtaatctctaacctagacatcacgcctaagttattaattactactctaatacttgcgcatgaactttcttttttatccagagtcctagtactagagcacttagtatgaatactaaataatgaacccgcaaagatggaaatctatcttacttagacaaagtaattaaataacataagaaaggaacacgaatgtttactttctagaagaagtttctcccaacccggagcagagtgtaccgacagctccggtactcctccagaattcctcctatgaagctccactcgtcgaggtagaagtcggatgagcgctaaacttccgggcactcctccagagcttcccctcactctctacctaattttaatgtacaaaagatacaacagagcctcttgtaattcagctcaaagttgtgtgctggaaatgagagtgagctcctccttttataggcaggtatgacgattatagcctatgcaaaatgtccaaaatggcccggaaccgccattaggaattaatcatgaccgtccacatgaaaaatggtgatcaacggcctcatgaatggttcggccgaactggtggttcagccgaaccctggacggctccgttcagcccatttttcctcgcggacactaattttgaggcccttagcccattggcatggtggtttgggccatttggaggtgtttaattgggttttttgggtccaaaactctataagtttggatatgcgtttgattatcctccttcttcatgtatatttcctctcaactttgttagtttgtcacctacatccaaatatatagcaacattagtggaaatgattagtaataaaccataccactaagttgaataccatattttattccgtatatgcaggtattggcggtcagatattatgatttaaggaccatcaacagtaatagaaagatgcatggttatcattttatgaggtttattattcaaatacctttacaaacttaggaatccggttaaaatgggcatttgagttgatgttgtgattgttgaaagttatgaatgttggaatttatgatgaagtttgttggtatggaagttttggatgttgagataattttttgtggtttaaccggattataattacccccttataccatggaaatgacatagtttgtacccatccacacgaccaagtaattggacttagcctagtatattgtctcactatatgaaagactgttgggtggctcgttaggagcaggttttggggtgaacttgcgtaaggagtttgggcggcaatgtttcacaatagtgggtctcatgaaaagtgtgatgatatagataccttgcctaggcctggcaagagttcgaccactatgatgagccaagaccccactgtgcagtaactagtagtaagtgggactctcgaacgctatggtgttttcagcattacaaactgttctcatcgtgtgggtaaagctgggcagacactacagagtcgtactgtattcaaatacaccgtgctcccggttaaggagatatgtcatcaaggtgatttctactcctgaagtataagtagttttaaaattaaaatgttgaggataaagatgatttatggtttttatttctcctttactttatcattgttgtatttaatcatatctcttcacctttaattatttataatatgtcttgctaagtacataagtactcacccttgcataatttaacatatagatattgtgctaacaagaagactagaagatagcgaggtctatgacaatgacgagtttttcttctaggctagtctacactcgagcttttgcctgtggaattcatagttgtagttcaggagttcaagagtttaatagattaggagtttagtagtttagtagtttggatttttcttgtattttcaaataaggatgtattagtttggatcttttcaacctttaacaattgtataaatagcttctatgaacaaatctgtgtaaactaatcaaaagctgctctgtatatcaatctgtgcgtgatcaaaattctggatgatcaccagtggatatttggggcaccaggctaaattgggtgtccccacacgtggaccccacatgtcaggatgccacatcatcaccctctctctctttcccctcctctcccttcctcctctctctctctctctctcacttttctcctacaagtcggtcgacagatggggacagcggcggtgaactcggtagggcgtggtgtggcgttcaccatacctcacgccacccgcctaccccattcctcctttcaacggtccggcagcagatgtcgtcgtcgaatcgtccgcttgttgtgcgctcgcgtaggcagaggcgtggtgtcactgcgtcgggagaagacgacaccgaagtcatgctgggcgcctaggtcgctcgcgcgattgagtttgttttatgttaatttgggtatcaattgttgaccactgaaccctatctcaaaatttcccatctcttctactcttcatgtcctggcggctggcgagcagcgacggacggctcgacaactcggtcatgcgcgggaggcggcaggcagcagcaggccagccgcaagctgccaacggcgccggcaagcaagcacatagaggcgcatgcggcaggcacaggtggtgggctgggcgtagccgcgtaggcgcgtaggcgaagcagcgggctgctgcagccggtaggcagcagtagcaccacaggccgcagcggcaagagcaagcagcaagccaacaaggaagccaaggagcattgtaaattcaaagtgtattgaaaattttgaaattacatttgtgtaattgatgcgaactctcgcatcgcgagttccccgttgccgtcggagaggaggagcacctcatcacgacagcgaagaagccgagccatgcacttgaggaaggtggtgcagaatccgagggcgccactgaggacaagcgcgtggtttggcgagccacttgttggacgagcacgtggttgccgagccgaggacgagcatcggctgcggtggcggtgggggtgctgtgggggaaggtcctcctgctctggtgctctcgcgccgttgtcatcgccgccgcctcgtcgcccatcgccaactgccggactctcgcctcccccaccggctggcctgctctcgctcccgctggccggcggcgagcgctccgtcgacaccatttgcgacggcgcctggccctgcctccacctccgcggccaccactgtggtgcccggccccgcctccgcctcccgcccaacaccggtggcgacaccgcgctattgacgccattcacaaccgcccgccaccctcgccttgtcccgcgtcgcagccgccgccgccttctcctctcctgcctcgccctggcgtcctcctccccagccgccggtcggcttggccagagaagggaagagaagagtgagagagagagaggaggaagaggaggggaaagagagagagggtgatgacgtggcatgctgacatgtgggcgcatgtgggtcccacactgacttagccaccacgtcggatgaaaccggggtcaaaaccttcgaaggacctaaagtgactggttttgattagttaaggcacatttgatatctgattttgtggtttgagaacgttttttttatcttgatatcaaattgaggaaccgaagtgtactttttccgaggcatgtgactcagcccatcccgtttggttggagggtatttttaggagggattgaaagtttagagggatgaggctattaagtgttttgtttggttgagagacatgagaattttagtgggatggggatcgagaattgaggaaggaactccctccttttcaatacctgggtaggggcaggtaattgggagggaattcctcctttactttgtctaagtaaatctcagccatacgtttttattaatgaactaatctccaaccaaactccctatcaatttttgtcacctctaccaaata

SEQ ID NO: 27013 - DNA, 4416 bp, Oryza sativa
ctacccaagtatgaaaagagggagttccttcgtcaattccccatccccatccaccaaaattcccatgtctcccaaccaaacaaaacacttagagcatgcccaacagccacccaatatttgattcccaaaaaatatgaattaggaattccaaagtaaaaattgggcccaataatcaccctctcctccaagagaggcccaaaaattaattccctattatttgttagttttccacataagcaaggtgggcctagttcggtaccgatcgatcgtctccctccccgcaattgcgccgagtcttctccctccccgcaccagcgccgtgagtcttctccctcagcgtaccaacgccgccatctgagtcatcaccagccaaccactgactgctgcggtttctacaaaaacggaatactgaggatatgccgtagctattcgtgtaatcaaggaggtaatccctagcaaatcttattgatctcttgtgccctagtcaatctctatgtgtttattttgatatgtgaagatttactgtatggaaaatattaagtttgatctgataattaattttgtagattgattattgttctattcctgccatcggttcccctacatcgcacttcatccctacggtaataaacactccaaccccgtgccaaaaaaaggagatgagtcgtcgaagcaccctcctccaaatgctattggatgaggagtctttatcggatggcgaagaagaatttattttttcggcagttgatatagtgcactgtcacatcctgatttttgtttcaggatttataaattatttaataaattattattagaatttatattaaatgttcattaatttacaagtgaagttaaatgtgggaaataaaatttcctaaatataaagcatggatggatttaatttttattaaattctccatggttaattatactctctggaatattctcggatttttcggagcacaattcctaattttaatcatacaaagagcatttcagtaattaaccacatattaaattaatcattaaatggtctaattataattttgttaagtactttgagtgtccaagtattttcaggatttttcttgaaattatttgagcattggaagtatttttaacaattcaaagatcatttaagtgattattttaattgggaaagtaataaaattctcctcccttgtcttaggctgaatcggcccattcctttccttcctctctcttccgccggcccaacctgagccgcctcctctcctctcagcccagccggaaaagtctactttctctccctgcgctactgttcatcttccagctcaggcagagcccgagccagccgtgccgtgcacaatgccgcctttttccaaatctcgcctccccgttgctcctttttccaatttagttgaggggaaatattcctcttatcctcctctatctttaccccaaaaatcggagctaatcgttgagtatcttatccgaatcgaactcgttttcgagtttatctccgaaaccgagtttttgatttcccggatcgatttcttgcgggaggagtccgatctcttcaatccaaggctataaataggaccccctagtccacctctttcgtttgcccctctcccgtggtctcccgtgccccgtagcctctccgccgccgccgccgccaagttcgccgccgccgccggccgaacttcggccgtgtcgcgccgtcgcctccgccgttgccgtcggtcgccgtcaccgccgaaaggtgcgccgaggtgtgggcaagctcggccgctccctccccgctgtcgccggtcaccggagccccgtcgccgccgtcgaccgaagccgcgccgccgctagacctcgtcgcctgccgtcgtcgttcgtcgtttgattcgagagtgagtaccgttgggttcgtctcgtcgtcctctacgtgtacatgtcctccaaagtcgcagccgaccatccaatctccggcgaggtcgccatcttggtccggccattgatgaggtcatcatgacgtcatcatcgtttttctttttcctgtttttctaatagattaaatcttcggaaattcataactaaatcatcgtaactcggttttgagtggttcaagttgctaaattcatctaaaatcatgatctacatgttaaaaatatccatatgtactgtttatgcttgtttttgtactgtttatttggtttttattagtctttttcttcgttttgcgtgttagcttgtcgtttccgtcgttgcgaaggttcgtgagtgcgtcgggagtgttcagaagattaattgaagaccgattattgcaaggcaagtcacacaaatcctatacacaatcctttgagcatgttgatcttatatttaaattctctatttatttcaactgtgcatttatttttgaatgtcactgggtggtgtgaatctattcttttgttatggcctgtttgcattgattactctattccttgataccttgggatattataatttgactagttgagctttatatatattggttcaactagatgttagatataattgcttagccatgcttagaaacattagctcactaatgggatgaatcatatatactacattattatttatggttatatttaatggtagctcacgatggttaatcgtgttatgataattaattggtaattaaaatatgattaatggtgggttgtgagcacatggttttgaaggtcgtgctcatggcaattaaggaccggttcgcgagctactgttgtgaaacattaaccgtgccaaccacaagccagcgtgggcaacagctttaccttttgtatagcatggttcattgcagagcaccagactaagaagtggcggagataagcccacgggggtcgctggggagtccatgccttgttttataagggggtgattatgatccaggaatggtgcactgtggtgagttgtgttgtgcagagggtattgtcacagcctctattcgggtactttccagtatcgcgacgcatggtagacatgatgttaaggctgtgtcttgtgggtacagtggtacacctctggccagagtaaaactattcgaatagccgtgcccgcggttatgggcgggttgagcaatgtttttcgtgattagtctcacacctctcacaataattattgatgctataactggtaataatttgtttagctcctggtttagagttagatctgtacagccgggtatggttgttcaggatggttgggcctgtgcagcatgggtgtgctgttcagtgttgattaaaatttctgattaattactctactgttttactactcttaactctttgctaaatgctgctttcgcaaatgagactatattgtgccatcctttggtatccttgtgcatttgcatatttgctgtgtggcttgttgagtatgtcatatgctcattcttgcaataatcaatcaacctcagttgaagacaagttgcgaaggagaagacgtttggcttataccccagttgagctgcctgtgggagtggagctgaagccatcgctagaccgttaattccgctgctgtttttcttttcttttgtaagtatgtaacgttattattatgatggatttgtatattaaattgtcagtttgtgtacctcggctgattcctggacgaggattttatgcacaaataagttcggaaattactagtgaatttccgggcgtgacatgcacggtgagttcgatgacgatgaagttccaaagcgtggtggatctgtcttaggtcatgcagtaattaatcgggaaagattggctggtcaagattgtataatgattatttttccgaagaacctacgtacctcgatgttcagtttagacgcaggtttgtagcagtgctttttgttttgtcaatctttgtttgcaaaattgatacatatgagaattattattattaattactatgcaggtttagaatgaggcgacctctctttttacgcataatgaatgctattgaagcacatgatgaatattttgtgcagaagagaaatgcggctggtatccttggactgtcatgtttgcaaaaggtaacatcagcggctggtatccttggactgtcatgtttgcaaaaggtaacagcagtgtcacatatgttatgttatggaatagcagcagatgcagttgatgagtatgttcatattggaggtagtaccgttattgagagttttaaaaggtttgtggtggctgttgatgaagtttttggagaggagtatatgagaacaccaaacgaaaacgacatagctagattacttgctcagggggaagaaagaaggttcccaggaatgttgggttctttagattgtatgcattggcagtggaagaactgcccgactgcatggcaaggccaatataaagggaaagagggggttcctactatagttttggaagccgttgcctcacgtga

SEQ ID NO: 27014 - DNA, 8448 bp, Oryza sativa
atctcataatgatattaatgtccttcaaaggtcaccatggtttgcaaagctagctgaagggcaggctcctaaagttaatttcagtatcaatgggcatgactacactatggggtactatcttgcatatggtatttatccttcatgggcaacacttgtgaagagcattaagctgccacaaggcaataagagaaaatattttaccaaagcacaagaagccaataggaaggacgttgaacaagtgtttggagtgcttcaagctcgctttgctattgtccgtggaccagctcgtttttggaaagcaattactctgaattagataatgagagcttgtataatcatgaataacatgattgtggaggatgagcacgatggtgattttgatttagtttatgatgagatgggagaacaggtgggtggttcccaagaacatacgcccaactttaatgattttattagtcagtacgaaaaaattcaagacaaggaagttcacaaccaactaagagaagacctcatcgaacatttgtggaatcatcatgcagatcaatattaagtttagattttatattattgaataatgtcagagattgtaataattagatattcaccgtgtgttttgtaattagtacaatacattgaggccatgaattttctgcatatttcttttgttttcaaatattcacaggcatatttcagaatcattacgcactgatgtttttgtttatttatttgcaaaagacagcagcatcaagcttaattatgtggaatgtgaatagcacttgttgtaattttttagcacctgtaatcaggagcagcatcagagaaagcagagacagacaaagaaggtcccatggtctgaaactctgaactttaatctgaaacactcattaagaggctacctagcatccattttattaaggaagtctgataatgtatatgttttttaaggttagaggagtttattagcacagtgatgttaacatcttattttaattgcagaaaatttattagtgagaataggtgtggagattatgggtaccccatacccacacggcatggttatccgactagtcaaaggggatagcttatatatatggaatatgtaacagattatgacttgggtattacgtttccttgtatattacggaacggcctaaagtcctggtttgataagattataaagtagagttagaaaaccgataccgtattggataaggtttctatcttgtaatcctgccccccatcctatataaggtgggcaggaggccctctagggggcatgagacaacctgatcgtcagatcaatacacaccccggcggattcaaatccccaaacaggagtagggtattacctctcatcgagagggcctgaacctgtctaaatcctttgcctccgcatccatccacttttaggtctcgtgcgctacccccttttcatattgtcgaattcatgtttcgacagttggcgcaccaggtaggggttgcgttgagttacctgtcgacaagtgcgatggaatcaacttcatgagtcaccggcttcatcttcgcttcgggagttttttcgccgaccacttcaacatgctcttgctcttcgactcggatccaatctagccgggaagatcagtctcgacatgttcgatggattcaatttccaccgccgtcaatacctccatggaagacctcagttcaagatcaaataccatatatacatgccctgccgctgtcggaatccgatcattgccaggacgagtcccacgccaattatccgttcggcctgatttcaactcagctgcgattagccagacgcagaacgacggaaggcagtcatctatccaataggaatagtaatcatgtgcgatttcgccatgtatacaatatacatgcatatagcagaatccactgacaacagattgatctggaattataattagcagactttgcagcacgtgtctccaattactgaagcaccagcatatatactatcgttattcccaggcagatttgtttgttttgggagcttggactttgccgccatgcataggcaacgttgtctaatatggagtaattaagattcatgcaactactacatgatttaatcaccggatggcatcgatcaatccacctctgtccgagctgtacacgagtgcctgatctaaatgcacagaggcacgtcgccaggaggacgagtcggcagagtcaaaccaacgagctgggcagacgtcgcatgctaccacatggatagaccggcaggagtgcgaagctgtttctccgttccctgacttcatcgttgccggcttgcctccgccatcatcaccgccggcctgcctccgtcgccgccgaccggtgtcctcgcctatacggttggttggtcacaccaccgttcatgggcgtccacatcttcactgaccggccgcctcgtccgctgccgactggtgtttccgcctgcacggctggcctattatatgctgccgttgttgggcgtccgtcgactggtgtcctcgcctatacggttggttggtcacaccaccgtacatgggcgtctacgtcttcaccgaccggctggccttcgtcgccgccgactggtgtttccgcctgcacggctggcctattatgccgccgctgttgggcgtctacgacttcaccgccggcctgcctctgccgccactgactggtgttttcgcctatacggttggcggacttcgccgccgttaatgggcttcatcatctacaccactggcttggttccactggcgccgactgttgtttttgtcaccactgatggactgcttcattcccacatcggctacttctgttgtcaccgagggaatacgacaaagcttagtcatcatttattttattctttatatgatattttaccttttcctttgcctcactacatcaactggttcgctgttgactagtgagtcgggggctacaaatgttatatcatattttttaaacaattttcataatatttatcttgattgcttgcgacttattctgagtacaaaagtgcctatcgagttatggagttccatcttcctatgctttccgtttggtttgccaatggatagttgcctttgggccgattcctagcacccgggggcttgttggatggaccgaataacgcaaggtgctaagcattattcggaataaatcaaaagcatagagataagataatttattttctgctcttaataattgcaaaagtacccgagtagtaaactccgacccgtgaaactttattccattaatgacgaactcatgtcactcatatgcatgtttgggaagtgcttaggccgactcccggtgcttggtagctatgactagtcgggcagagtgtttaaacgtaatgagtcatctgtttggggaaatcaaaattgacaagagaagaaatacatatttataaatattttaaaatacttgcatttttctcgagtattatatttacatcagatactactcatcctatctgtttgttctgtaggatccagatccagatatgcataaaagggattcacggctttaagcttatctcctacgcttcaggaatggatcagtcagaacatcaccatcggcttgcgttcgtctgccgccggctggtgtctccgcctgcacggctggccaattatgccgccgttgttgggcgtctacgtcttcaccgaccggccgcctcgtctgccgccgactggtgtctccccctgcacggctggcctattatgccgccgttgttgggcgtctacgtcttcaccgaccggccacctcgtctgccaccgactggtgtctccgcctgcacggctggcctattatgccgccgtctgttgggcgtctacgtcttcaccgaccggccgcctcgtctgccgccgactggtgtctccgcctgcacggctggcctattatgctgccgtctgttgggcgtctacgtcttcacctaccggccgcctcgtctgccgccgactggtgtctccgcctgcacggctggcctattatgccgccgttgttgggcgtctacgtcttcaccgaccggtcacctcgtctgccgccgactggtgtctccgcctgcacggctggcccattatgccgccgtctgttgggcgtctacgtcttcaccgaccggccgcctcgtctgccgccgactggtgtctccgcctgcacggctggcctattatgccgccgtctattgggcgtctacgtcttcaccaaccggccgcctcgtctgccgccgactggtgtcttcgcctgcacggctggcctattatgccgccgtctgttgggcgtctacgtcttcactgaccggcttgccttcgccgccgccggtgtctccgcctacacggctggcctattatgccgccgtctgttgggcgtctacgtcttcaccgaccgaccgcctcgtcgtctccgactgattatttcgtcaccaaggctacaaaactctgtcgctattgctgggtgcattcatcttcactgttagttgatctgactgccgccgactggtttcttcgcttccatgccgattgcatcagctatcaccgatggataatttcaactactccaaaaggacaagctatatactcaggggcttactacctcaaacaccagtatcataccttcaatttggacttgttccggatacatgcaacatgaatttaatgatcatgggtctattttctatgctcaaagactggactatttattattccccataagagttatcaaccgaatacttgcgccggtcgggattcaattattatatctattttggagtatcccataagggataatcattcagatcagaagaacaacacttcatgtttacctatgcaaactaacaatttctcacactttattttaggggtccaccaaaaaaaaggctgaagaaagcatcttccagtaacatagtgactagcattgttgtggccactcctggatcaggcatggtattcccacacaatgaggtggcggccagtgctacacagaagccaaagagagtgaaaaaagccgccaaaaagaaggggccaccaacatcaagaagtactgacaattcgatgacgagcaggtatgatctttcacttttcctaatcttgtcatttccaacctcactgatctctttttcttgctttcacacaaggtctataactggatccaataacccctttgctctccaaattgagcaccctccagttgttcatgatgacattgcatcctatgaagtctctccacagacagtggacacaccaaggaagaagcaagccgtcaagaagtgtacaccaaggagggctcctattgaagtggctaacccatccagcccagcttctaatactagaagcaagaagaaactccagcttgaataaattatgtggaggaactactacttttgatgtaatttaagacatgtatggtttggtgtgatgaaaactagtgaactactactttttatgtgtggacttagtgtgatgaaaactagtgaacttgttgctgtgaacttggtgctatgaacttgttgctatgaacttgttgctatggatgcaatggtcatgtatggtttgatatgaacttgtatggtttgatatgaacttgttactatgggtgcaatggtcatgcccttgttttgtccatgtgatatgttgttatttgtcggtatgtaatggtcatgcacctgttttttcctttttaaaaaaattatttccgatttttccttatattttccaccattttataatttttcccacattttcctaaattttcccggatttttaaacattttcaaaatttattctcactttttctgatttttacctttttttaaaaaatattttccatttttttgattttaacgccttttctaaattatttttcacttttctgattttttttaaacccattattgtacacaagggcaaaactgtctttacacagcccctaacacctctgttatgtctccatccatccaaaatagtacacgggtcaataaaaattgggctcacggcgtataagtaacttcaattttttttatggtgcacacttaagcagcaactttgaacaggagtaaaaactccgggacgagcgcgtcttgagaaaatgagaaagaaacggaggaaaaaaaaaaggaaggatcggcgcatggcatttctctcccaggcgctgccacaaacgtctccgtgcccttccgccgccgatcccgagagaaggccccgaccagagcgcctcccccgcgccccaaggccgaaaccctagccgcgccacctcccaggtccccacgatcgccccggaaggcggtggtggcgacggtgggtgggggaggaggacggaaggcacacaggccggtggtgccacggcgaccaccatgtccgctgtagtgtgcggcaagcgggcttcctcttccttcttcgaggatctcacccacccgaccggcggctcccctcccgctgccaagcgtacccgctgcgggggcgcctttttcccgccgccgccgccgcccacctggccacgcggcgtcaccaagaacgaccttgtcgcccgactctctacgcaattccctgccatgagcctcgaggtgagcctcctcccaccctcctccttccccctctttggggtgcaaattcggatgcggatatgcaggagaaccttgtagtgggagaggtaattttttgttgagggatttttttggatgtagaaaaatgcagtcttgttgagattggtagctgctgtacccatccgcgatggaagaagcggtcttctcattgggcctcaattgtccgttgaatttgatgaagtttacttactttgattttgtatcttcatttaccttgttatcttattctctaccttgcacttttcgtttctgcactgaactaggaaataccatagatagatggaatgatagttcaatcctgaactggtttaggtctcatgtgttaggagaggaaaggcctttttgattcttgcaggactttgggtttggtgtgaccatgacactgaatgatttgacacaggtgaagtctagacagctgcaaatttaatcactagaagtgcaagccaaccacataaacatttgtgctttgcctggaaggatgttcattgacaatccaacttgatgactcgtgagaggattttgattaccaaactgcttaggaagttttgagcactgtaatggagatgatatctatatctcattccacttctttagatttagattagcataatgtaaaataccataagcttatatccaattagattgtgctaaattctacattgattgattggtaattttggttaggaaagagtttgtattgatggatgcatgacttccttggattattcttctaatttgctattttgcaaaagattttttcttgtattttcatgagaagctctggtgcatgtgaatgtggaagttttgcgaaaatcctgatacaagtcattgttgctctcagatgattgaaaaggctctggacaaatctggaaataatgtggattcagcaataaggagtttgcttaatctacatttggaatctgtgcaaaataacagtggcgttgcatttgaacccatacaagaaaccactgaggttcaggtgtctgctgaaggtaattttcaactgggtactttaatcatctgtggcatattgaatatcaactatcttctttatggttctgtttggcattgaggtgtattatgataatcttgtttggtgcaactacttctaggcatttttgttgtttggcaactgattttcttttaaattaagttaccgcaataatatcattgcattctgaaaatatggaacaattgatagttacaacagttaaataatgtatttttctaaccttaatttgatctgtaaaacaaattacaacaattataaattatgtttctacagaaacttaataataagcacatcacaagtaaacaactgcaaactgagcctgttgctcctttgtttgtgctttgaattctattttatggcatagaagcagctgaaggtcatgagaatctaaaagcgagaaaatcctgtttaccaacctaatttttggttgtgctggacctaaagaattttttagtaaatcatctttaataccccttcccccgcctacacacacacatgcacacccacgaacacgcatacactcaaatgacagtttctactcatcgagaaggtttgtatttgtaacatcaaactttctataaggaaacatgtaatgttggctaaatttgtttgtacattagtagtacattggtttataaaaggagcacagtatcaaatctgtggagagttgcaatatgtagacatgaacacatgttttacattaatacaatgaacactggccaatctggagacatgagcacttgaatatcaaagtaacatgaaaacacaagaatacatgaacaatcacggtaaatcatgatattcatgaacagaagaaaataccaacagatctagagtcttgaacaat

SEQ ID NO: 27015 - DNA, 16105 bp, Oryza sativa
  unsure (1)..(16105): unsure at all n locations
tgtctgactgtattttagtatggcattaagaaagtgatttactttgcttgctgtttgtgctatctgcctgtgtgatactgtcatgctcaggtctgttagatccgaattttgtttggtgctgtataccatggtaggtgtggcttgtagactgacatgtgcactatgttatatctgtatgttcacatgtttgctactttcattcatcatttgcctctagtgacctttttagtcgcccatcaccattgaatttcatgactattttgttggcagttgtttcagatggtaacgagattggtgcaccttcagaaagtgccccttgtcctgagaactttccgtcaaatggctcagaatgggtcgagctacttgtgaatgagatgacaactgcttctaacatggatgatgcaaagtctcgtgccaccagagtgctggaggcttttgagaaggctgtggtgtctcatgtcaatgctcaaggacctcatgattttcaaaaggttgttggaatatcctcctgttaactttacatgattctatcaattgttgttcaaaatcatagctatagtagatgtgttgcaacaaatctataagatcagtttacagccgtaagttgcatttggtgcatgcagtctatttgactatttatttaaattacttgaggaattttcctttatcaccataatttcctgaggtaacatggcagtcaaacaggaaaatgcagtgcttaaggggcaaatggaatcgcttacaagagaaaacaccattctgaagagagcatttgcgatacagcatgagcggcaggactatgatgcgaagaatcaagaactacaggatgagaaacagcgcattgctgagttccaagaacaagttagaaaccttgaggtatgtcagatttaattaccttctccatccactgatcgacccattactttcaatttcagtcccctctatatttcttggaattctttatttcattgagggattccgtggtagaattaagtagagtttctagatgactgctgcaagtcatagttttgtgacgttactgataatagcactgtcataaatttgtagttttcttaatattatgccatacccaaattattggcatggtagaatatgctgccacaccacatgggttagaaacggtgggatagcaaggattagggacactggttgctgttctaaaaataagttattggttggtatgttaagaaggttaaaaaaaaaatcctgcccgtattgtgaaaattagggaaacagataataaacattgtcattaagaaataataggctgccttttctcattgaatccgtggaaaatcctctcaaaagaatccatgggaaattaaagagaagctaacctttttttttcccttttttttttttgcagcttaataactacagattgagcatgctccttaggcaagctcagcagggcagctcaattccagggcgctttaatccggatgttttctaagaggaagtgcaaattccacctttcctttgcatacgagttcggaggcttaagatgttactatagcatgcaaatcttaagcttaaatttttgttgtggacgtgtaagtttatgttccgctgtagtatgggcagcggaatattatgttttataaatgatgggcaattcatggtcaatagataaattctaggacttattttatcgaatgacttatttttcttaccgatcacatttcaaccactaatagttcagtatccagcaacttttaggctgaacggttcccaactcacaccgaatttttttaatataataattaataaccccataattaaatatctggtaaatcaaagttgagatttttaataataggatggacgctgaagaatacagcgtccagatgtggacgctgtttgtaaaatcgtccagagctggacgctctggctaactacgtctagcatatgaccggtcgcctaggtcggtccggtggtcccagtacgaacagaagcaaaatgaaaaagagaaaaaaaaaagaaaaacgggaagaggaaccgttttggcgacgccactgcccggaaagtcctccacgcgcggaacagcgtcgcccatccatcagccaccgctgcgcgtccaatcgcatgaaggggccggccgtcgcagccctcgttctcggcagcgccgcccatccgccgccactgctctcctccacacgcgagggcgacgcccgcccgtccaccaacgccgcctgcctcatacgcttgtgggggttcgccggcactgccacttgcccacacatcccattcccaggtggtctcctccgccgtacacctccacgtgtagtgtaagtgccgtttgtttgcatgcatagtcagttctttccgtaatacatgtgtgattataccatcctatatatgtccatcttgttagtatgcttgattgttgtgataatgtggattaaagaaatacataattagttatattagatttgtcatgggagttgtttccaaaatactgaattgctcattacatttttacattcaccatatctttgcattggtaatataaattctcagcaattcacattgattacagcttataaaaaaatgctgatagcgtgatcagttcagtgatttattatggtgcctcatggccagcactaaatatctaccattgaagaaaatctgagtattttttcagtttgccgtacctgttgaaatctgtttttttttctcatctattcatgttaatctccttaagtaattgttctatgttttcatgcatacagcctagcggttccatgaatatatggcgtcatcaccatggaattctttaccacccactttaccaatcagctctagaaaatattggatttctttcaattgcaaagatgaaggctaggtagtggagttccattatcccaatagggtaatgagacaatttgaaataaaacaaatgattccactacctcatccacatggagaggccgatctccgtaggctgcgaaaagtcaagcacgtaggagggaaaacttgtgattggagaaatttaatgccaaatatatgttcaacaatatgatcaatggagatgaaagtgaatacgtactcgcgtgatgaatctctagtgtgtgctagctgccggcgccacagccggtcagccgcacaggcaaaggcgtggnnnnnnnnnnnnnnnnnnnnaaggcgtgtcgtcagctagccgcgtgcgattggtgacgcatactgcgccgcctttgctgcccgccggtggcgatgagggattgccgaggaggccaggatgcggtcgctagagaacggcagttatttcggcgctgattggttttaggtggatacgttcgggccggtttggcacggttcgactgcacccgtatggtggacgctgttcacaataacgttcagacctgcacgctctagagaatagcgtccacatctggacgctaacaaaaacaacgtccatcctactttgctaattacttgcacgcaattaccagatgtttaattacggggttattaattattatatataaaaaaaatcggcaactcacattccttcgcgcgcatggtttccaaactgccaaacagtgttgaaagttatctgaaaatttgacaaattgatcctattgaaaaacttatttcaaaactaaatcgtgtaaaaaaaaacttaaaaaaaatactccttgagcttagcaccatataccttggtgtggagtgattcaatgatttagcagaagaatcccacactgacttgggatcagcgccaataaaagatgtatcatttctatcagttacttctttcatttcattaagtaagtttttctagcattacccacatatatatatatatatatatatatatatatatatatatatatatatatatatatgtgttaatgaatcaaaagtcttacattatgaagtggagggagtagttacaaagatgtatgtggtaagaaggttactatgctataaccactaattaattaaataaagatagaaatatacgtgctactgctaaccactaataaataaagaggagaaaaaaaaactaatacttccgtttcaggttataagactttctagtattgtccatattcatatggatattagtgaatctaaatacggatatctaaatgaatgtggacaatgctagaaagtcttataacctgaaacggagggagtaattaattaaaagaagatagaaatataggtgctactgctaaccactaataaaataagaggagaaaaagaaaaggaaaaaaaaaaggcaaggaccaaaccaccagactactgctacaggacatcgtgatttcgtggttttagctccaggacaccgcacgaagtcacttttgggggaaaacactctcaaaacatagttatttgccagcggacaccgcgcccattaaaataataatttccggttgaatacgagagagaaatcacgtgaaatgtcaaaaataccttgggccgacatgtcagctctcttatctctatctgcgaggtgaggcggggcgcggcgccaccgacggccggagcggcgtctgcgaggcgaggcagggcgcagaggccggagccatgttttcattgctgctcccggcggcagccgacgcgacgtcgtcagcgctgctggacctcctcttgctgctctgccccatccttgacttccacgcctgcaccggctcgctgtcctcgtcaacgcctacccttatttcgcctacgctgaggaccccaccagcgtcgagctcgagtacacgctgcttgagctgacctacgccggcgttgccgcaccgtcctccgccctgcactaccccaacttgctcgtggcgcaggtggacgccgtgtaccatgccatcgcagcggccaacacagcagcggcgagggcggtggaactgcgtggcaaggtggggtgcggaggcccggcgcgggcgcggtggctgtgcgtgtggcgtggtgaggcgaggcggcgagcggaggcccagcgcgggtgcggcggccgtgtgggcggcgcggcggcggctcgcggtgacgccgtgcggggtccgtctggctggggctcacggcggccgtgcgggcggtgtagcaaggcacaaaagctgtgcgggcgcggtggtggcggcttgcggtgactccgtccagcagctcacgccagctcagctttggtgcccattggccgccgtaggagctcgcgcaccagtagcgccacgcttcagtgccgttgtcgaacctcaaggtgaccgcattgttgtcgtcggggtccagccacacactcgagctccacctcacacgcttcgctgccgagcttggcatcccgttcgagttcaccgccctcgtgttcgaccccctcagcagcgtgtccccgcccttcggactctcggccgcgcccgacgaagcggtggccgtccatctcacgactggctcgatccatgaccttctcaccggcgcccgcacacctccttgtcgtcaaggagctccgtcctgctattgtgtaaggaggaagagagatagggagatagagagagaacagaagagagataggagagctgacatgtgtgtccaatggtatagttgacatttcacgtgatttctctctcctcttcaaatggaaattattattttaatgagcgcggtgtccactagcgaatatccaatatttgagagtgtcttccctaaaagtcacttcgtgcagtgtcctacactaaaactacgaagtcatgatgttctgtagcaaaatttgccttagttcatttactagtgctctactgcgctccatttgtttgttagaaaataaaatctctcagcaccaaagcatacggtgtttatacgttcgacctccgcgacaggaaggttagcattgagctcgagaaacttgcgggaatatatgtagtgcaaacctataccaacatgcaaacttggaaaccagattgttgaccattggaatgaagatggacggtccagattgagcgcctcacccctattgcacattttgcaaaaaaaaaaaaaaaaaaaaaacgcatgcctctcattgtcctttttctgttttggtccttggacttattgtatttcctctctatccatgcatgcattcactttttccatgttcaaaatgattttctcctaaattacttatccaatctacaatccgatcataccgttgtatttgttgcaattaaatctttacaacaagatgacacatgactatgttttagcaaaagaaaaacgtatgtttcaatccgttaacactcgttgtttcgtacatgatagtgatatgtttcaacgtgtatattcactatgtttcacatttgaccatcatgcagattttgaagtcaatccggcactgtttcatcaagtagatcgaaaatgtttctatcttttaaaatacaatcaaatcacccatgaaacattttgctacaacgtatgtgtaacatactcgaatttaggattaaggaattcttgtcaaaactagttgaaaggaaagttctccaattttgtgaaccaaaaatttccattttaaaactaggtgaagttgatctaacttgtactgaagtaaaatttgagagcaaattaaaaccttttcatctttaacctataccaagcatgcatactcgcttacatcgtgttttgacttgagtccttgtgtgcatttggattttcgatttgcatttcataataggtgtcatgaataataactaagatctagataaacaactaaaccattagggcctagtgttagctagaggaagttaaaataggaaccatacaccttaaaatatatcaacatggctaatgtcaagcctcactaaactaatttggctactcatctgaaagcatgtcataaatatgtgttgatgtaaaaacacgaggcctgggagatctgcttaactccagtgcaggtccaaaacttgcctttgggtgtgtgagcatgccagttgatttgatcctgccatcaacaagaaacaaagacaaagaaaccacggttaaatccataaacgatagccaatcggctagttgccgatgatatatcatttatctttgggccgatgtcatatgtagatcgatcggcagtcatgaataagtaagaaagaactaaatttactcgattggttgcagatattaacgatatgtaatccctatgtccatatatacttaaatcaagtgattgggatagatcggtcgccatgccgagacagtataaatcacttagatcgaaatatatattaacagcaagactatatatgttcatagcacagccgatcagatagtctagcgtgaatcggctaatactccaataccactctatattaagatatcaaaacaagtaaaatataccaaacaaaagcctaatatacttaaatgtaacaagatcttaatataaagggcagatttaacatgtcaatcaagcatataagataaatgtagttaaatcaggtaagatcagctgaaaccccgatgctaccctaatcggcaaccaaaggcaggctagagattgagattctaatcacgactcataagatcaaactcaaccaatgcagcaataagtatgaaaagaaggacaatatctagacaatcaagccgctggaagtttcatagagtgatggatatcctatataatctaagtcaacatcgatgtctaacctaatcggctgccctctaccgacagatgttagccgattgtaggttagatagcgatattgccagagattatgtaagatatatgataactcgacgaattacataaacaagattagagtatcataaagatggaagcactagtcccgagaacgcaagctgtcataacaagttttacctcttgttgaagatcgaaaccgatgcagctcaacccgaaagcaagaactcgtcgaaataaaactaaagcaaaaagggtggcgatgcgccaagattgtattgaacgtatgtatccactgattacatggggttcggggtctatttatacccgaaaattacagactatgtccatatcggacacgactcttatctctaacaaactccacgataccataagtctttacggcagacttttgcccaaacatatctctaagaaaattacataaaatatcctaattaatagatacaattgccttctcaggactctatccatacgtggcaatcatcttgaagcatatcgactcaacccgatgtcgtacaccaagtcgcattgtcggaatcggctgtattacttaacccagtctgactcggacttagccgatcccaatcatagccgatccggactccagctgattcttactctgtttccgcgatgatcctcatctttgattccgctttgattcaatcttcttctccgatactaatattaccaaatttggtcgttaacacatgccccccatgtccggaatatttggtaatgtttcggatttgccatatatcgactccgagcaaaagtcgcactttgccatttcccgaccgttacttcagtgctttaaatactaaccattgtccccgagaaatctcacaccgtttcctccgttttcaccgctgaagcaaactccatctcctctctctccggcgatcccctcggtgcatgaagcgattcccaagcgattcctcctccggctagatctccgcccgtggcgatttcgtcctccgctagcccgtctaccgcgccgtcagccgagtatgctgaggtgagttctcatcggctagatccccttttctctcatcagattgatttcccctttcctcatcttgctttcttcttctcggttcttttggatccgcagcacctctccaacctagttgcaattcccatcttatcgcatgaaaatcattactttcttggtccaatcggcaaccttgatcctaccgagttcatcattggtgaaacaaataggattcctttcagattagccaacccagatctaggtcactggaaaaacaccttcaaatcttggccatctctcgagaaaactccacccgagaaaagttggattacatggtacaagtgcgtatcggctagcaagaaagttcactgggacgagatcggaatcagccaagtgcttgcccttaccatagccaattaagctaaagatgaacctctgatggctgccgctacttatttctggtccaataccattaatgcttttttgttcaaccaagggccgatgaccccaactctgatcgacatcaccatgatcactggattagatgtaacctcatcggctaaccctatgagtatgaacaccaagaaccaatttgattttaggaccaaaagcatagggggttggtcggggtatgtagcggcatatatgggcaaagggcctgtcacccctcgggagcatgtagctttcttgcttatgtggctagagaagttcctcttctgtggatctagctgtggtcctacaaccaattggcaatttgtagccgaagccctagaatcaaagaagcaatttcccttaggcaaaatcctcctcggctatctatatcatatgttaaataacgcatcagccaaaatagccgtcggcttagtggttggagcaggtggaccatggtggctgctacaatcttggctcaacctaatggtcatgaaagtagtcaatcggccatctgtgacagaagctgaattcccaaggttggagccgattgtagaagatgatggagaagaacgcactcatcgtagatgcaagtcatatggagaatatgcatccacaccagccgatgccagggcaaaattatcagctgaactgctcaaggattggttctgtagtttttatgaaggctttcagaaagatgcccgggtctggtttccttagaagactcagcagaccttgaactcccatcagacttcagatttgaagacattaatcatgaaagataccaaaaattcagggaagttttctcaactgcaatcagcccatgcatccttcctgtcggcattcatcagggaagaaacattcaagtctcttatgaattttatcacccgatgagctcagctagacaacttggagtgggccaactcccaatcggcttattcttcgccgataagatccaatgccgatgggaaatttcatcaaccttgatgatgcatcggctgctcaatctccaaggacctcctctaggcagtattgaaaatatcgagctggcaggattcaaaagcaaaaactttgacagatggtggggcgagtggaaactgcatctattccaccaatcggcttctatgtatatgatggatctctttcccgatgttatacctcaggtaaactctgatctcattaattctgtttgaacaattatcagccaattcataatttgactaaccctctcttctattttgcagacaacataatcttcccctccacatcaaagcaatagtggtagagatatcaaatatgccccaggtctaattcctaatggaggtgggccatctcctcctgtcatcggctatcatgcccccaagacttcgactcttctccaaggcttaatcagagaactagccgatgcaagcaagaagagaagaaccaggtcatcggctgcagacacgttagctctagccccaaagaagaaggccaaactcaagaagcctaaaccaaccgatgacctgcctgtcctagatccatatattgaacaagctctagatgaagaagatattgaagacgatgttgaccaatccgcagccgaagtgagcgatacagaaagaacaccatcggcttcacccaagcagacccctccaactccttctgccccaactcatttttcaagagtaagcagctctctttgatcctttttgtaatcacttcattttttcggccgattactcacagactttatagttgcagaagaagaaaattgctgtgaaaaagaaaccagcagcaacaattctcaaaccggctccaccagtaagttattttaattcttttattagttgattccagccgattttgtctaacacttgtctcttttacaacctcctccttcttctcctcctgtgcaacaatcatcaagtgaccgaactccatcggctgtggggagtcaccatgttgagaaagaaatacaaccagctgctcctgcaatcctggtaagttttgtcttataaaaattttgaatcgaccacataactcatgtcgagtctcaatttttagaattctttcttgcaggccttagccgatctattttccttcgacattaaagactatcttgatgaagaaacagaagaatataccaccagcaaatctttagttcccttgtccgatgatgtaaagaaaacccttgaagacatctctcatcggctagaagcatcatcactggacaacttggtggtaaactgtgggcctattaggactcggctacatgagatccatcctctaatcccagatgagctagccgatatccttactccagctatctatcttgagcagcatcaattcaagctagagaaagccaagctaagattagccgaacgtcgggagcgtaaagatatcgaagcaacaatccaagccaatcgtcagcttgtgcacgaagagaagtccaagcttgatcagctacctgagggcccgatcaaatccaacattgatcggcttgaggcttgcaagattgagctcttggtacaacttgaagaatgcaacgccgagctggacatagaacataaaaagctggctgatctcccaagatccattgaagaacagaaggcaagattaaaatcgactatcaagaatgttgccgatctcaccaagtctttaaaagtcattcctggaaccgacacccaagatgcccaagccattgaagaagtggaacaaatcaggcaaagggctatttcggctatccagcaatacttgtcttggtgactttccgtgtaatagaccttagaaatttttgtaatcggctaagatactatagtactttactgtcttagcaatcctttgtgccgattaatataacttctaaattcgcccaaaaatttacattttttgtatatatgtgcccccctaattttacaatgtcaaaagcattgataaaattattaaaacaactaagggcgatatatcggccatagtacatcggcaaaccacaaccgatttcaatatgaaaaacaactaagggcgatataacaatatcggccattgtacatcggcaaaccacaaccgatttcaatatgaaaaacaactaagggcgatataatcatatcggccatctcaaggcgatgtaaacacatcggctatcatgtatcggcaacatcagccgatcatgcattaacccaaacatttgggtaatatttcttcaaatacttgccatttagtgctcatccataaacttctccatctagtacttgcaacatgtaagctcccttagatacaactttgtggatttggaacggtccttcccaattcggcgaccacttgccgaatttgctatcccgagtcccaatcggcaaaatcaacttccatacaagctcaccctccgaaaaagtcttgggcactactttcttattataatgccgagcaactcattctttatccttggtaaccttcacaagggctcttaatctggattggaccaagtcctccctttcatcagccatgagattataatactcatcagctgtcaaattattttgcaattccgttctccttgagccgattcgaacctcccatggcaaaacagcttcatgtccataaacaagcttataaggagggacttggatcgatccatgacaagccatccgataagaccacaatgcttcggtcaatcgagtatgccactgccgaggataatcagaaatctttctcttaatcaatttgatcaagctcttgttagatgcctcggcctgcccattagcttgtgcataatatggtgaagaattcaacaatttgatacccatgctatcggcaaactgaacaaactcatcggacacgaaaattgaaccttgatcggttgtaatggtttgagggataccaaatcgatagattatatgttcttgaacaaattgtatagcatccaaagaatcaatattcttcaaaggaatcgcctctacccacttggtaaaataatcggtcgccaccaatataaacttatgtcctttactcgatggtggattaattatgccgatcatatcaattccccaacctctaaatggccatggtttaatgataggattcatagccgacgccggtgccctttgaatcgctccaaatttctgacaatcttgataccctttgtaatacctgaaacaatcttctagcattgtcggccaaaaataccctgcacgccaaagcaaccacttcatcttatgagccgattgatgggtaccacaaatcccttcatgaacttcgccaattgcaaccttaacctgattggcactcaaaaacttcagcaacaccccatcaatcatcctataatagagttcatcatccaataaagtgtacttcaacgctttataccttaatttccgagaagccgattgagacggattctgcagatattgatgcacatcatatctccaatcatcggctgttattacaacaacctcaaccttaacatctttgatcatcggctaataccccgatgccccttgggacaaatcattagctttaatgttttgttctcgagatacatgcttcaaagtaactagccgaaactccttcattaattctcggcacctttcattataaaccatcaatgtatcatttttgcactcatactctcctaccaattgactgattactagcaaagaatcccccatgatttcaatagcatcggcttcaacctccttgagtaactgcaaccctttgagaactgcctcatactcagcctgattattggttgcataaggtttgatagtataagcaaactcaaaactttccccccgaggggaaataataaccaagccgatgccacaaccatgagtgcacactgacccatcaaagaataaagtccatggtacaatctcaactgagccgattgaatcatcacgatgttctacaataaaatcggctatagcttgtcctttgaccgccttcggtgacttataccgaagatcaaactcagttaaggaaaatatccactttccaatccttcctttcaaaattggagccgataacatgtacttgacaacatcggccttgcatatgacagttgatgcgaacccgctagggtttgtggcccgatctttcgatgagaggtaagggataactcgattagatgaagtcgacgttcacggcccgactacaactgtccaaagacgctgcgccttagcaaccgatacaccgtctccaatggtcgccgcgaacttgtggtgcgcgtcaacccggccacgagggcactcgtcctgcaagcaatcgaagaacaagcaagaacaagtaggacaagcactgaaattgctagataaaaatgaaagtttcactatcaaacacaatatggtggggttccgattacaggcagacgggcggtttagccaacacgcgcgctgcgagccggtagcaagaagctatctctatcatcaaaacccgcctgttcttggcggcgactagaggtataagaagaggggaagaacgaccatagggtcgtgctccaaccctaggacgcgcccctaatgggcccaacttggatacacagcccattgggccaaaagaggtgacgcagcaccattgacagaaaatagtcgggagtaaaatgacaattgcggccgctcgagaacagatatggacatgtggctggatccatttgaaagtagacttgataagctttccatgaagtacttgcacgcccaaatcggagttcgcatgaagtcgtggcggccgtcagaagttggcgctgccctgcagtccgaatccaccccgcgcgaatcctcttccctttggatcctctccatcgttcctgagtaaaacacgagtgcacgcgtctccgaggtataaagacgaggaatatgaactcaagaaagaactcacctgataatttagttgacgtgcacgagcgcgggtaataggaccatcatgctgtatatggggggacgtggatgtatcgatggtgttgatgtcctcatcaacagtgcattcattggacaataggtaatgccttaaccttgtacatgaaaaatataagcacaagcacaacttctcaataggggaatatctagtttctgcatccaagagccaacgacttagataaaatacaactctttctttcccttcaagctcctgaatcaagactgagccgattgattgacttctcaccggccgacagatataaccgaaaaggtatccccttctgtggaggaatcaaaactggaggagagctaagatattccttaatattgtccaatgctttctgttgctctacccccccaagtaaactgctgatcggctttcaatcttagcaatggtgtaaaaggctctaaccggctagacaaattagaaataaacctcctaacaaaatttatcttgccgatcaactcttgcaattctgtcttgttctccggaggttgaatcttcttaatcgcattaacactcctttgaatcacatcgatccccctctcatgaacaagaaatcccaaaaactagccagccgatacgccaaaagcacattttgtcgggttcatctttaggccatatttcctggtactctcaaaaaccttcctcaaatcggctatgcggttctggtatttgcatagtatggggatcgtcggtgctaggatatacacgagactgaggtaaaagagacggagacgaggatttttatacaggttcgggcccctgaattgtcaggtaatagccctacatcctgttggccgaagccggtcgttgctctttattcaccataatcacacaagtacaatatatgggtagcctatctaactgttgtcgacatggcgttctgaaggtctgactcgtagtcgacaacagggtagtcttccttctcgaatccgtgcccgacgagatcagtgatagcgctttcgtctctcctgatagtatccggagacactgtaggggactagccgggcctatccctgaagtcgatatccggcgtcttatcttggcatatgttggcttgtatgtcatggcttctgttgttccgtatattgtggtgggtgtcgactgtctggtctcctcctaggggaccttgtatttatacccataagtgtccccttgtccaagtagaacta

SEQ ID NO: 27016 - DNA, 9633 bp, Oryza sativa
ccaggacacctaaaagttgtcttatggatatcttcttcggccataaagatttgattataacctgcattaccgtccataaaactcaaaatcttgtgtcctgaggcagcatcaaccagctgatcggctactggcattgaatattcatcttttggggtagccttattcaagttttcggaaatcaatgcacaccttgacttagccatttttcttgataacttgaactatactagaaacccactcggcatatcggcaaggacgaataaaaccagcatcatataatcgtttaatctcagccttgacaggttcaagcatatcggctttgcatcttctcggaggtagttggtgtggtctaacccccggtttaataggtagccgatgttcaacaatcgatcggctgagtccaggcatttcataatactcccaagcgaagcaatctctgaattctttcaacagctctatcaactttgttctgaattccgaagataaattcttactaataaatgtcggccttggttgatcacctggacctatgtcaatttcttccaaatcatcggctgacatgaaaccctgtccttgtttgtcatcgagatcatctactgtgtccttagtgtagacatttgaacgctccacgacgccctcaaaataatagcttgggttctccatcttcaattggttgtatatcagaatcagacacttttagaaaatctccatcccaaacttttccagataaacaatcaagaccatccatctcccaaagagctaaatcggcactggcaacattgactgacctgtcggctggcacaatttcaatcttgtcgccttgccactaaatcaagcattgatgcatagttgaaggaatacaacaattggcgtggatccaatcccttccaagcaacaatgtagacccccgattttggaaatcggaaatcttctgtgtttatccgtaccaatccctggatcagtagttggtacacacatacatagttggatcacaacatatcacgaatgaatttaggctaaaagagttaaatatttacattagggccaggtaggccaacaactatcagagaacaacagtggaagacaaaataatataagggcccggttaacatgccacaggcagtcgactgtggaacgagacctagaacaagaccgcactccgatcatcttgttggatacgcaagcgtaccgacaagggcttctcttcaacactctcctaaaagatatatgaatagcaagggtgagtaccaaccgtactcagcaagccacccaacaacaatgcgtatgatagagggtatttcaaggaatgtcttcatgttcttttgcataaagctaattttacaattcttttcacaagcctaaaacctagcatagactgatcaaattttagtaccagtgttcactttaaacaacgacggttctgtccaccatccattgtgatcccaaggatagcttcccgccattgagtcgttatggttttctgaggacgtccacattcccgcctctcaggaagtggctccatcagcataaaaatcatcatgcaatatcccatcccacacaagttaaagaatttagagtctagccaagtctaatacatgtcctggtgctcaataaccgcgagcacggctattcgaatagatttggtttactcacactgcagtggatgtacactttaccccgcactccgcgattatccaacacatgagcctcgtcccaatacatgagacacgtcacggcaaagcttttcgataacctcgcattggcagtacccgctccatgaacttaaatcctcatgcactctaggcgtccatgtttctagcagtgagaggagttctggcgctcccgggaaagagaagtctcacacgcatattaaattatggttcaagttaagttctctctctcacacactcatggcagtcctaccaatggcgacaccgatgtagggcatgcttctcggccctacctcaacggctgtcccatcgtagcgcacctgcctcactcaggggtgaaccatctatgcagggatactgcctccgctcggctatctaatccgctaggtctatacccattcgagaagtacggttgtacgggggtcgtttcatgcttaacttcatggctcggtccttaattgactggggacggtactagccttttccagataccacccaaatcctccgtccgccccagtcgaaaacagttgttttaattttatttctcctttcacaaatcatgtcatcaacatcatggcaatgtggcgctcatgtctccacatgccgcatctcaattaccttcccaaaggtaattgcccaagcatatagcatttgataaatatgagtatgcatgattctagaatagcattcctaagcaattgtcatagttgactagggactcatacgtaaacatggttacaaagatttaagggtaaacaataatcaaggcatggcataatcacaagtaggatgttcatcattgcatgcaattttatttgcaaacaaaacaatttcgcaattgggatcaacatgttcaaggaatagtgatgacttgccttgctcaggataatccttattattgatataatcttgatcaaccttcacctcctcgaagttgcagacgttgcctcacgactaaccgatacacaaggtctataatacgcgagaaaaaccaatattcaaacaacaatcaaatatgcgcaacaaaatgtactattcgtgttttctaatggatcccaatcatgctaaggctaaagtttcttaatctttctattgtcatcgtggcctatttaggagttaaccaacatagcatttatgggatacatatatatttggctaatcggtggtttagtctatcaaatggctatggaaggattatggctatgtatgcatctatctaaataggacggttatatactagaggttcttttgttagatggatttaggatcaatcaaacaattacagtgaattatttgtattattattttattgatggaagctttactttaattatgaacatattttacttgccattataaattataaaagggctaataattatccatgctctatatgttaaattcgggaagtttataatattatagttacagattatctcttaatgaacaatccggagttacaattgaactatgaacatatgaggtcaagatttataattagtacttatctactattcatgtttgttatatactccccagtttaatatatgaaaaagataaattaattgtgtaactataatgggatgtacaatatatgtgtgcaacaacgtataaggttttggtcgcctactgtacatgagcttatttagaaagtgtactacccaatgctccaagtgattcctaaatatattgtagtttaattatacattagctagtttctatgagtgatattgtatatgtgatgcgacaagtttaagcattggttctattgggttactaataagtggtaatcaatttaggcatatatatgctattctatatggtattgcatcgattaatttacttagtgattcctccacatctagctctgttatgattctcctaaacaggttaaagattcatctatgtgtgtttagattttagttacataatcataaggctatacttgatttaaataacctataagccatggatttaattatatggccatcgaatattaaataagtactagtattttcctatacatccattaatttgaaggattgattataactaatttatttagttgctacagtgacaagacatgttaaagataattatgctactgtacaatatccatttttattcattggcacactatttaggttaactattatctaatcatttgatattaattaatttataattataagtatattttgttaaatagtgaattatatatcattggagggcttatgaatttagatgaatttaggttcaagtttcactcaaatccgagttaaaatgaataagttatgctagtgtaaagattcaaatttgaattaatccgagaaattgcgaaaagctgctgttcataaacgatttatttttaatccaagacatatccacagccttgtaccaactgacaagtgggaccccgggtttatttctttttcctaccgaattattttctaaagggaaataggaagagctaatgacaagtggggcccacatgtcatagactcgagaccataaaacttctataattagattctaattattttaaattttctaaacttccctaatctccctctaatttactttttatttccttttcctttttctccctttccctttttttttctttcctttctttttcttttctttctctccttttctcttcttttctttctctcctcccggctcctttctatctctctctctcggctctttgcttccccgggccgcgacggcagtgggcgcgaggtggagggggggggaagacggctcaccggcggcggcggtggcggcgacgacggcgacggcggcgcaaggcggcgacgcacggcgcggcggcttcgaaggtggcggcgcggcggcacgacaacggcagcgcggcggcgcgacgacggcggcgcgtggagaaggggaagagggagaagaggagggaatggagtggggtggagaaggggggattgggccggggtctttataggggagaggggaagaaagagaggggaaggagggggaagggtgaaacgacggcggcgcggcggcgcggggcgcgaggtggcgggctcgcggcgcgaggcgacgagacggcgcgcggcgcggcagcggcgatgggacgcgcgcggcgacgggacgtcgatggcgacggcgacagcggtagcgcgcggctcggggcgggatgcgatgggcggcgacacgacggcacggcgcgacagcgacgataggacggcgcggcgcggcgcggcgcgggcttgacggcgacggcggcgacgtgacggcgcgaggcgcgcgggcggagatgacgacggtgcggcgcggctcagggcgcaaggcggcgtggcacgtggcagcggcgcggggcgcgaggcagcgggcgcgcggcgcgaggcgacgggatggcgacggcgacggcgcggcagcggtggttcgcggcgcgaggcggcgatgggacgcacgcgcggcgcgagggggaacgcgacggtgacgacgcggccgtggcgatgagatggcgacggcggcgcggcggcaggcgacgatggcgacggtgcgcggcggctggcgacggagagagggggaaagaggaggagctgggttaggggaccccgtcgaacaccttaggtgcaatgaactgtgccgttttctaattaacccgattttagagtaatttccatataaatttgattccacaattcctaattttgcatatatgcattttactcaatatttgtgttatcttatctaatgaattcaccctagattaatattactcatattttatttatataatttatttgaatttttaattagggttaattcttattattgttatatatttttcaaagttttcctatttttcttcttttagggttttggttgatttataaattgagaaaagttgcaaattaaatttgtatttactcccaaacatttaggtgaccgtattaagtgttcaaatgtgaatttgcccaaaatttaatattgtccaatatttaaggtttattaaagattctataattttctaatgagaccgttattaacacaatagcacattagctcaatttatctatatgttagtttattttatatggaggggtttaatatatcaaatttcaatccctaaatgcaagtaggaacttggtgcaaaatcgatgtacatatcgaattaaatactcccgtaaatctattatatatacagagaactcagtttatttgaatgatcatcatttcatgtgtacacatattatggcacccacctacattattcaaatattttaatatttgataaaataggttaataataacttttcttttatttgattttaatatcttgtgcataattatttgtaggattaaatatattcccgtaaattatatctattgcttaaatgtagttcttttctttactttcttggtgatcatttacggtttggcaagcaatagcaatcataacaaccagcatgatgcaaaagttttgaaaagttcgaaattttcgtgattttcattgtcttgaattttcaggatgttacaaacaagctgtaagaacccttcccatcgatgacaaagaacgttgtagggatggttttgttgccgactgtcagctccacattcaaaactcctttggtctttgatggattgccaccaaaatccttaagtaccatatttgtcttgatgagatcctcagtatttctgcccaactttctgaacgtagcataaggcatcaaatttactatagccccaccatcgaccatcatcttggacatcggcttcccattgacataaccatttatatacaacggtttgagatgccaattctctgtaccctctggcttctcgaagactgcttgctctggtgacaaaatcaatttagccgattcctcttcaacctcatcgacatcggcttgcttgatcccaaactctgcaggcaacgtaaaaaccatgttaaccgatgcggttacaatacttttccctttggccaatctctttgcttcatcggttgcgccctcatcggctacaggagcttgtttcttaacgcgccactcctgctttggctttgttttctttagccgatgattgatttcttgttcgacctcctgaaaacgctccctgttcctcaatctttgaacccttcttttctgattctttgtaaatataccagaaggacaccattgagtcttcctatcttcattgtcttcttggttacaaccttggttcaccgggcccaacctttgatgaacaggaactcttgcttgccctagccgattgcctctgttatacgatcggcttgaactttctgcaacattgctgcacccaggacagtcttcaatagacagcagcctcataccctcattccaacaaaatctaaagaactcacaaccccaatgaggatcaaagccatcatcatcttcttcgtaacgcttttcctgctgcctgtcatatttcttctgatacttattgataatctaagctgaattcacctgaaaaccttttgcacgtcctccattggctgttcggccagctgtatgcaccgtattgacaggaaaaggattaccatcaaccttcatcggcctcttagaatcatcaaacttgattttgcccccatcaatagctgcttggatctgctgcctgaagattttgcaatcattagtagtatgagacctagaattatgccacttgcaatacctcttcttgcccaattcttcagccgatggaattgtatgaccagcaggaagttgaatctgcttctctcagagtagtaaatccaaaatcttgtcagccttggtaatatcaaagtcatacctctcctcttttccagaattcttcacccattggcacggtataacctttttgcttcttacccattcggccgccgctatttcggagtcatcatcgtcatcatcatccgatccatatatgtaaggacaaacatgattaacctttctagagttcttcctagcctttgcaaacctctgttcatgcagggttactttctacgtaagatgcgacaagctatcaaactcttcagatgagaatttctccctgatcggagcaatcataccctgaaaagccaaatcgctaactgagcatcagtcaaactcaagctatagcacttattcctcatctctctgaatctctgaatatactcatgcacaggctcatcatgtctttgcttgattgttgttaaatcagacaatttcatctcatgtaccccactgtagaaagagctgtgaaaatgcttctccaaatcggcccaactgttaatcgacccatatggcaaagaagaaaaccaagtgaaagctgatccagacaaagacaaccggaacaacctaaccctcgaggcatccacagccgatgcttcaccacactaagctaaaaatcggctaatgtgttcataagttgatgtgctatcctgtcctgagaatttggaaaagtctggaactttaaaccgattaggtagaggaactctctcaaaccattcagggtaaggctgtcggtacaaatttccagcgtcttttggcctaagcccaaactgctccttcataacatctgcaatcatatcggcccatggtcgttgctgaggtgctccttgaggttgctgaggcatgggctcgaattgattgtattgaggaacaaactaaggttgagccaatcctccctgttggtattgaacttgcggtgatggaggctgatactgataattcaaattgcccccctggtaattctgaaaatccggctaaatattgcacaccaaatgcttgggaacaacttgaggtatcactgtttgatatggttgcacattatgaactaagtgctctggaaccacttgattcgcagcatgctgtccaggctgattaccaggcgttgcaaacccagccgatgcattcatcaggccttgctgctgaatcggctgaatgacctgttgccttaatggcgtctgctgaatcggttgcaaaacctgccgttttggtggcgtttgctgaactggttgcacaaactgttggattaggtttgtttgttgaatcggctgcacaacctgctgccttggtggtgtttgttaagtcggctgctgctgggctggatcaacagtatgttgaggaggtaagaacatagatgcaacctattcttgtgttagccgattcacattctgtccactatgttgtggttgttctctcaccagcaaccggggattaactaattggcctggagccaatggtggtgcagcaagtgtaggaaccaatacttgtgccgtcggttgagccgatggtgcattaagagagattgactggacaactggttgattatcagtgattaatggccgataatttgggaacattcctcctggtagataaactggtcctgtagcttgatactcggccattgaaccatcaaccattgttttcacgatgtttgacaaagtattgactaatattccagactgattgatcaaagcatggtgcacggcatagtcaacctgatgttggaagttgttaaactgtaactgtgccgtattgccatcttgattagggccttcaccttgaactccgtgagcaccatcaccttgaacaccctgtactccttgagagctatcaccctgatttccttgagaaccatctgcagcacctttattacttggttgagccgaaccatctggagcttgtttcccttctccatccttagaagaaccggtcccaggaacatcagcaactaccttcacgatatacttctgcaccactgtccccttgcgggtctgcatgaatgagtttaagaactggttccgtgcttgctgcatcattgcgtcaaaatctttttgttgatcaggtgtcaacttgtctggagtgatggtcacgatgttgccttcattaacctcagataagctcagctgctggatttttttctttaacagaacctggactagccaaggacggcgatggcggcagtttctcggtcatggggaaaactgctgttgacttctaat

SEQ ID NO: 27017 - DNA, 7656 bp, Oryza sativa
cttctaatcggtcccaccgggcatgccaaaagcatgttgatgaaaaacacgaggcctggcagatctgcttaactccagtgcaggtcgaaaactcgccttcgggtatgctagcgtgccagttgatttgatcctgcaatcaacaaggaaaaaagacaaagaaactgcagttaaacctataaacgatagccgatcggctaagtgccgatgacatatcatttatcttggagccgatgtcatatatgtatcgatcggcagtcataaataattatgaaggaactaaatctactcgatcggctgtagatattaacaatatatactcctcatatcgatatatacttaaatcaagtgattggaatagatcggtcgtcatgccgagacagtataaatcacttagatcgaaatatatattaataatgggactatatatgttcatagcatagccgatcaaatagatctagcatgtaccggctaatactccgataccactctatactaagatattaaagcaagtagaatatactaaacaaaggcctaatatatgtaaatgcaacaagatcttagcatagagggcagatctaacatatcaacgaagcatatagaataaatgtagttaaatcaggtaagatcggctgaaaccccgatactaccctaatcggcaaccagaaggcaggctagagactgatattctaagcacgacttaatagatcaaactcaactgatgcagcattaagtatgaaaagaagaccaatatctacacaatcaagccgctggaagtttcatagagtggtggatatcctatataatataaatcaacatcgatgtctaacctaatcggctgccctctaccgacagatgttagccgattgtaggttagatagcgatattgccagagattatgtaagatatatcataactcgacgaattacataaacaagattagagtatcataaagatggaagcactaatcccaagaacgcaagccgtcataacaagttttacctcttgttgaagatcgaaaccgatgcagctcaacccgaaagcaagaactcgtcgaaataaaactaaagcaaaaagggtggcgatgcgccgagattgtattgaacgtgtgtatccactgattacatggggttcggggcctatttatacccgaaaattacagactatgtccatctcggacacgactcttatctctaacaaactctaagataccataagtctttacggcagacttttgcccaaacatatctctaagaaaattacataaaatatcctaattaatagatacaattgccttctcaggactctatccatacgtggcaatcatcttgaagcatatcgactcaacccgatgtcgtacaccaagtcgcattgtcggaatcggctgtatcacttaacccagtctgactcggacttagccgatcccaatcatagcagatccggactccagccgattcttactctatttccgcgatgatcctcatctttgattccgcttcgattcaatctttttctccgatactaatattaccaaatttggtcgttaatagtgccgtgcctctctactgccgccgcccagccatacggcaaccaccacgtgcacgcgccgccgtcgccatccaatcagagaatgaagtcggcgccgtcttttcttctttcacgtcagcgtcgccgtagccgagtcgatgaccgcctctacaaccgccttcggcaactgacctccgcgacctataaatagacgatgaggtcatcccttttcccctccacaccatccgagctcttcgagctctgtctttctctctctcttcctcaagactggctgccgccgccatcggccgatctctctcaccagagcaccactaaccaaatcctctcaccaccaaccttgccttactctggcgaacccatttttccacttttccccttctctttcgtcccatatcaagccccaccggagctctctctctcctgcctgttcacggcttgtgctcgtcgttccggccattcccttaaccccctctgccggccacttccttccctaggtgtgctgtagccgggaactccaccagccgccagcgtcgccgccttccgactaccggagccccgacgcccctctcctcctcctctcttttcgactgaagagaagaaggaagagacgggaagaagaagaagagaaagaaaaagaaaaagaaaagcctggcaggtgggtcccctgcacagtaactttccttattttccctatttaattcaaatcctattctttagaagcccatcttatataccgaattcaaggtaaaaaatcaagcatatgattgggccacgtggctccctaagattttagggtttgctcctttgaaaattagccacgtgtcccgtgagattcagctagagcgtcgattgtgcaatgtctcatctcttctattaatctaaagctagccattcttctagcgttttattggtccatgtggcatgtttcattcgtccagcctctcgattattccggacactggaccgtgaaaatgaaaaagaaaaagaaaagaaaagccattggttcattcactggctgtcatgggctgtacagcccagtcacgcatgactgcactaggcctggtcatctagcgttgttgctacagcatttgcacattgcactttaccttctcgggctaattaattagtaataacacaaacatgaccaaacaaaaataggaaaaaggaaggtagaaaaaagtataaataattttgtaaaaaaaatcttcaaaacataatatattgatatcatgtatttatataaaataaataataatcgggaaaaactaaatatcaaatataaagtgaaagagattggatgagaatttgttcaaatataaactaagaaccgtttcttcaaatacgcactttatcattgatactatatgtacgattttttggttaatgaaatcacaacaatttttaggaaacataactttaaatttttctaatagagtgtaacatacccaaaattttaggacttaaaaatttgttgtcaaaatagttagaggttaacttctccaattttgagagccaaaaatttccgttttaatttaggtgatgaccaacttaaaccattgcatgattaaaatttgagaacaaaacaaaaccttttcattcccagcattagactagaaatgtcatcaagcatttgagcatacatgtgcataatgcatgcctaggcttgaatccattgtgcatttggttttggtatcgcttttcataataggtctcatgagcataaattaaaagggttaaaactactaaacaaaactatagttaatattgggtgataacatgtggacttaatattaaattctaatatcattttctcagcccaaaagaagtttaatgtaaaccctataataatattagattcaattatgaagtaggaacacatattcaaagaaaggttattctaattctttagaataatctatgcaagataaaatcatggaaaaatttatgtaaactatgtttagctcaagcaattcactataatattggtacaggttaatagctaagtttaataccacaaattaatcagtcaaatcagacaactaaaagaaatcaaattaaactttaatcggctaaagccatacttcatccaaaagtacatttaactgcacataagtgaatatagaaaataatttattcaaatactagattatttatcatgcctaaatgtaatttttctagaattttcctcctctgtttaagcctcctaaaaattcaatctagctttctaatagcccatctttgtttaatttctgtgagcaatctacccattatttttgagtgcaaccaaagaaaatgaaatctaggtgtaatcatttacctccagtaaaatcaacactaattaatttggtccacacattaaattatggagttacaaagtcagaggagaaaataattccgaaaattaatctaaaaatcaagtttacccagtcttctacccatatctctctccctagcctagtttccatcgagttggccccacttgtcagtgccttaggctagcttcagccctgtccatcacttcctccactgctccagccgagagagggagagattgagcgagccgacgcgtggccacaacgtgtcgtcgatctcggtttcccttttctcgctctctactcctcccagatgcgtcgccattctccattcaacactcagagccgaagaaaccgagggaggaggttctctgcctctccatcgctccaaaccttgccgccagccgtggagacgacgaccatcgccatctccgtttgagtcaaggtcacctccatctctttcacgttcccatctctccacacaatgccgagcattttgctcttttgacctaaacccctctcgtgcagtgcatcgccgggaacgcaagccacgccgacaacgccctggagcacgcaccggagtgccgccgcttcaaccatcatcgtcgtccggccattctcgaccacctcggagcaagctgctgcgccatcgtcatcgcctcaacctcctcttcaatacgcctcaagaaccccagccggagatgtgaaggactcggagaacgcatcttttcttcactaccgccgatctagaatcgcctccgccgtcatcattgattaccgctgcctcggtgagccattgttcgattcctcacgcatacaccatctccttgacctcacaaacctcgtgcatgcttgcttgtagcagctcatcgtcccgttcgagccgtcgtcgttcacccgaggaggaacgccgtcgccgagccgttccacaagtcaccgctgccgccaagacctcgacaaccctagctcgacccacggtgagcatcctgaaggctagaagaccacatgcatgcatccttttttgttcggaatcgacttccatccacacatgcgctttcaccccaagaaccaccgccgctcacactcgccatcggcgctactccaatgtcccctaaccaagaaaactagaggaatggaatcgcaagaacatgctcttcattttatcttttaaccccaactccaaccgagccaccaatcgccgccggtgaaccctggatcgagctcagccatggctgctctgcctctgtgcgtgtgaaaaaggtgtcagggacttcattttgagaatttaaataactataaggttcattacgtaatgttcccaatcaatgacatatggacctaggactgcgggttgatttcctgaaatcctaggggcctttttgcatattggcctgatactgcctgatgaaccccatgagtttaaaatttgaaaaatgtaaaaagataatactaaaagctttatattttcaacaggaaagcatgtaaacttataaaatccataacaaattgaaaacaactcattttagagtaaatcaaatttctgtgaactcaccaaatcatgaactttagagttattgcataaaactagacattcactgtacaaactttgtctctaaaattggtttaagataaatcatacataaaacatgtacaaacttataaaatacatagaaaattcatctcaactcattttgaaacaaactcaaaaactgcagattcatcatcatgcactctctgattaggtgaaataaaagtaattacttactttgcatcaaatgcctctaaaactattatctctataattattagttttagataagctaaactttagaaattcatgtagaacccaatttagcttcaatttgaataaacttaagttctgtaggatcaccaaaacacgtatttccatgttatgaaataagattatatacttactgtgtagtaaaagtctctaaatattcatataaggatttactaacatagagcaacctttaatttgtaaaacttgtagaaaattcatttttagtccaaatgaaatgaacaaagtttccatagaaccagcaaatagttagcttcaacatagtaaaataaaatattgcaccttttgaacatattatagctctaatctttaaatagataacctaggagttaatcacctagtaatggttaagcaaaatatatgtgtgaggtagttaaaaaaaatgcattctagctatgaataaaccaaaataaaacttgttagaccagagaggccatagttccatccctatccactaaaacttagaagaacttagctcatataacaatttctaggttaatataatatattgctagtttagtttagagcatctctagtttataaaatatgaactatagtagtaaagaccataaacatgtgaactaaaaatgttttagttaactaaattattccttttattcaacttaaataggaagtagcatgttctgaacctataactcaaaagtcatgaacatataaaacactatatgcctaaaacacgttgtaacttgtaaaatctataagaaaatcattataactccaaaaattgtgaaaccaaatgcattagtcttagaaaacacacgtctacacccctgtgaagtctaatctagtaaaaatcactttacaaaagtatttcataacactacctaagactatactactataaaccgataagacttctaaaattcataactccctaatggaataagataaaataaaaattctttcacctaaattcattttagaccagtacctaatcactgtgcataaatcatgcattttagggcattttggatttttagctcttttggtgtttcattgcatatcgtgtcctttatctagataattgcataatcggtgaaggagtggattaggtgctaacatttctctgatcaaggcaagttttctcctcccatcctttgaacacattgaatcccatgatttgaggaatgaaaatgtttgtttgcaaagctgcatgtgaacttagattatatcggtatttaaaaatgggttaaggtagttacgacctatttgctgcataccccaccttgaataattgatcgtcttgctgtttgaacccctagaaatggttagagtacactctttgtgctcaaatgggtttatatatgctctatttgcaactacttgcttagccatgcttagaactatgcaaatgctcattccatctataattaaaatatgattttgatacatgaacctttgctggaataaaatgaatatgatgggtatttgtgaactaaaatgtgtaaaatgtgattttatacttgggcggcaagtggtgtgcatatggtgttagttgcataccgatagggggagtgtttgcccaagtccataaggaccaaacttgtgtcacccatttaaagttattcgtacatccacatgtgctagtatgggatggcctaagctgagtaatctatttaggactagccttgcattctggtaggccggtgtatatgagttcgtataattaagaggagcttcctatttaccccgacgtggtagtttaggtgactaagcgtgtccaatacaacggtattgtgccacgtggtgggttcccgtcgtgttcgccatcacggcgttaagtttaaggcatgggcccaccacttaacggttctaggtatattccaagtatacctaggatggaggaacacgtatcgtgctggtgcaaggctaggctctaagtagtgtaaaggcttcgttatgacctctagatcacattcaacatgaagagtgtggtggagtcttgcaaactcaaaacaa

SEQ ID NO: 27018 - DNA, 18374 bp, Oryza sativa
cgcatggggactagagttcatggaacaggtaccactgatgttagtaactgaaaagctttgccatgacaaggctaatgtgtttggcacgtcatggattgtgggtaaagcgtacatctactgcagtatgaatatcctcaaaactattcgaatagccgtgctcacggttatcgggcattgggactcactatggcatcttggatagaaatctaattcgaaattttattaaatattgttgcatttaaaacattacaggttttctacttctgcattctctgctttctgcaagtaaacctagctttacacagatattatcatttcatacattcattgttgattaaatataatagcttgttgagtacgttgtactcacccttgcttcaatccccttttttagagtccattaggagtttgtgccaaagctgggagtttaatcatataagttagtttcatttcaacctaatcctcaagtctagattagatagatggtttaagtctatagcaaaacagcagagttaggtcattctaaagcttctgctgtaatagttagccacaatcttgtaaataccctattactttatgtaataatctctccttcaaagctatgtctaaatgtatgcaaagacgatccagattattgaacttgtatcaatctactgatccagggcttgatacagtctaaacatgtcggtttccgaatcattagttttgggatccgacaccttttggggtcacccaaaggtgaagtgctacagcggtattccgtgcgcttgcggaattatctgtgatcataagaaataccaacaacctcatgtaataatgcttgaaggcattgagttatgtcttgccttgcgccttaagatttctcgcggcttcagcgtagctatttgggtccacgtcagctccttggattcgatagtcgaacttgctgtacggtctaacgtacgaatacgaaaaagatagcaaataaagcctataagcaaattgctacaaagaaacgataaaaccaaggaataaataaaattggagcaaggagaggggaaaaaaggaatgggttcaaaataattttttgtttgaaaaacaaaagagaggttttggtatctcaaggctgagaatcaaacaaaaacaaagaaaggataaaatgggtaggcagggtttattcggtggatttggttttctagtcggtgctatagagtaaggcaacacgacggctagatatttggatttgttagccgatgctaagatgggcagcatagcggctaaatatttggctcgtctagtcgatgctacagttaagcagcacaatggctagagagttgggaagtttgtacgggtttgaaaagtgttactctacagtcatgagtgacagcagagcggttaggagcgcacatagctcaaggactagtgtgcggcggttgtggaggtcgggagagcagtgaaacttcgaccactttacgcgtcgaggcgtggggtgcaagaagtatcactttgaccttcggattaggttataccgggctttacaaccaacgatttgacgtcggggttcgagaccacgcgaacttcttcacaaaaggcgtaaagttcccacaacggccttttagtggctaaaggatggtaaaagaataattgaaaatttagagataaaaaatggtctttgaataaatcaaaggaatttaaatttaaagaaaggtttttaaattcaaaagtatttaaatgaatttcaaattcagaaattaaataaataaaaggtgttggcggatggcatgaggctcttcgaccagatctgccgaaacccgtggcgaaggctatggagcaagaacggcgtgaggcgaagagtcgcgcgagggccttgccaggccagggacgtctcgggcgaagggtgcaaggcgaagactatctgccgaaggaagacgacttcaccatgtcggcaagtttgcccccacaagggccgaggaagcctttctggcccatcaagcctaagggccggcgatcgctagacggcccatcaggggcccatgagaccctataacattatgtacccctgtaaatgtccctttcatatgggtaatcatgtaaattcccctgtacaacctagatcctagtagtaagagcctgcaacagggctataaatagcggccagttaacgggggatgtaacgggggatcctagggccatgtaacgggggatcccaagtgaaattcaaaatttagtacacttcattttcccaaccactgttgagtaaccacgtccttcgacgtatacagttgtcgtttcgacaacagctggcgccgaccgtggggactccgagcgaaaccactaagagcgaatgccaccgaagagggtcgtgaaggagaaggtcgtcaggcggaaggagagcgacgccggaccggacatggccgccgaggaaggagcagagccttcggcatccgtggccgaagatggagaaggacaagcgccatcacagccgccttcggcccccgcgccatcacaaccgtcttcggcccccgcaacctcagtgcaagtgccgaacacggccgacgtggcgaaggcggctgcgacggcaagggcactccagaccagggcggagaacctttcaacaaaccaactggtggtgcctcaagccgccccatcacagccggcggcgccgactgcgcccgccgttgtacaggcccaaatcagcctggaccccgaagcgcaagccgaagccgacatggaagccatgcggcagaacatgacacggctccaagacatgcttcgccaaatgcaagaacaacaacaagcatacgaggcgacaaggcggaccaaggccacgtcggctgcaatccttcagtattcggcaggctatgccccacctcaagtccggccgcaagtggtgacccagccttctccgccactagccgcacagccgccggtgtacttcgccgggcagcatcaaccacctggccaagcgacacaaacagtggcggaaggggcttcggctctgcaggcgcaactccaagctttccttcagcaactcaaccaaccccactacatttcaagtacaaccccatcggctcacccggtgggggatacaagtcaaggtgcgcctaattggttgccaccgattcagccaggctcgggaccttcgccatggagtcaaggacagcagttcgacttcggcaacactgctcaggtgccaaccgttcggcagcaagttccaaccccaggcttcggaacaaaccaagcaccaaaccaagctgccatgatgtagtcgcagccaatctttgacccatccatggcggcccagcaagtaccaccagttggagccgggcagtcgaatgccgcggcccaactccacgcacaagctgcgatttcgcccttcgccacaccgtacccgcagcaaggtgcggtaaacagggcgggaggcgaaaaggggctgccgctgagtgggggaatcaagactcgtccaatcccgccccagttcaagttcccacctgtcccgcgttactgacccgaaggagttcctctccatctacgagtcagcaatcgaagcggctcatggtgacgaaaataccaaggcgaaggtaatatatctcgctctagacggcatcgcccgttcttggtatttcaatttaccagccaatagcatttactcatgggagcaattgcgcgatgtttttgtccttaactttcgaggcacctataaggagccgaagacgcagcaacaccttcttggcattcgccaaaggccgggggagtcgataagggagtacatgcgtcgcttctcgcaagcccggtgccaagttcaagacataaccgaggcgtcggttataaacgccgcttcggccggtctgcttgagggcgaactaacaagaaaaatcaccaacaaggaaccgcagacgctcgagcacctacttcgcatcattgacgggttcgcaaggggcgaggaggattctaagcgacggtaagctatacaagctaagtacgataaagccttcgtcgccgctgctcaagctcaagcacaagttcaaattgccgatccacctcccctctttgttcgccagtctcagccggcgatccagggacagccgccaaggagaccgaaccgcatgagcggcccaagcacacgccgaagcccacccctcacggcaagataacaaaagtgcagatggatgatgccgaccccacaaagctcgtatcactggggggcgacatgggcgaagaagaagttgagagcatccaagaggtgctcaaaaagaacatcgatatcttcgcctggagccctaacgaggtggggggcgtcccggcggatctcatcatgcatcacttagcagtcaagccgaatattaagccaagaaagcaaaagttgcgcaagatgtctgccgatcgccaagaagcggcgaagaccgaagtacaaaaattactctgggcgggggttattcaagagattgaccaaccggagtggttggcgaatccagtgctggtgcggaagtcaaatggcaaatggcgcatgtgtgtcgatttcacagacctgaacaaggtatgtccgaaagacgatttccccttgccgcgaatcgaccagcttgtggattcaacagctggatgcgagctcatgagtttcctggatgcatattccggtcaccaccagatccacatgaacccgctcgacatccccaaaacatccttcatcactccattcggcacattttgtcacctcaggatgcctttcggcttaaggaacgcaggagcaaccttcgccaggctggtgtacaaggtccttggcaagcagctggggcgaaaagtggaagcttacgtcgacgacatcgtcgtaaaaagccgcaaggctttcgaccatgcgttcgacctgcaagagacgttcgacagcttgcgcgcggcaggcataaagcagaatccggagaagtgcgttttcagcgtccgcgtaggcaagttgttagatttccttgtttccgaaaggggcatcgaggcgaatcccgagaaaatcaatgccatccagcaaatgaagcctccgtcaagcgtacatgaagtacaaaagcttacaggccgaattgcagcactcagtcgattcctctcaaaggcggccgaaagaggtttgcccttcttcaagaccctccggggtgcgggaaagtttaattggacaccagagtgcaaagcagcattcgatgagctaaagcaatacttgcaaagcccgccagctttgataagcccatccccaggaagcgaactgctattatacttggtagcttcgccggtggcagtcagtgctgcactcgtccaagaaacagagtccggacagaaaccggtctacttcgtctccgaagcactgcaaggagcgaagacaaggtacattgaaatgaaaaagcttgcttacgctctagtaatggcttcgcgcaagcttaagcactacttccaggcccacaaagtcatagtcccatcacagtaccccttgggcgaaatactccgagggaaggaagtcactggccggctcagcaagtgggcggcagagctatccccgttcgacttgcattttgttgcacgctctgctatcaagtctcaagtgctagctgacttcgtagctgaatggacactagtacttgcccccgaccccgagcccaacgaccagttctgggtgatgtgctctgacggttcgtggtcgcacaagggggcaggcgttgcggcagtcctcttttcgccgaatggtgtgccgatttggtacgcagcgagattgcagttcgacacaaccaacaatgcagcagaatacgaagccgttctaactgactccaagttggtagtaggccatgttgacaaatccttcgaggcaaaagaagagggaatgaagaggtatctggaggctgttcggtccatggaaaaaagcttcaccggcataacggtcgaacacttgcctagagaccaaaacgtggaagcagacgccttggcgaaatccgctgcttgtggtggcccacattcgcctggcatctttttcgaagtcctacatgctccaagtgtgcccatggacagctcggaagtcatgacaatcgaccaagagaaactgggcgaagacctatatgactggcgaaccccatttgtgaaacaccttgaaactggttggcttctggtagacgaagcagaagcgaagcgtttgcaactcagagccacgaagtataggatggtctcgggtcagctttaccgctccggggtacttcaacccttacttcgttgcatctcttttgccgaaggcgaagaaatggcaaaggaaatacatcaggggctatgtggcgcgcaccaggctgcaagaagagtggcctccaaagtatttagacaaggagtttattggcccactgtgttgaaagtctgtgttgagcaaatcaagaagtgcgaaagttgccagcgtcatggccgaagccatgccgcgccccagtatgatctgcagcccattgcaccaatatggcccttcgccagatggggaccggacattattgggccattcccggtggcacgaaacgggtataaattcacaattgtagctgtggaatatttctctcgatggatcgaagtcgaacccccttggggcaatcacttcggcagcagtacagaagtttgtatggaaaaacattgtttgccgtttcggggtgccaaaagagttcattactgacaacggcaagcagtttgactccgacaagttcagagaaatgtgcgaagggcttaacctagaaatcaggttcgcgtcggtcgcgcacccacagtcaaatggggcggccgaacgtacaaatagcaagatcctagaagcactaaagaaaagacttgagggggcggcgaaaggcaaatggccagaagaattgttatcggttctttgggcccttcggacgacccccacaagaccaaccaagtttagcccatttatgcttctttatggcgatgaggcaatgaccccagcggagctaggggctaactcaccaagggttatgttctccgggggcaaagaggggcgcgaggtatcactcgaactcttggaaggtgtaagggtcgaagcgctcgagcacttgcacaagtacgccacaagcacttcggcaacttacaacaaaaaagtccgacccacggagctaatgcctggtcatctcgtcctaaggaaaaaggcgaacccagtagcggttggcaagcttgaatcaaagtgggaaggaccatatacatcatcaaacacaagtccaggatgggatcttttcgcctagcgacactcgaaggcgaggagttcgaccattcctggaacgccgcctccctcaagcgcttctacatctagaatgggtggcacccaaatcgccaacttgtaaaaatgtacatactgtcatgtaagcctttcggcactatgtaagcctttcggcaagaaaaaaaacgaaaaaagagaagagaaaaagaaaaaaaaaactggatgtagggctattatccaccatggaggcccgaaccagtataaaatctctgtgtcctccgccttctttttatttcttttcgtgtgattgataatttgtggaaaaaccccaaggcaaacgcctgattagtgaaaaaggccaggggggcgaaacgaatcggccgaagcattgctcgccgaacgttgaaaccgcaacagcttgtctcggaaaataaatagcctaacgacgttacgaccgatcagcataaaagcaaaagcgtttctctcgacacagaacgctacagatcgaaaacgaacgacgaaaagctgaaaagtcactacacctatttcgctactatatgcaaaggggctggcatgttccgacctaacaaaagcacaaagtgtgacgatgcgaaaaatagcgaaaaggaaataaagcacgttctttattagcttcgaaaaaataatcgaagaatacaaggtttacaacccgatacaattcattttacaagtaaattacattttcgccccagtaatcattatccctccctaaggaatggtcggacgaactaggttcgtcatcactactaatatcatacacaaccttaagaggagtagggggcgaaacacagactaaactgtaacgacgctgaaagatcgattcctggcgtttagtcttctgatggttttgccaaaagcgagccatatcctccaaacgtcttgaatgaacaagatcgtaatcttctaaggttcgcccggggtgcgcccgcagccaattggcaaccttgaaaactttatagctgcgaccgtttatttccatttcgcgataaacaggccgaaatggacatcgcaccttcggcaaacccttcaatgccacaaatttctcgttttgacttcgccagctcccagaagggggccgaatgcatgattttcggcaaaccccctggtagacagtgcagaaaaggcaaaacacatcttgcatggtaagaataggcgaaagaaggggaaggtatggcataatgcaaaatgagcgaaataataatatgccaaagactttgatcattaaaaagtggttaaaatttcatacagtccaagtatgcaaaaaagccttttttaaggtctagcggcagtttgccgaatatacaatggttcgccacatctagcgaacaccaaaagaaaactatgaaaatctaagagaagggcggagggcctcacacctctgggtgatcctgggcatcgcctccaccccctccggctgccgcgccctcctcttctcaaatgtccgccgcctccgctttcgccagctgctccaaaaggtgcgccttagcggcggagcggccgtccttctgccaaaattgttttcgccacgcacgaagtgcaggcgaaatgtcttgcgcactgatttcccaatcccccttcgcgtacttggggaactcggcgatgtgctcgcagccgaactgttgcaggaggcccatggtaaaggccgctgacacgcgtgcacagcaatcgccgtatgcggtggtggagtctgaaaccgaaccaccagcctgttgggtccattcggagaagtcgaaggctgaggcatcttcggaggggacaccccgcaccttcgcgcccatatcaataagggcaaggcgaagcatttggcacgctgtccgcgcggactcggtggttttcaccatctcctgcgaaaaccgccgcgactcctctgcagcgcttgcttcggccttgcgaacctcctaccgaagagcctccatcttcggctcggtgaggttataataatctatgagcatggcggtgtgggccttctctttctccagttcggcctttaagcgatcaactttggccctagcttccttccctttctctagttccgattggagccgcttgttttcgaccttcgcctccttaagggtgttggcaagggcctccatctccaaatttttgcggcctagttcgtcatccttggcccgaagacggcttttgaacccatcaagtcgagctcgcacgattcgctccgttgagcagtgagccacaaggatctgggcgcagaatacgagcggggaagagaacaagtgtcaattttaaaaacaagatagaggaagagtaaagataaaaagggggggaaaaacgtacccgaacagccaggctttttatagcagagcacccctcgtcgaactcattcagttcggtgaacaagctcggggcgctggcgggcagtacaagattgcttaccccctccacaaatggaaggaggtccactcgcgtctcgaagtcgccaggggcgaagcggggtaccgagagcgaatattccgaagcgaacgtctcagcgaccgctttctttcccttcgcctccatcagcggcgaggcaaccggctgatgcggaggactgccgaatactttcgccgcggccatcacaatcctttccgcagaagccgaagccccagcggcggtactaccgtccactccagcggcgccaagtggaggaatgggggcggccgaaagatccaggctgcgaccagtgggcgaagtcggagtcccgtcggaggactcgtcatcgctaaaaacgcgagcgacatcgacgagtcctttctttttagccacctttttgacaggacctccctttgccgccgcgcccgaagagaacgcaactagggccttcgccccttctaaatccttccgacgaaggggggagctgttcgactccaccccattttcgttgtgaccaggacttggggtaggagtgtacctgggggtgtcggcgcggtcttcgactgcctcacccgcggccttatcagccacagcctccacctcctcctcttcctctccttcctcctcgccgtcacgttctttggcatcatcctcgtcgtcagcgtcggagtcaaacgaagcaggaacccttcgcttcttgggggcaagcttcacttgtccacgcatccactttcgtgaaggccctgcctcgtcgacggccttttggggattcgcccggggaggcagttcgccattgtaaacccggttcgcccgcctagccgcttgacgcgttaacagctgactatactcgacgaccgaaacatcgccgatcatcctgcgggcttcggcttcggcctggtcgagggtcaacactgaaaaattagagcgtgaagctacgtcaaaagtcaaataaggcgaaataacaaagcacagtagtatatagcaaaagaacagtcttactgtttgcccccttagggagtatcaggttcggcaaaccgtcgacttcttcgccttgttcaaccgcgacttgccatgactgggagaggggaaaaatttgaagcatacaaaattcctccaccaagtcacggcagctaaggcgggagcaaaccttccgcagtagaacgaaccgcgcctccatggtgccgtccacagcgatcttgggtctccggttcggcgcaatcgccctacgccggcaccggagggctttcgctgatttagaaccaacctcgaaggggatggtgtggtagaaccacctcgccatccaatggcggtcccacttcgacatagcagcgttcaccggccagagatcggaccgctcggggcgaacgttgaagttcacgctcccgaacacggtttttttcgttccagccggggtgatcaccatcttcgagttcacggtggcgaaaaatatggcgccaaagagctcggcgttgggctcaaacccggaagtccgacacgcccagtcgaagatagcgatccgaacaagcgccgacgggctcagctgcggaagttccacctcaaagaggcgaaggatctccggcaacaacacgttgcagggaaaccgtagccctgcctcaaaaaatacggcgaacaccaccgtccggttgtcgacaggtttcggcaccacggttttccctggggcgaaagcctgcccctcaaccaacgctccggagctgaccaacttcgccagctcgacgtcgtccacaagagagacccccccgaaaggcggtgctgtcgtcatcgactcggccgggatctggccctttcgccgaagtagggtttggcttacgtggagccatggcgaacggtgcgtttgcggtggcgaaaaaagagattcgaagaaacgcctgaggggtcgaaagatgctgtgaaaggaagagacggagaaagagagcgcgcacggtaaaatggcaagtgtggcggtgaaaaggaaagagcaacgggaatatatagcccgcccaagcgaccgttcgcctacccaccagtaataaagcgccacgtgtcgcaagggtaggtgaaacggtaaattcccgtcgaccgagcggcacagtaaaaagcccaagaaaggaaggcccaatactgttccgttcggcctaggaaaaaagaatatatataaccatcaatcgcacgaggcgaagcgcggcaaaataataccagctgcacaagtaacaaacttcatttgcaggaataatgtaggtttcggcaggagcatcggtcgaaagggggcgccacataccataccacatggtttacacggtctcggccgaagctccaatctcacccttgcccgcgaggggcctgttggcgaatggcatgaggctcttcgaccagatctgccgaaacccgtggcgaaggctatggagcaagaacggcgtgaggcgaagagtcgcacgagagccttgccaggccaggggcgtctcgggcgaagggtgcaaggcgaagactatctgccgaaggaagacgacttcgccatgtcggcaagttcgcccccgcaagggccgaggaagcctttccggcccatcaagcctaagggccggcgatcgctagacggcccatcaggggcccatgagaccctataacattatgtacccctgtaaatgtccctttcataagggtaatcatgtaaattcccctgtacaacctagatcctagtagtaagagcctgcaacagggctataaataaccccctagggccatgtaacgggggatcccaagtgaaattcaaaatttagtacacttcattttcccaaccactgttgagtaaccacgtccttcgacgtatgcagttgtcgtttcgacaacaaaaggtatttaaataacttaataaaatttagttcaaaaaggttttaaagaatggaaataaatgaatcaaagaaaagtatttaagaaaatttaaataaatttttttaaaaaatagaaaatttggtgtcaaaatgaagagtttgaaattagatgaattttgatcaaaggttcactggaattggatttgtggttggaaagatatgagtccctaaagattgaaaataaaataaaaggaaaaagggttactttataaaagtggggcccactgtcaagtgctccttcaacctctttttctcgtcttcttcttcctctcttctccttccagccgggtacagaggagagggagggagaagggcgtcggtgctccggtggttgaacggcctcgacgatggcgtccaagcgtgttcccgagcatcacgcacccggggagggtagaggaaggcagaggtaaagaggaggatggccggaacggcggcgacaagagcacagctccgacaacaagaggaggtggctgtggtggttggtttcggagggggaaagagaggggaaactagaaaaatgagttcacctcaccaaggcaagcccgatggcgcaagtatttggccagtggaactccggtgagggagatcggccgacggtaggtggcggcttgacatggatggagagaggctctgtttgtgtggagggaatgggtggtctcgccggctatttatagacggcaaaggtcggtttgcagaggagagggagaagggaaacacgacgccgacaaagtggagcggaagaaagcggcgccggcctcgccttttgattggctggccacgtcggttctactcgatggctgacgtcggcagggtgacgtcacagctgacgttggtgtcacgccatcagatacacgtgcatgcaacaaagatgatgcagagaatgggcctcatcgagttcggcccagtcgccaagtgagagcaaatccgaaatacattggaaggatctagactaagtaagggatataaatagtgtctaggagactagagagagggatgacttgtaactggaaataaatctatcccaattcttgtaattggaaataaatctatcccaattctgaaatccttcctctgtctcagctctgtctcaaactctgtttctttctcttactttctctccaagttgctgttcttcctttcgtttgatcttgcagattgggatcgtaacattttggtatcagagctcgtctcatccgggagaaaccacggttcaagacgcgattgcagaagcaggttgatgcgatggagaacaaggcggtagacttcgagaagatgctcgctgggatccagaactccatcggagcgatggcggcaaagcaggacgagactcaagtcatcgttcgccgaatggatcaaaccatgtcaagttggaagccacaagttgatgctgttgtcaagggattgcaagtcgagatggaggagttgaaggctcaggtggggcagctggagttgcagcatcaaggcggaggcaattcgtcgaacaacttgggtgcgacacaagcttcgtcctcggcaatcaaggatgaagtggagcgtcaggcacctctacttcccacgttgccagaatttctcgctgctgcagcgttgggagaatttggcttggatggccgccgccctgcttcaaactaccgggggaaagcacatgggatggtcaccacccttgtgccacctccggtcaaaagtacgtttcgatcaactacccctgttcgtcatgctttggatttttcggatgttttggggagagatgatcatgggggtggagaggatcgtgggtttaatcatcggttgcccaaattggattttccacattttgatgggagcgatcctcagaactggaggatgcgctgtgagcactattttggagtttatggcacgcatcctagtttgtgggtgagagtggcgaccatttattttatggggagagctgcatcctggttgcgatcatcaaaggctcatttgcagtttgaggattgggagattttttgtggagctgtagacaaaatgtttgatcgggatcaacattcgttgctcatccgacaaactgaacagctcaagcagactgggtcggtagaggagtattatgagaagtttgatgatttgatgaactagttgttgacctatgatccatatattaatcagaagagtatagtgcataggtttatggagggattgagggtagacataagaaatgcagttttgttacatcgtcctttagacctggagactgctcttgctatcgcttgtttgcaggaggaattaatggaagcccagaagagtaaggagattcgaaaatttggtgattctagtgcaagaattaagggggcttatcctttgccgttaccacctggcaaaagaattggagatgcacccaggaatctgccacgagcaattcctgatattggcaaggctaactcgaccactgacaagatcagtgcactgaaatcttatcgaagggcacaaggactatgctacttatgtgcagaaaagtggtcacctactcataagtgttcagggattgtgcaattgcaagctgttcaggagttatttgcaatgttttcagccgatcaacctgagcaagaattaagtgaatctgatggagaaggatcacagacactgatggcaatttctctgcaagccattcagggtactgttgctggttagacaattcgataccaagggctaattcagggttttgaaatcttggtgttggttgattctggaagttcttgtagttttatcaactctaggattggaactgatcttaaaggaatacaacctttaagagttcctttacaagttcgagtggccaatgggagtatacttcaatgtgaatctgaattgccaaatgccaagtgggaagtgcaggggaacactttccatactactttcaaggtgttacctctcaataactatgatgtgatattgggaatggactggttggagcaacatagtccaatggatattgattggcaaaagaaaactttaagtttacaaggaaatggaggcctagtgcaattacttggggttagttcagatattgctcattgcacagaattgtcttgtgcacaactatatgacatgcatgatcgaggttcagtagaagggatggttcagttgtgggaaattcaggacgagtccatgcaaccaattcctgaacaaattcaattgattctgtctgactttgcagaagtttttgaggaaccccgaggattaccaccttctcaagattgtgatcataccattcctttagttcctggagctcaaccagttaatgtaaggccttatcgttatacaccaattcagaaagatgagattgaaaaacaagttaaggagatgttggacaaaggactgattaagcctagtgctagcccattttgttcacctgtgctcttggtcaaaaagaaggatggatcatggcgattttgtgtggattacagacatttgaatgctatcacagtaaagaataagtatccattacctgtgatttatgaattattggatgaattatgatgaggacatcaacaccatcgatacatccatgtccccccatgtacagcatgatggtcctattacccgcgctcgtgcacgtcaactaaattatcaggtgagttctttcttgagttcatattcctcgtctttataccccggagacgcgtgcactcgtgttttactcaggaacgatggagaggatccaaaaggaagaggattcgcgcggggtggattcggactgcagggcagcgccaacttctgacggctgccacgacttcatgcgaactccgatttgggtgtgcaagtacttcatggaaagcttatcaagtctactttcaaatggatccagccacatgtccatatctgttctggagcggccgcaattgtcattttactcccgactattttctgtcaatggtgctgcgtcacctcttttggcccaatgggctgtgtatccaagttgggcccattaggggcgcgtcctagggttggagcacgaccctatggttgttcttcccctcttcttatagctctagtcgccgccaagaacaggcgggttttgatgatagagatagcttcttgctaccggctcgcagcgcgcgtgttggctaaaccgcccgtctgcctgtaatcggaaccccaccatattgtgtttgatagtgaaactttcatttttatctagcaatttcagtgcttgtcctacttgttcttgcttgttcttcgattgcttgcaggacgagtgccctcgtggccgggttgacgcgcaccacaagttcgcggcgaccattggagacggtgtatcggttgctaaggcgcagcgtctttggacagttgtagtcgggccgtgaacgtcgacttcatttaatcgagttatcccttacctctcatcgaaagatcaggccacaaaccctagcgggttcgcatcaggtggtatcagagcgtggttcatcggtgagagaatttacccttcccttcgtcattaatttttttttcctatagtccagaaaagaccaacaaaaaaaaatagtagattagttttcccgtgatcctatagaccattgtgcctttttactagtactgcttagttaaggcttgttgagttttcgattgcatcggttgtgttaatttgctggtcttagtgttaggcgatcagagtttcgagttcttgccaccatcgcacatcgccaccttcatcaattttgccgtcatcaccaccgtcaccaccgtcgcagtcacccaccaaatcactttctatttgtgtttgatctgttgccgatagcttttgtgagttgccttgtatcctgctgccactagaaaggaaatagaaccctgattcgagtgaccttccttaaaacagtcatatctttttcatacggactcgaaattaggcttataatatatccatggacatctacaaaaaaagttacatccgattctccccggctttgccgggttcggcaaatttaaaatcgccaaattcctcttgcaaaattctgtttttgtggcgagaagcttggggacctattcgcatagaactttgaaaataattctacaagcttcatactttgtccgtttgagataagattttctgtggttggttctagtgtgctcctggttgtgaaaaaaatatcaaaaaaaaaaaagttgtgcctctctcctcagcactagagagagcaagcaaaaaaaaaaacaaaaaaacaaaaagaggatccagcgagcacaccccaccattccccctttgtcaccaccttccaccaccggttcttgttttcgttgctgtttgggtttgtgttttgtggcgtcctttgtggttaggctcgcgtctctacttcgactagcctaggaccagcactgtacactatacccttgagcgattattcaatttgctttggctaatgtggtttctagttttctcttgagcattgctttcagcccaccaacagctccaccacaaacccgactacagcttgacaggtcttgttgctacagcaccgatacacctcgttccacggttgctaacttgtgggttgctgtccccctcctgtgggcaaggtaagaactggtaagagcttgtgagacaagctgcgagtaaagtgagagtgagcgtcttgcaaaagctacatcccaatagttgtgtagggcttacattacatcctccattgttttgttgtccttcatttctaaaccatggcaggtccagaggataaagatgaggaggctgcatctcattccccacgcaccaaaggcatcatccaatactttacaaggcaagtgaagcagcacacagaaggacttgatacagatttgcaggtgacaaatgagaagattggacaattggagtccacgcagatctccaccaacactaagcttacagggctggagacagcggtcgcccgcat

SEQ ID NO: 27019 - DNA, 4640 bp, Oryza sativa
tgacactagccttgctgctcttgtgaggcattttgatgctctcaatgctggaggcaatggtgggggtaatgacgatgacattgacggagagtacgtcgaggataatttggaggatgaatatattgctgacactgaacaagatgatcgagatgctcgagatcgtcgacggctacacaacaatcgacgaggtatgggtggtcgccgccgacgcgaggtacgcaacaatgatgatgctttttctaaaattaaatttaagattcctccttttgatggaaaatatgatcctgatgcgtacctctcttgggagattgctgttgaccaaaaatttgcatgccatgagtttcctgagagcactagagttagagctgctacgagtgagttcaccgattttgcttcggtttggtggatagaacatggcaagaaaaatcctaataacatgccacaaacttgggatgctttgaaacgggtcatgcgggctagatttgttccttcttactatgcacgtgacttgctgaataggttgcaacaattgagacagggtgcgaaaagtgtagaggaatattatcaggagttacaaatgggcttgcttcgttgtaatttagaggaaactgaggacgctgccatggctagatttttgggtgggttaaaccgcgagatttatgatatcgtagactataaagattacactaatatgacccgattgtttcatcttgcttgtaaggctgaaagggaagtgcagggacgacgtgctagtgccaaggctaatttttctgcaggtaaaacttcatcatggcagacacgcaccactcctccggccggccgtactgcttctccatcttccacacccacaactagtcgagcagcacctcctccatctagtgacaagtcagcgacaaaggctgctcagccagcaccgagtgcttcttcaatggcatccacaggccgaatgagagatgttcagtgccaccgttgcaagggctttgggcatgtgcagcgtgactgccctagcaagcgagttttggtagtcaaaaacgatggtgagtactcctctgctagtgatttcgatgatgatacacttgctttgcttgcggctgaccatgcagataatgagccaccggaagagcacattggggctgcatttgcggatcactatgagagcctcattgtgcagcgtgtccttagcgcacaaatggagaaggcggagcaaaatcagcgacacacgttgttccaaacaaagtgtgtcgtcaaagagcgttgttgccgcatgatcattgatggaggtagctgcaaaaacttggctagcagcgagatggtggagaagcttgcacttagcaccaaaccgcacccacatccatactacatccaatggctgaacaacagtggtaaggcgaaggtaacaaaactggtgcacattaattttgcaattggaaattaccatgatgttgttgaatgtgatgttgtgcccatgcaagcatgtaatattctgctaggtagaccatggcaatttgatagggattctatgcatcatggtaggtccaaccagtactcttttctgtaccatgataagaaaattgtgttgcatcccatgtctcctgaagatattttgcgtgatgatgttgctaaggctgccaaatccaaatgtgagagtgataaaaaagcccaatctgatggcaagaaacctgagacaatcaatttgaaacccaaatgcttacttgctactaaatctgatattaatgagttgattgcatcaccttcagttgcctatgctttggtatgcaaagatgctttgatttcacttcacgatatgcagcattctttgccccctgctgttgctaacattttgcaggagtactctgatgttttcccaaggaagtgccaccggggctgccaccggtgcgcggcattgagcatcaaatcgacttgatcccaggtgcttccctaccgaaccgtgcgccataccgaaccaaccctgaggaaaccaaggagattcagcgtcaagttcatgagttgcttgataaagggtatgtacgcgagtctcttagtccatgtgcggttccggtaattttggtaccaaagaaagatggttcatggcgtatgtgtgttgattgtagagctattaataacattaccattcgatatcgtcatcctattcctaggttagatgatatgcttgatgaattgagtggctctattgtgttctccaaagttgatttgcgtagtggttaccaccagattcgtatgaagtagggtgatgaatggaaaacagcatttaaaacgaagtttgggttgtatgagtggttagtgatgccttttggtttaactaatgcacccagcactttcatgaggttgatgaatgaggttttgcgtcctttcattggaaaatttgtggtggtctactttgatgatatcttgatttacagcaagtctatgggtgaacattttaatcatttacgtgctgtttttaatgctcttcgtgatgcacgtttatttggtaaccttgagaagtgcaccttttgcacagatcgagtttcttttcttggctatgttgtaactccgcaggggattgaggttgatcaagccaaggttgaggcaattcagagttggccgactcctaaaacggtctcacaagtgcggagctttctaggactcgcggggttctatcgccgctttgtgcaggatttcagcaccattgctgcaccattgaatgcgcttacaaagaagggagtgcctttcacttggggcacatcacaagagaacgccttccacatgttgaaagataagttgacccatgcacctctcctccaacttcccgattttaataagacttttgaacttgaatgtgatgctagtgggattggattgggtggtgttttgctacaagaaggaaaacctgttgcatattttagtgaaaagttgagtgggcctgttctgaattattctacttatgataaggaattgtatgctcttgtgcgaactttagaaacatggcagcattatttgtggcccaaggaatttgtcatacattctgatcatgagtctttgaagcatattcgtagtcaagggaagctgaaccgtagacatgctaaatgggttgaatttattgaatcttttccttatgttatcaaacacaagaaagggaaggagaacatcattgctgatgctttgtctaggagatacactttgttgacacaacttgactacaagatttttggcctggaaacaatcaaagaccaatatgcgcatgatgctgattttaatgatgtgttgctgcattgtaaggatggaagaacatggaacaaattcgtcatcaatgatgggtttgttttcagagctaacaagctatgcattccagctagctccgttcgcttgttgttgttgcaggaagcgcatggaggcggtttgatgggacattttggtgccaagaagacacatgacatccttgctagtcatttcttttggccacagatgcgaagagatgttggcaggttcgttgctcgctgcgctacatgtcaaaaggctaagtcacgcttacatccacatggtttgtatatgcctcttcctgttcctactgttccttgggaagatatttcaatggattttgtgttaggattgcctaggaccaagagggggcgtgatagcatttttgtggttgtggatagattttctaaaatggcacatttcataccatgtcataaaactgatgatgcttctcatatcgctgatttgttctttcgagaaattgttcgcttgcatggtgtgccaaacacaattgtttctgatcgtgacacaaaatttcttagccatttttggagaactttgtgggctaaattggggactaaacttttgttttctactacttgtcatccccaaactgatggacaaactgaagtggtgaatagaaccttgtctactatgcttgggctgttttgaagaaaaatatcaagatgtgggaagaatgcttgcctcaaattgaatttgcttataatcgttccttgcattctactacaaaaatgtgcccatttcagattgtgtatggtttgttgcctcgtgctccaattgatttgatgcctttaccatcttctgaaaaactgaattttgatgctaagcaacgtgctgagttgatgttaaaactgcatgagacaactaaagaaaacatagagcgcatgaatgctaagtataagtttgctggtgacaaaggtagaagggaattgaattttgaacctagagatttggtttggttgcatttgcgaaaagaacgatttcctgatttgagaaagtctaaattgatgcctagagctgatggaccatttaaagtgttagcaaagattaatgagaatgcatataagattgatttgcctgcagatttcggggttagtcccacatttaacgttgcagatttgaagccgtatttgggagaagaagatgagcttgagtcgaggacgactcaaatgcaagaaggggaggatgatgaggacatcaacaccatcgatacatccatgtccccccatgtacagcatgatggtcctattacccgcgctcgtgcacgtcaactaaattatcaggtgagttctttcttgagttcatattcctcgtctttataccccggagacgcgtgcactcgtgttttactcaggaacgat

SEQ ID NO: 27020 - DNA, 18879 bp, Oryza sativa
gatttgcgatctggatatcaccagatccgaatggctgttcaggatgagcacaaaacaaccttcaaaacacataatgggcattatgaatttcgggtgttaccatttggactgaccagtgcaccagctacatttcaaggagtgatgaattctgtattggcaaatctgttaaggcacagtgttttggtatttgttgatgatattttggtgtatagcaagactttaactgaacatgtcgagcatctcagacaagtgttacaaatcttgactgatcatcagcttaaggtcaagaggtctaaatgttcttttggacaaactcaactagcatatttggggcatattatcagtaagaatggagttgcaactgatgacagcaagattgcagcagttaaagattgcgattaagctcttcttatcatccacaatctgatggacaaacggaacgagtaaatcagtgtttggaaatgtttttacgctgttttactcatgcctgtcctaatcgttggcattagtggttagcacttgctcagtattgatacaatacatcatttcattaagcaatcaaaatgacaccatttgaggcattgtttggacataagccgaattactttgggttattgggagcttcttcagcaaattctccagcattgacagattagctcagtgaaagacattgtatggatactttgatttataatcatcttttgcgggctcaacaacgaatgaagtttcaagctgatcaaaatcgttcagagagagttttctctatgggggattgggtgtttatgaaacttcaaccatttgtgcaacaatctgtcatgacccgagctaacaggaagctttcattcaagttttatggacctttcaaagtactgcagtgtgtgggaacggtggcttatcgattagctctgcctatcacaagtttgattcaccctgtagtgcatgtctctcaattaaagaaagctttagcaccaactgaagaattgcagtcagagttgcctcatcttgatcctgaagctggtcatttggcaactccagtttgtgtttgtgctcgtcgtctgtgtcgtcgtggtgcgaagatgatcgagcaagtacaagtcgagtggtctggtttatcttcttcggcttgtacctgggaaaattttggtgaattgcattgccgttttccttcaacatcagcttggggacaagctgattttcaaggggggaagaatgtcatgccatcagatacatgtgcatgcaataaagatgatgcagagaatgggcctcatcgagttcggcccagtcgccaagtgagagcaaatccgaaatacattggaaggatctggactaagtaagggatataaatagtgtccaggagactagagagagggatgacttgtaattggaaatcaatctatcccaatactgaaatccttcctctgtctcagctccgtctcaaacgctatttctttctcttactttctctccaagttgctgttcttcctttcatttgatcttgaagattgggatcgtaacagttggtgacggatccttcaagtcgacggaaaaacgacggcggcggcgcaaagctgcgggcgacggcagcgcaaagccaaggcgacggtggcggcagcgtgcgcgtgtgccacgcgcgcccatagggaggaagaaggaggcggctcggccgtgggctggctgggccggctcggctctgatgggccgacagcccaaggaggagaaaagtgtggaggacggaaggaatgggccaaaaggaagggggttttggcccaaaagaggaggaacttgattattttgtgtagagggtttttaaatggaaatcaaaggagatgaaaatctaagggatgaatatttgtggaccttttgaattttggacaaggaattcaattaggatttctaggaaatggatcttaagaaatatgttggggggctttttagaagtttggaaaagaaatttaaataggatttctaggatatgaaacccaagggagtttgtttgtggactcttttgaattttgacaaagaatctaaatatggaatttttataataaaataggtttgaaatatttttaaaacaaaattaaagatatttattttgaaatataaattttaaaaggataaaaataaagatgctccaatttaaagaatttaataaggaccaaatataaaacttgacacaaaagatttatctactaactttggataaattttgggatgatagcaaaaatagatggaggtaaataactaggattttagcctccaaaatatgtggtatggattctcggtgaaatatttgtggctaaaggaagttggattttgaataaaagggattggaaataagtttcttagcacaagagaaatcattcaaatatttgtgataatattattcttgtgcgaagaatgtgatcaagtcataggaatcaaattggcggatggactaaaataggaacttgaccacaagatattttggatcaatctagaggaggtaatggttttttggagataggtctagctaggggtttgatccaaaataaattccaacaaaaggggagttatagtagtttagccccaaggataaaaatggttaatgggatataacagagagtcaggccaattgggaaaatattggctcaagctaaatagtaaactttggaatcttgaatggataatttggatgaatgagattccaaaggggaagtatttgttggaggatagaactagattttggaagtaataggtggatgggaaatcataggtatttttataagaataggattggaagtaggatggtaaattttgaaggataagtgttaactttaggggggggtagtattttatagactatggagatatttgggtatagatccaaagggaaagtattaactctagagaggttggagaattatatttcatgtactcgggagatagttgagtgggaaatgaaaggatatttatggttgttggaggtgttcgaggaaggattcaaaggaaatataatatagagccaaagttagagattaaagaaaataaatggaaaggttttatgaaatttgaaataaacaaaataaagaataaattaaggattttataaaatttaaaagagagcatttaaatttgcaaataaaacttagatccaaaataaaagagaaggttaaaagcaagattgctccaatggaagaatcgagaaaagtgcaataaaacttttcgcaaaaaatttttccctgaaaatttgagtatgttacatcacgtgtgttccacgctgactcagccgttacgttggacaaaaccgggatcaaaaccaccgaaggtcctaaagtgaccggttttgattagttaagagacgcaagatatctggttttatggtttgagaacgtttttttacctggctttatggttgagtgcgttttttttatctcgatgacaagtctaagtgaccttcaggtggtgtttgaatctcctgaagatgaagacgaagatgaatatgaagattaagtgtttcacgcaaaacgaggtggtaataacgtgcgattaattgagttttaattattataacttgaaaaacgaattaatctgatattttagaacaactttcacatagaaaaatttcatacgaaatacaccgtttagcagtttgaaaaacgtgttgttttaatccaaaaagtttatcccctaattttgaaacaaacagggcctcagtgtactttttcccatgcctggcagccttggcgtcgtccaccatcccggtgttcatcccgcggcccagtcacgaatccaaccgtcaccgtctcggtccggtctaagcccttgctgctccaccacgcttcttattccattctccttccgccgccgcccgctctctgttgcgccgcagttgggagcgaaacccttgtcttcctcccaacccatcttacccaaaccctaaaaaaccaaaaaaaaaatccgcaaaattacccccgaaaatcccaaaaaatatcgccggaaccctatccttcgatcggatccacctatccccctccccggtgatggcggcgcaggttcaggcggtgccggcggcggagggtggtggcgcgccgccgcaggccaacggggtcgtggctgcgggctctgctgccgccgctgcggcgaccttccaggcgacgtcgctgtacgtgggggacctcgacgtgagcgtgcaggacgcgcagctgttcgacgtcttcagccaggtcggatcggtggtatcggtgcgcgtttgccgggacgtcaataccaggctgtcgctgggttacgcctatgtcaacttcagcagtcccgccgatggtgagctctgttcttctccttcatatcaattatttcttgtgatgatttgttggtcatgggtgatgggtcgttagggttctggcagggaacaattcgaatcgcctcaactccattacttattgaaagtgtccaggccattttaatgggtaggatttgtgtgctaccaaatgccggaaactatttagtctgttttaacatgctgattgtattcattaactgaggtttgtaaggagtatataataatattggttttttttattacgttttgtatagctgtttgttgtctcatacatatctaattacatatatagtaagttgagtaaacgagttacctcatttcatgccaagaaaactttttgaggacagttgaattgtttttcttgctgatagggatttatgttctcttgattttaacgaaaatgtcctcacttgcaacaatataattcgagatgtctgttttagtgcacgatgtgggggatcgttgatgtgaaaggtccttccatagtattcgacataatcaagttacttttaattggttccaaaattttgtaagcatggcttgtcatttgcctctgaagttcttgtgagagtttgctcttctgtaactgttaagttagatatgtgttctgcttctgataatatatttcaatcacatgatgtacattaatttggcaaacaagttctgattgtttatcaaactagaattgcaacttgcttcttttcttactttaaaatctgttgcagctgcaagggcattggaaatgctgaacttcactcctattaacgggaagcctatcaggataatgtattctaaccgtgaccccagctcacgtaaaagtggagcagcaaacatatttattaaggtagcacattcatattatgtattcatttcatagatagccaacaaagaatatctcttttgacatcagtttatgttgttaacagaatcttgacaagtcaatagataacaaagctctctatgacacattttctgtatttgggaatattctttcgtgtaaagtcgcgacggaaatgtctggagagtcgaagggatatggttttgttcagtttgagctggaagaagctgcccagaatgctatcagtaagctcaatgggatgcttttgaatgacaaaaaggtgtatgtagggccttttgttcgtaaacaggagagggaaaatgtatcaggcaatcccaaatttaacaatgtgtatgtaaagaacctatcggaatcaacaactgaagataatttaaaggaaatttttggtaaatttggacccataactagtgtcgttgtaatgcgtgaaggtgatgggaaatctagatgctttggatttgttaactttgaaaatccagatgatgctgctcgagctgttgaagatttgaatggcaagaagtttgatgacaaggaatggtatgtttgtagagcacagaagaagtcagagagggagatggaattgaaagaaaaatttgagaagaacatcaaagaggcagcagataagaaccagggaactaacttgtatttgaaaaacttggatgatagcatcgatgacgatgagaaattaaaagaaatttttgctgattttggtactattacctcttgtaaggtttgtctcttatctccgctagtttgccgtaatagttaatacaatttattcacatactttggttgtttggtcagtttgctgctgctgattataaagtatgtggcaggtcatgagagatttgaatggtgttagtaaaggatctggctttgttgcatttaagtctgctgaagatgcttcacgagctgtgagttgtatttatatctctgggcatcatatttgaaaaccatatttcaggaaattcattaacatatttgttctgatgattgcagcttgtggctatgaatggtaagatgattggcagtaaacctctctatgtagcacttgcacaacgcaaggaagaaagaagggcaaggcttcaggtaacattgacggatgagatgtcctgtatacatattcctaaaatgttattctctgtttctaatatgttcattttacttttgcaaaacttgacgaacatgattttatttttgaactacaattagaacaataatgaattttcttcccaatgctattcaatgcaatagtgtttgataaaactatgctttttatatattgttttgtgaaagttctaatggtctggaaaataaacagtcatttctgataccagcggatccatacatggaccctgtttttaggtattcatgttgatgacttatttcaggcacagttctcacaaatgcgtcctatggtgatgcctccttcagttgctcctcgtatgcccatgtatccccctggtgtccctggtgtaggccaacagctgttttatggccagccacctccagcttttgttaaccctcaggtacatcagtacatgaactccatctatctaattaatgaattatgaatgttcatgcgatcatcaacatatactgttaaggaattttcgaatcagtatgttgctgttggattagaataactataattgttcaaataaacaaaagctgtaactttgatttgctaccaatgttttgatatagctttgcattgtaaattttgaaattccattctggattgaagctcataaactactcaaacttgccaaaataactatgcaaattccaacgttgagcttgttaccagctacttgtcattcattttggagcactattattatttttaacacttaccaacattttatttctgcgtgtagcttggttagttttcttgtctgttttgactaattatatacatttaaagtaaaaactatgatgatgccagattgttgtttaccaacttgctaagtgctaaccattacaactgatggaatactttgttgtgctctaaatctagtgtacgttcatgtttttcctttctgaattgattagtaaaactgttatgcactaccaattacattgttatgttttattctttcacgtgttatttctacatttacagtagcagtgagaagtgcagaaaaacataaaacaagatagaacctcgctattgattgtgcatgttagttttgctggacatttagtgaactaatttctcacttctagctcctttaaaaaatttcagtaccaagcatttattgaaggaaaaaacatacttacatgtgaaaaatggacttcacaaaattaaagtgagatttctgcgtgagtggccacttgtgacttgtgaggactgttttggaaacaaccatatcgcaaacgttgcttacgattatcattgacatgttttatgtgagaataatctaaccaagttgaacattcctgatgatatgaatgaactgatatcttaatgggttaattatgactgatgcctcaggagtattataattgttttgtcatctatataagtgaatgaatattctggatagtatgggcacctgtaactctagtttaggagagtatgtagcgtaaggtgccttgttttgtcatccttgtaaggtgcattgcttagccaaaagtttctcggtaactcggttatctttggtgctactggatgagattttgttgccctccttggcactgttacctttgctgtgaaaaagggcaaactgcccttggttctgttttggattctgtcgttcttgtgaatgttgtgtggtggatgtgttgatgcttgacgagatggtgaggtctagcctcgcctccttagagccgggttgaggccgaaggggagactagagataggttcaactttatttcttgattgattcgctaggaaatgccgtgctcccatatggccagccacccaacaaattctacaaacaagtatagctaataacttgcaaactaattgaatccatgaggggctgagtttcgcccataacatccccacacaacgattgacttgcatctagcctcatcccctcttattaagccttctacatcctggcttttaacattatttggaaaggaaaataaatctaaaattattttggtgtaccttgccagcctaaggtggggccctacctggaagccctcagtatccatgtgatatccaaagcttgaatgtcctgctggcctgagaaccctagaaaaccttggcaaagtaacaattcgtgaagagcctgcattcttgctattgaggcccaatctgcaagcccatgtgatgtaaagccatgagccatgtacatccgagttgtgagagatagcgaggggcccaacaatcagcccaaatcaggttcctcttgggagaataccctatcccactgctttatgccacgtacatagaatgctgcgctgccaccgtgcaagctgctacagtcgtgcactgttaagaacatgacaaatgacgcaacgcacctgcggcacgcaaggcactaacgctatgcactggttgagcccccaaactgagctcctgccagcgcagctcgcacatcaccatggggtcacgcaggtgcagccctcgccgtccacagaagcagcgcaccccgctgattgtgtggaggccaccccaatgagtcaactaattgtgctgcaacctcccatcacgctcgaggactccgctcgcttgccgtgctagctactcgcgaggatagtggtgcactttgtgcccgtggggacggaaccaatttgcatggagttggacgaggcgtgcatgtcaccgccaattgtggctcaagctcctcgagtcgtgccagttgttctcggtgattctgccagaaaattgtatgcctgagtcaccaagcgctgccttgtagccatatcgatgctgttgccaaggccaacaaagtggatgacagattgacggtcaccagggagctgcaccgcctccaaaagacgcattgctgctcgagggaaccgcttgaagatgtcttgctgccgtgtggtcgcaggagggaacagtgacggtgcgacacgatggtctcccgcggcgacggctgacttgattgcttcctggcgagtgctggcaaaggtgtagcagcaccactgcagctgcggacactgatgattgccaagggagtggctctgtggccagtgacatggcctccacctctggtagtgtggccgatggttgaggagagggtacagaaaatgagtctgttggggtggtggcagtggagaagttatcgttggacaccgccagcccgcatggagtgctgcacaaagtccctcaccttattgagcccatgatggtgttatgcatggcaatggatgagcgatgcagggcgtggaggctgttgatggcagccatggtggactctgggaaaggatcacttgaatctgatacgaaggtgctgtgtgggggatgtgtaggtggtcgaccaccccagagccgggttgaggctgaagggaaaactagagataggtttaactttgtttgttgatttattcctattttttttaaatctgcagggtgattttacctagcagaatttttgcaaaaagatgaaagaataaaatctataagactacctagcatgtcattgatatttgtagctttgtgcattgtagaaatcttccatgactgatttccattagaaactagggggaaaacaaagctgaacaatttaacctccaaaagaggatggatataacagtcagataaggctgtgatttggattgtttcttttaccaaatacatcaatatgtttattacatatgaaggtggggatggcaacagcctatggtaagcacctggtttaaaaaggttgtaaaactttgtcctcattattgtacaatcagtcttttatcaaatacatcaatatgatgcataatttgcagtttatgcactacaaatcagccttgctttacaatttacttgcacatgctataatcagtctcttttttgttgcctatctccccattgccttctcatttgtattaatttgtattatcgaaatgttactttctgtagcctggatttggcttccagcaacatctcattcctggtatgaggcctagtgttggaccaattccaaattttgtcatgcctatggtccagcaaggtcaacaaccacaacgtccagctggaaggcgtgcaggcactggtggaattcagcaaccaatgccaatgggccaccagcaagtaataatgctcagtttgtagtgacataatgaaactcatttgtttaactttgacaaggagtttgcctccttgtctaacccttgcatctcttgttttggcagatgcttccaaggggtagtcgtggtggttaccgttatgcttctggtcgtggcatgccagacaatgcattccgtggtgttggaggtttagtgccatccccatatgagatgggaagaatgcctctcagtgatgctggtgcaccaccgcaggttccaattggagcattggcctctgcactggccaattcacccccagatcagcaaagactggttagcttatcctttttgcttttatgcacatatgcggatctaaggataaatttcaatctggaactgggatcataacttcctctcatggctgcagatgcttggtgaaagtttatacccgcttgttgatcagctggagcatgatcaggcagcgaaggtcactggcatgcttttggagatggaccagactgaagttctccatctcattgagtcacctgatgctcttaaggccaaggtcgctgaggctatggaagttctccgtaatgctcagcagcagcaggcaaataccccaactgatcagctagctgctctcaccctgagcgacggcgtcgtttcttaacttggttggcatcttatatctgagactgcaagtgatgtagtatgtacttggtgtgttttggaacttgaacctgtggggaagtctgtctttatctttgttaaacggcagttcagttacttcagcattgtgtggatctggatttcagttcctatttgtgttttcttaaaatattgggattgcaatatgatttactcttggattgatgccaacccatgaactagattcttgttatatcaagaaatcatgacaggattagccatgcaatgcttagtttttttcggtagagcagtagagctaactaacatagcgcaattgtgtagtgccaagaaggcgaatggatagtaacacacagggggtgtacctcacaaccgacccaggcaatctagaaaatcatggcaacaatctagaaaatcatggcaatcatggattattccagttactagatggagtccggcggcaggacagtgctcatcaattcggatggtgcaatttttcaagtctccagctaagtgggttttggttttgtgatctgggaccacttaggtgtctatttgtctacaacaagctgaatcacagaaatgttcaacggttcaagcctaagttgattcggtgtgccttgtcccggcggagggctaccaaggcatcaaattgtctctctatcatccaacgaatccagccagactaatcctgtgttcttgttagtgacatcaagaagttggtagccgatttccaggtttgtgttaagaaatcttgggcgatctcatccacccggaggaataggtagcagttgccatgcctctcctcgccaacaatcggtagagaacgaaccgtggctgttggtcgcgccctttttctcctctcggcactcctcgacaaggggcgcagtggaccccatccattgcgcatgtataaattgaacactacgatcaatgagaaatcaatcctctctcgtttcgtgttttgttaacatgttatcagcactgctcgcgaaagaagaagagaagggagaagtagaaatcaaggaagcagcggcctccagcgcttgaaggtacgatgcctatcttaggattgaatttggacgccgttctcggcctccctcgttggccccgaactcaccttctacaccacattccccgctactcaatgtgttagcgccgcgccacccatttcgcccactacggagcccaatacgggcccatggccaccaccaccaaccctggcgccatgtggtcgttgatgccgcgccgactgctgcctcgtaagcccccgcctcgccggaagccatgaaagcagttaattagttttgtaaactctatgtaatggtcctgcaaacccatgatgttatatgttatttggcaaatatgtttgttaaaataccccgctttactaaatttaccggttgtcttaataatatgccttttgcatatttaaaacacactctaattactcactgtgtttattggcaaaattatttaaattttgtatttaacttagcaaatcctcttaattatgtattgttgatgcaaaatttaacacctccacacgaaggcctggaagatttgtttcacttcagtgcaggtcctaaaattcgggttcagcacgtgccagttgatttgatcttgcaatcaacgagcgggacaatagaaaaaagttaaatgacgatagccgatcggcaaatgggctgatgttgtatcgtatcagctgatgctagagagaatcagctataaattatatgaaatattgatcataaaactaggtttagattgaacataaatgtaaatagttctcctttaataaaacctatcctgtaggtcgaacccaattgatccagcacaagattgatgatatcaaagttgattattatacaataatgtgatctaaacagctagtccatgaacataaaaagtatgaacaaaacctaaggtaattacaattggatcaaaagtgaatagcatgggcatccacaatgtgcatctaaagtgggtagtaaggaataaaatactattactactaccaggttgtatacattgtaagtaacaaataccatgtaatatgcttactacctagccataaggaataaataaataatctctctcatccttctctcatggctagtgactgtggggttcagcttactagccacctttattctttcatcattgtgactacaacaacaactaatacccactaacgtattgtaacatcctcaaatttttaaactaaaatttgactgcatcatgctggcttttgactggtttttatcttagattagcaaaatcaaaattctctttaaaagttctctttttatttttgattttggttcgaggattacccttagaacccccttaacctagtttaccaataaaccctaaattttgccctatcctaaaccttagtggatttagcaaattttcttcaaattccaaaacttagaaactttctctagatcacccttctattagtgagacatttttatagtgcataatctttgcaaaactcttccaaagatctctagataaattctttctccttaggcaaaatattcaaaattcctaaatacttcttttgggccgaaatcctctctctcccttcggcccaattggcccagccggcccaagagaggcagccgcctctatcctcctccaggtgcgcgtgttccacacgcgcacgccgccgccaatgccttccctcgccgctaaggaaacgaagccggccgccgtctttcgaatcttcacgccaccgtcgtcgtgcactccttgacctcctcctccacaaccgcctctccccaccgcccttctcctctataaatagccggccatccctccccttctctacctacaaatggagcttcatctctctctttctctcccatgtccggccatgactgcccccggccgatctccctcattggagcttcgcaagccaaacccttgcgccaccaactccgcctcgccgaggtgattccatttttcccgttttccccttttcttccaccccatagcagccaccatcgccacttcttttagtggccggagcaagttcttgcagctgccgttccagccatccctctctctccctccgccagccaccaccctctccggatgcacggtgctcgggaacaccatgcgccgccggcgtcgccgccctccagccgccggaaaaccggcacccctcctccccttcctctctgttcaaccgaaggagagaacgaagagacgggaagaagaagaagaaaagaaaaagaaagagaagaagataaaagactgacgggtgggcccctctatagtaacctttctaatttctcaatttaattcaaatccaatctttagaagcccatatcttttaaaatataaacccaattcccgtgaaacatggaccaaaattcttctaaaatctttctctatcttttgaggctattttttgctattttctcattttattttatttttgcctatttttggattttattcgatttccttttgaatttgaattttatatgtttaaccctaggtcttgaggattcttctgacacattagataatatcagtcaatctcaggacatcgagcaaggcaagttaccatataccttttgatcatttaagcctatattttataaattatttatttatagccttctattcaatattctattttttatgcataaatcaaccatagaaacccagacaatttagtattgcttattttgcttacaatctggttaaaataccttatacttagattgggacagtacgtaagatttggttgattcctgggtggctagtactgtctcaatcgatataagttttgccaggtacttatgtcaaacgaacgggtacgaccgcagttctagaatggggacagacctagtcattatgttacttagcaatgtgatacctctgtgtagtggttcttatttttaagtcctcgagcaggaggcaactatagctgcgaagggaaatttctaccattaccatgtactggtaattggtttgttgagctcaattataattatggttataattctaaaccctgatcgagatgacgtggtgtcatacgatcagttcccctcaagtaccccgggaacgccagaactcctctcgctgctgttaacgtcacgttcagagcgcatgaggatataagttcatggaacaggtaccacaattgttaataacctaatactgggccatgactaagctaatgaatattggcaagtcgtggactgcgggtaaagcgtacatctactgcagtagaatattcatgaaactattcgaatagccgtactcacggaattgagtaccgggactcatatggtaccctggttagaaacctaaagtatatatttcacaaactcttgctttaatatttccagattgtctattattgctttctgcaaagaactctactctatgccaacgcataacatgtttccatggtagcttgctaagtattgtgaatactcacccttgctctcattaacctttttcagatttgggtcaagaggaagacccctatgactattattatgatgaccctgatagcttagaaaatccctagaggttataccttcctagtcagaatgtactagaacttccgctgtgtaatattagtacttatgtttaattaggtgagtacctattcttgtaaaacccttagaattgtaaactttaacatatgcaatgaagaaccagctgtattacatgtatcaatatttactgatccaggcattgatacattaatctcagtcggatccaagttattagttttgggacccgacacgtatggcccacccttattcacaaagtaggtagtaaacatcggtgatgcctaataactaattcaatctttctctttaatacaagcaattatgatagatcggacccaaccgagacagtattaattgctggcaacaaagatcagataatttaaaaattatatggattcacacaaaaagccgatgagattgcttaggttacgggtaaataatgtatcggctaaagctctggtacaatcttatgcaaaaatatcatacatagttaaatctattaaacaaaccatattcttagcagattgtacttaatcaagacagagcaaaaccaatagccaacttaatagatatcaaggtgtgatacaattgcataagaggatatatgtaacatattaggtaaagaaagaacatgcaaacttaaacctaaaatacctatatcatgtaagatcagctgaaactccgatgcaacccctatcagcaattatcgagcaagttagttcttacaactttgactataacttagtatatcaaacctaactgatgcaacaccaagctatattaaaaattgatagatctgaacaaactgatatttgctattcagggtggtagatacattaactaatctaaaacaacactataatttaatataatatcgatattcccaaatttaaatcaaccaacacacgttaaacaatattatcaactttagattacctaatgtatatgataaataattgctatatcaactggaagtcgaatccatctgaagtaaacagtagccccgacgatgtcacaccctgataaatacatcccaacttaaaaatcactttctaaaaggaacaaaggaaattattaaaagcttaaaagaaatctcaaacactaagagcatctccaacagcctctctactcaactctcgaagccaaaaatttggcaaataagccaaaaacactatttgactctgcaagccatcaagcctatccattggccaactttggctagtctcccaggctggctattctcctcttcagctcttcctctactcatgcttttcctctccatcgccgagccaccaccacgccaatcacccgcacctccaccacgctcccttctggccccgccggaaagcccaagtcgcagccgtcgttgtcgtggtgcatgagtgggcggctcgccgccgaggaagatgagcggcagcggcagctcggcgacgaggaggggcgactcatcgacgaggaggagcggtggcggcggctcggctcctcggacctacggtggatgggcacacgacaacgacgacgaggagtggtgcggcagctcggctcctcggacctgcggtggacgggcgcaccacgacgacgaggaggagcgatggtggcggctcggctcctcgggcctgcggtggataggcacacgcggcggatccggcgtcgggagcggcgcgcgtcgcgaatccggcgccgggcaagcccgcacgcatggcgacggatcggcggcggagagaagcctccgtgctcccgtccccctttctctgtctcgcatctccagcgatggcggaacctcgtcgtctcctcaccgccgccgccgacgttgccgtgtccgccgcatctctagcgccgtcggtcgcctcgtccccgcacggcagccccctccgtcgaccacctccgtcagccacctcgtccgcacgccgtgggctcacgtggaaaaggggaagatagagggaagggaaaaagaaattagagactgacatgtgggacccatcaagattggagagtgggatagagagattgttggagtaaaaggcaaatatgactctctaattttttggccattggctaaatggacatttggagagtccaaaatagctaatctgttagagatgctctaaaatacgtcccagaaaaatccgaaagtggcttggagtatttttgttaaattctccatgctctaaaattggttcctcatttttacttgaatttttaaagcaaacaaaataattttaaagcaaaaaaaccaaattcggagtaaatttaaatgaaaaacctaaaaataaatctctcctctttgggccatttacggcccaaagtctgttttccctccccgctggcccgctcggcctttctctccctccctccctccctcccttttgggtcaatctccctctcccagcccgttcttttctccaagccaacccacttcctctcctctctctccatcggacctaagtccgtcctcgacgcggcctagccagcccaactgtaggtcgtcccctacctctagcggctgactgctcctctctctctctctctctctctctctctctctcctccgttcggaaccctagcgccgccgccgagttgatccacctcctcgcacgattctccaccaaattgatcagaaaagtcggttcctttcctcctctttatttttgccataatttcccactcaattgtgtacaaactcaccttgaatcgatgacttttcatctccggcgaactaccggcattgatggccggccagtgagctcccccggccgttccactcctcccctgcctataaatgggcagcaacacctcccctcccctttgaaagagaatctatgcccctagtgggttttggttaattgatgacaaacgattaggggattaatgcgcttattgaatgtataagcaagggattagtctgatgaagaaccaatgaagattacgaagaagaatatgcaatacaacgatgtttcattgtgattcaaggctagaagtgacgaaagatggcaagatgatgtgaccatgcctaccagtgatacaaccattgctcacatcattgatcaacaagaagtcatcaaggtcaagtcctccaagtgctggaatccgattcggccacctgctgcactgttgacttcaaagggccgccaaagctgcataggacctctgtttttggcccttgagtacttgacggaaagctctcggagtcctatttccaatagaaccagccacatctccgaattccagttcgtttggctgcaatcacacaaacaaggttctgcgtcacctatattgggccaatgggcttgtaactttatttgggaccccggccc

SEQ ID NO: 27021 - DNA, 7038 bp, Oryza sativa
gtcggacacgactcttatctctaacaaactcgaagataccataagtctttgcggcagacttttgcccaaacatatctctaagaaaatacataaaacatcctaattaatagatacaattgccttctcatgactctatccatgcgtggcaatcctcatgaagctcattaactcaatccgacaacgtattccttgtcatattgtcggactcggctcaatcggctaaccctgtccaactcggactctgccgatccaggtcgtagccgattcggactccagccgatctttactccgtttccgagacgatctccatctcgaactccatctcgatttattcatctccgatccttggattaccaaatttggtcgttaacaatatggaagtgagtaaatacattaacttatatagaaaatattctaccttaattacctttataagcatcctcttaatttaatactaaagtcaacttatacataaataggtaagaagcttatgacatgtgtaaggtaaattgtagttctaacatatcaacatcacttcacgataatgagagtccaaatataacttttataaacatttacatgcatttaggaaagggaaacacatataagacataagtcttgcgaattatctgaaataattcgtgcaagataaaatcgtgggaaaattcatgtaggctctacttaacatatacaactcactgtaattttggtataatttaataactacatttgatactcgaataaatcaatcaaaccagtcaaataatagattaattataattcctaatcggctaaaaccatactttgtctaaaagtgcatttaattgcatggaagtgtataggggaaataatttattcaaatactaggttaattatcatgaataaatatatttttttccagaatttatcttctcattttaggcctcctaaaaattcaaactaatttctaaagagcccatcttctaatttctgtgagtaatctatccataatttttgagtgcaaccaaagaaaatggaatctagatatcttcatgtaccttcattaaaatccacatgaattgatctgcaccacaaattaatctatgaattaacaaagatgggaaaagaaataatcctggaaaaatcattcaaaatcgagttcacccagtttcttacccatccctctcacactcctacctagcttacatcgacctgggcccacttggcagcctccttgggtcgccccctctctgtccttcaccccagccgaccagcgtgagagagagggagagatcggcgccgaccgcgctctgggcactcatcaaattataaactttaaagttatgaaataaaaacttgcactcacaatacaaatttagcctctaaaattcatctaagataaatcatacataaaacatatacaaatttataaaatgcatacaaaattcatttcaactcattttagagcaaacttagtttctacagatccattaacatgttctctaaaaacaaagtgaaataaaacatatacacactttacatcaaagcctctaaaactattatctttaaaataactaattttacataagctgaactttagaagtttatataaaattcatcttagatcctctttaagtaaacccaagttctgtagaatcaccaaaacatgtacttccaagttataaaataaaattatatacttactatgtaataaaagcctctaaatatttttgtaagtaataaccaacatagagcagcctttaaatttgtaaaatttgtagaaaatttatctttagtccaaatggagtgaactaagtttctatagaataaaatatggcaccttttgtacaggttatagttctaaactttaaatttatatgataagtgctaaacacaaagtgttgattaagcaatacatatgtatgtatatgtatatagttgcactctagctctaaataaaacccaactaaaacttgttagaccagagaagttatagtttcatcctcatccaccaaaactctcatataataatctctaagtcggtatgataagtaattaacatagaacattcccaagcatataaaataatgaagtagagtaatatgatctataaaatttatgaactaagattagattagcttactaaaatactcatcttatacaacactagcaggttagagcaagttctggacctaaatttccaaagccatgtacacatagagactatatgcctagaacacgttataacttgtaaaatacataaataattcatattaactctaaaaattatgaaaccaaatgtgttagtcttataaaacacatatattcaccccagaaaacataaacttaataataatcaccttacaacagcatttcacaatagtacctaagtaaatcctacactataccgacgaaacttctaaaactcataactctctaatgaaatgagataaaatagaaattctttcacctaaattcattttagaccagtacctatccactgtgtacaaatcattcattttagtgcattttggatttttcgcatatttcggtgtttaactgcataacgtgtactttctatagatgattgcttaaacggtgaagaactgatttaggtgctgaatttttccagttacaaggcaggtcccacctccctctctttgatcactttgaacctatgttttggaggttattgaaaatgtttgcaaatcttgcatgtcgattgtacactaataaattaaaattttgttaaacttgttagacaaactcctattatttgcattattaccttaacctcacatatatccatatccctcattcctaaccttaggaatcatatcctaatactacttggaatatgagttacattgtcactagtttactatattgcttagctatgcttagaatagttttacttatcacttgggctcatattaacatgaaaaatgattttattaagattctagacagagatgaataaatgaagtatttgacaaataaaatgatggacaacatggattttaggtttgggcctcatgtgatacacatatggtgattagttgtgtaccgatagggggagtgtgcacccaaaccgacctaaggacttcactcaatgtcagttcatttcgtatacagtacaaccacatgtgctagtatgggatagccaaagcttagtaaattatttatggtttagccttatattctggtaggctggtgtgtatgagttcgtataattcagaggagcttcctatttaccccgatatggtagtttaggtgactaagcgtgtccaatacaatggtattgtgcccgttgtgtccgttgtgtccgccaccacgctgttaagtttaaggcatgggcctaccacttaacgttctaggttatatttccagtatgcttaggatggaggaacacgtatcgcgctggtgtaaggctaaatcatgaattttggaaaagctttgctgcgggtaataaatcgggtacttatgtatcacgtgccatgctcttgcatgattattatttcgcatcatgtgggtcatgagcggcgtgtggatatttattgagtatagacttatgtttacacttctaaatgctgaaatttaccttcaaattatgtaattatgttgagatttgagaatgatctcattgctggcatggatgacaatgaggtgcatatttatacatgattaatgcctactttgatgcccatatgctaagtactagcttgctgaaattttatttgaaaacaaatctgattttaaagtgttttatgcaaaataaaacttgctttatgctaaaaagaaccatattatgccttccttgattatatgccttgcaagtagctagggtgttaggcttgtcttggtgcttgctagtatattatttggtgttaggcttgtcttggtgcttgctagtacattatttctaataatgtactgactcttgctattagattaactatttgcttgcaggttgtagacttagtcttttgagtgatgcgggtaattgactgcttcttctaggacttgaacttaatgggggtaaacccctagtcggtgtgcttgtggtttgggtagacaagcttccgcggttctattatctatattcggctggtcggcctatgtaactatgaagtagttgtaagttagatcatttttgtcttaagtgtattttgctatgtatttccatgcttaagatgaaagtgtgaatctagtgcacatcctgggaactagattcatatgtgtatgagttaagaatatttgagatgttgtagatctttagctatttttgtgtcacgccctgaagttctctccctagctaaaattcaattaataaattgttgcaagaaattatttgtttaaaggcaagagggaaaccctaaattaataaatgcaaataataatcggaatcggcatgtggaatttttcttgaattctacatgtcaaaatatgctaataggatttttagtggaattttcaaagcctcggagataattaaaatcaattaaaaatgagcacaagcattaaagaatccctagaaattctttttttccttttcctttcttttcccccttttgggccgccggcctgctcctcccttccctccccgaagtccttcctccctccctctctctcgggcgccgataggtgggccccacctgtcgggccttcctccttcctcccgcgccccactccgcgccccgtgcccaagtcgccacccacgtcctcgccttcccgcccgcgcacgcacgcccacaaggggcggattcaattttgaagccccctcccactctctctctctctctctctctctctccacctcacacgtcgccggtgaaatcgggagctttcccggccacgtccgcccctcccttgcccataaaaagcctccccgcgtcctcctctccatttttccactttccgcctccctctcccgtgctctctatcacgccggtgccatcacacccaccgccgccgccctttagccacctccggtcgccgctcgccaccgccgagccacgccgttgtcgtcttcgggttcgcacgtccgagggctacctcatccacccctcctctatcgaagtccgccatcggaggccgccgttcgctgcacgccggtgagcccttccttagccactgcagtcagccatggctctcgatcgccgcggacctctaatccccctctaacctctctcttttcctctcttagggtgtccaagagctcggccaccgctcgccgttgccgtccatcgtcgcccccgccccccccccccctacgccggccgaacccctgtgaggcctcccgccccctcatttcccctttcactcccctctagtgccggtccgcgctgccgccttcgtgctggccgccgccgtctcccgcgccgccagtccccgtcgtgaccgcgcgcgccgccgccgctcgccatggccaggcagctggcttgaagccgagccgagcccggccggtgccaccccctcccactagccactgcctggtgggacccacttgccaggtaccacctcctccccttgtgccactgtcatgcggggcccgcatgccggcgcccctcccctctctcttgagccactgatgtgcggggcccacatgtcggcgccccccctgctgacgttagctagggatgctttatggcacaataaataattaagggcttttcttttatagtaaaaacacagattatcttctaaaattcataactaattcatccgagcttcgtttaagtcaattcaagtctccgtaaattcataaaaatccctagaatcctttaaaaatggttttgtttcttgtttcagtagtcttatagcttgttttgcttgtgtactttgtttgtcgcgtagatttcggccgtttcgtcgatccgcggtttctcgaagacgttgctgtggtcccatcagcgcgagagcatggcaagtcatgcattacaattgatcatagtgtacccaatttacaaatgtcccgcatttctattaaatgttgcattcttttacaatatcatgtgggatgggtcctattatatattgtttcccttacgccattgataacttgggtattaaaatgcatagatgttggattaggaattgcttagccatgcttagttcaactagtacacaaaggggatcacattaatgcatagactttgattatgggtaattagtgccaccgcaatggtgttagttaattaaaatatactacatggtgggctgtgggtgcatggttttgctagtcgtgcccatggcgattaaggaccggttcacgagatgccctgaaagaacttatcgtacttaccataagccagcgtgggcaacggctgggcttgtagtgtagctttcctctggccgatgtacccaggcaagggtgggcgtgatggagttgggtcggctggggtgttcggttgatcggcttccggattcaccatggcacgagaggggactgcccgctgccttgcgaggagtaagggtgaaacttgaggtgtggtgcgattggttagagggggttatgcgaagggtcctgtcatggcctctttccggtatgtcgtggtggcatgtcggcgcacgggaacatgtcgtggggctgtgtcttgtgggtacagttgtacacctctgatcagagtaaaactattcgaatagccgtgcccacggttatgagcggtccactagattcaccgtgattagtctcacccctagttagcttatggaactggttagttcaggtagtggtttgggcctgtctccacatggtgtagcgtggagcagtgatcggtttatattgattaattactacaactattttactgctttcaactactgcttttaaatgactgctttattgcaaatgaacctttagcctcctttggatatatcctgcatcataccttcccttctggtatgtcttgctaagtatagtgggtagtactcagtcttgctctctttcacaccagagttgaagttcttctcagttggagctgtttcgaggaagttggttccgtcgctgccgtcaaggatgcctgtggaatggagtcgctcgctgctggagtcaagtct

SEQ ID NO: 27022 - DNA, 2174 bp, Oryza sativa
cttgctggcagcgcgcgtgtcggctagaccgtccgtctgcttgttcttcggaaccccaacttatcttatgtattcattccttttttttacgaggaaagagtgattatattaaaacttaaggaggtttacaatcacgatccagaagctcagacacacaccgaggagctttgaaccgccagactacacactctttcgacctaagagccagctgtgctagcttatgagcaacacaatttcctcctctatgaactttctcaatcttgcactggggaagtagctgtaactttgctttggcctcctttaaaatcgtccacagacgacatctctctgaatccagccccctcatcgcttgaactatattggcacaatcagtttccagtacaatcgggaggttaatccattttagcgctaggtgtataccctccagacaggaataggcttcagcctcctccgcctaactgcagtgcctgatgatcctccaggccgagagcaggacctgactgccatgatctcgaataacaacacccaggctggcttccccggtctgctgaacaaaagctccatccgtattcactttcgcccagtttacctgcggctttgcccaactatttggttgacaaatgatttcagtttgcacccttctaccttcctgcttggatacttagctcttcccgttctggtttccttcatcctcatgtttaatttgctcggagtgtcaaaacagcaaagccccaaagtttgcagtcccaatgttgcaattttctcaacactgggggatttgcaattatgacactgcaaacattaagctttgctataatgacactggacccatatttcatagacacagatgggcccatttatcatccactcggagtgtcaaaacagcgaagccccaaagtttgcagtcccaattttgcaattttctcctcaacggttgcctatcctgtgccaaacaagatgtcgtttcggtggaaccaagctctccataacatgagcaagaaacaagctctaacatcctgagttaagccttgaaggatcaacaaaagccaatcagggcccgtgcgtgccagcaagtattatgctggcagcttccaacaggaacgaagagactccctcagagctctcgccctcatacatgagatgacagcatgaaactcatcctctacttccataccacaaatacgataggtagcatcaacttccaggtttcgggagcatctatttcgtatagtagcaagacccttgttagctagcctccaagcgaaaatcttgatcttatggggcaccggtgttttcgagatggagccccaaatactgcgctcaccatttgcagccgagctggaagaaccaagattagaatcaagcctagcatgcagcaccaacttgtaagcactttgaatagagaagagacctgacttttcataatgccacgcaagaaaatcctgtctgatattgaggcagtttaattttgagaatttctatggcatcaaaaggattgcatattcgccagatcagatccgcatcccaggaacgatcatcttgctttattaactgggaaacccaacgaaggcgacaccttccagcaacaccagctaacataagcgaggattcactcggtatccaccgatcatgccagattcttacttttgtcccatctccaatacgccaaatcagacctttcttcagcaattgaagaccatattccaggctcttccaagtcaccgatgagtcacccaggaaaacagcatctattaactcactgttagggaaatatttagccttcaacaacctggcgcataagctatccggaaactgaatcaggcgccaagcttgcctggctaggagagcttggttgaaaagcctcatatcccgaaaacccaagcctcccatgaatttaggcagaattagctgttcccaagcgatccaatgcactttccgtttattggtctcatcaccccaccaaaaatccctgatcattttggtataatgtcggctcccaaaactaatgattcagaaaccgacatgtttagactgtatcaagccctggatcagtagattgatacaagttcaataatctggatcgtctttgcatacgtctaggcatagctttgaaggagatattattatatgaagtaatagggtatttacaagattgtgtctaactattacagcag

SEQ ID NO: 27023 - DNA, 1703 bp, Oryza sativa
ggatttttgatctaaaggaaaaggatttatttaaatcctttttgagaaaagaaaagaaaataaagagggaggggaattagacttccctcgggcggctagggcgcggcccgagagaaaggggcggctcggccgaacttaacgggtcggccggccagagaaggcggcccaaggcgcgcgcgcgggcggggaggagagagggagctggtgggccgggtccatctcgcgtggtcccgagtgggacctgcttttcggtggctcggctcaccgtgcggagggagcacgctgcgtgcgctagggttcggggaaagagacgcggtgcacgcgcgcggttcgcagaggacgcggatacggctggcccacgcgcagcctcacggctcgcggtggaccgcgcgcgtgagcggggccggagggagcggctgaccagggtcggctcgacccggtcgcggccgaggtggcaccgacgtggtgccttcatggcagccacgcgggccggcgagaggaagacgaaggcgccggccgcgaatagacggcgggcggcggcggtttctccgggatgccgtgcgacgacgaggggcgacggggtgtacaccggaatgacgagggagaacgagagggagcgagccaacggcttggattcgccggagggagttcgtcggcggcagattgcggtggcggcaaccggcggcgagaaaagggggaaacggcgacgaggtcacgaggggctgattcccggcggtgagagcatctacacggctacggtaatgcattcctagcaccggattaggaggaaacacgccgtgggaggccggcgacgagaggtggttaccggactcgggcggcgacggcggcgagcccactgtgagtgatggcagcagtcggggcggcgcaagtttgctacggggaggctacacatgccactaaccgagtctaaggggaggagatggatcgaggagggagaacggggagatgcactaccgtgcgggacggggcgcagtgacgatgggccgacggcacgggagtgatctcttcggcctcaggccgaggaagcggaggaagacgatgtgcccgaagtccccttcacgcgtcctttgcacgcaccggctctcccgatgcttggcgatgaacggcggaggcgagacagaggggcggcaatggtgtggtggtggcgagcgaaacgggaggaggaatcgatgggagggcgccttggttaaataggaggcgatgtcgatttgggaaccgacctagggcggtcaagggagcgagctagcgctcggcggtcgcggccaaaacggcgacagggggggtgacgccggcggaagagaaaagggaaaaggaggagagaaaggggggcttgcccgttgccactttgggaaaaggaggagggagagagggcgacgcggcagagggaggaggagctctgcctccatcccttggaagctagcgtgcggagtggcggggccaggtcgtgacgacggcgatgacggcgggggcggtgtggagcggaacagcgacacgggcggcaggcgcgggcaggcgtggcagatgctgacggcggcggcgaccaggcggtcggccaccacggcgagcgcgcgcgggaagcaacggcgcgcggcgatttgagcggcgcggctcgggcacgcgtgctggctcgcggggtcgagcggctgcgctgctacaggcgtggcagggcagcggggccgggc

SEQ ID NO: 27024 - DNA, 14677 bp, Oryza sativa
aaatagacttttgcggaggaattcgatttgggaaggaattggattcgggatttgaattcgacgatggatcggggattcgagatccggaatggcacagagactgactgcaagcgaagaaacaattttcgcaattagggtttttagaatttaaattttcccgctaggcgccacgacggaacgggcgctacacaacgtcttagcggcggaggaggagcgaggtagcggtggtgctcgaggcccctcactccacttgcggcagcaactgaggagaggagaacggggagacgtcgcccaaagcaggaggcgcaccggcggcgagggacgatagtgctacgtggcagcgggaggaggaaaactcgttgccgaggtcattgcatgtgcccacgtccatggccaccgccttgtctgctgtgcgcgggggctggcccttccccggtgtagtctcactcaccggcagctgtcacgcacccctccgcaacaccgacgtccacgccatttccaccgtccgctgcccgcgtccatggccgccgccttgtccgccgcgcgccaggaggcggtggccccttcctcggggcagcctagcttgtcggcggctgctgcccgtacctccgcaacaccgactttcgcgccgtttccacaacgacatcaatgccgctatcttcccctacttcgcgcggtggcgccaagcgtttggcaagagaggaatagaggtggtaactagtgaggagaggggaagtagtcattgacgcgtgaacatgctgactcagctgccacatcaactaaaaccagagacaataccaccgaaaatgctgcacgccgggcgcctgagcgtccgaacaaaaaatcggacactcggaccacatactaagtattttaaatagctttaaaatgatttttctcctaaattaattatccaatctatgatccgatcacgccgttgtattcgttgcaattaaatctttataacaagaccacacatgattatatttcgacaaaaaaatattttagcttttttattgatatttttttagaatgctgcatatggttcttttgatgtttcaatcaatagttttacgatgttttagctagtgtactcactatgtacggatcaaatgttgcagtggattttgatattatggaacgcgtcattgcaacaaatcacccatatattttgaaaactctctattaagggaatttgttttctttttttggttccacaaaaaatgtttcacctagtgtactcacaatgtttcactatatatagatctaatgttgcagtgaactaaaacattccattgcaacaaaaaaaagcccacatattttagaaaccccatattaaggaaattcgttttattttttgttccaccaaaaaatgtttcacctagtgtcctcacaatgtttcactatgtatagatcaaatgttgtagtgaactgaaatattctttcgctatttgctgaaacattatttttatataatgtgaaacaacacccgatttaaacgagtaaaacattttcgctctacttagttaaacaattccgatatacctggtggaacatcgtgttacatttaaaaataattcaataataagctaatttttttttcgtcggaatatatccatgtgtagtcttgttttgaagatttaatttcaacgaatttaatggtgcaatcggatcatgatttggataagtaatttaagagaaaaattagttttaaagtagttttgtacgtaaatcgggcgctgacatcagcgcccgatttccctagcccggatcgggcgactgatccgtaggcgcgtcccaatgccaccgagggattagtttgcactgattttataagttgagagatatattgtatgtggtttttcggttgagggatgattttgtaattcggtaacaagatgagggatcttcggtgtacttttccgaacaaaattgaccatgcttatgggcagcgggccatgtccaggcccagttctttccggaaaggtggggagagcccatgtaacgttccccataatctcatccgcgacgcggcccgtatgcccaaaaggcccaagaaacagagttttggtgtgggaaaaagtacaccgaaggtccctcaacttgttagcgagatacaaaatcgtcccctaactgtaaaaccggacatccggtgtccctcaatttacaaaaccggtcacaatagatctctcggcggttttgaccccgatttggtcccacgtggcgcctgactcaacgtgggacccatgtgggccccacatgtcagatagaccacgtcaccaccctttctctttttcccctgttctctcccttcctctctcctttttcctcaaggcatggatggcggcagcatcttcgacgcggcgtggaggagggccgacgtggccggcagctgacggggaaggtgcggtgtggagaggagggccgatgggacgggcggagccgccgatggctgccgtcgcgcggggaggagagcggtggtcgtcgtcagggtgaggcggcgatgcatggtggcgcgggcggcgtggcggaggggagggccggcggctagcgaagaaggagcatgacggagaggaggtccgagggccgatgcagcggtagcagcttcatcggcgcggcgaacaagagggtcgacgcagccgacggcggagaggagatctagctgtcgccgtagccgctgatggagatggcgaggcggccaccagcagctccggcgggcggtgggggttctcccactgccagtagccggtccggggcttcactcgatccactaccagctgcatgcacaaagctaaccacatgcatgctccactcgatccaaccgacttgctccaactagctcatgcacacatgcacgtactagcatagcacaaagccttggctaactaactaactaattaatcatgcatgctgttagagtgcgcagcccggcccatcaaccgtgggccacccaagtcacattgggcctgctccaccacaggcccaatcggagccacaactttaggtcctgggcctacacaacccaaaagactagtctattgggtgaggatcgcccccaccttttaagtcgtgctcccccatcatcaattactgatgtgggactaaacccaacaatctcccccgtcacacatcgggcccaacaatctcccccgtcacattaaccccatgtgatcccgaagacttgttacctggcctctctaccatgtgacccatgggaattgtttcgggttccaaaccttgggctctgataccacttgttagagtgcgcagcccggcctatcaaccgtgggccacccaggtcacattgggcctgctccaccacaggcccaatcggagtcacgactttaggtcctgggcctacacaacccaaaaaactagtctattgggtaaggaccgcccccaccttttaagtcgtgctcccccatcatcaattaccgatgtgggactaaacccaacacatgcagcgttggcgatgccgtcgtgcgtgacggtcagcctgatggcgtcgtcgttcttggcgaggcagcacgcgaatgccaccgactcccggtcgttggggccgccgaggaagacggcgacgatctgggtccccaccttctagtcgccttggttcctcgccgccgtcgtctcttcgcttgttgatatcttggtcggcaactggaagctggcgccgcccctccagaacgggcggtcggtgaagatgccgacggtgcacggggcaagctctagcaccttgtggttgagctcgcagcaatggtgctcgcgggcaccccgtcgaacccgggtgcttcggtaagttgtcgacgaaggagacggcgacgagcagcagcaccagccatcggcttcgtcaccggcgacaacctcactgtcccgctccgctgcgcctgcccctagctaccgcaggtcgcagtagtggtggccgcggcactcgatgcgcgtcacggcatgacctgcccaagaggagagaagtgagagagggagagagaggaggaagggagggatgacgtggcatcctgacatgtggggcccacgttgagtcagccaccacgtaagataaaaccggggtcaaaaccatcgaaaaaccaattgtgaccggttttgtaagttgggggacgccggatgtccggttttacggttgagggacgattttgtatctggctaacaagttgagggaccttgcgtgcactttttcctttggtgtgtgccacccccgccacaccgtcacccgtgcatgtgcgtcgcgatcgcagccatgcagaatgcaacgcccccggctatgtaaccccggggccggggctacgtgcctacgtggccgcgtgctcgacgctagccgccgaaccagaaggaagggagggacgaaagggtggtgtggtaagcgctgcatatgccccagcgagctaggcagcgagtgatacggggatcggtcccaagacgagatcatgtcgtcacgagtgagatttgacagggaaagctttggaccagctatagcctgcctgccgtgtctcgtactctcggtacgtacgtcgagtgtgcataccgtgacgaatcacaacttcacaagtactgctgctgatactgaggtatgatgggtatttcggagatgatcgtcgtctcatcgcatctgctccgatgtatgcattgattatcttgtgaatgatcacctgattaattatctgtatgcaaacaaactctctaactaggtgaaacctcgcgcattgctgcgggaatttagtatgttaaaaaaataacgtgcaagatagctagataacatcagattaagtaaattaatgtgatttatgataatttaaacttaaatagtagaatggtgattcaaacgtaaaaagtaaggtggtatgactttatggaagaagaaaagtagggagatagtttggaccgtagattaatcatctaaaggttaaaaacaattgatgtgatacgacttaattagaggaaaaaaggagaaagataatttggaccatagattaatcatttaagcattaactaaatgaggatgaactatataagtatataggatatcataaaatataataaagatatacattgaaatattatgtaaattatgttgtatgataatttaacatgtttgtatttgaaaagctcctaaattataaaaactataaagatatagcatgtttgcatgatatttaaacatgatgattgttagtggatgatgatgtggcatcttgttaattagtggatgatgatgtggcatcttgttaattagtggatgatgatgtggcatcttgttagtggatgatgatgtggcatctttgcatgttaagcttagtgagttagtgggggataactttataataagataggattaacataattatttaaaatcatcgcatgcgggaatattgtatgacatgtcaaataaaatttaagatgtgtttcatttgtatctaaatgactttgacaattatttattttttactataagtaatttgcaccatagagagctttttatggcttgaggaaaaaaaagacataaaaaccttaattatctgctatcgatatagataaggcataaactctcaaatgcttttaagaagactaatcatcaacccatgtgttgcatagatattacacctatattataaatattaaaatttcaaattcatatgctaaatacgctgggcattttttttaatcacatcggttagattataaagaagaggccgcatcagctacaacatggttaattgttaattacaaatttttttattttaaattgtcataaaatttctgaacttcatagttaataaatatcgagatgtaccctgttaggagtcataataatatttttttcatgtttttataaattcaaaagtcaaaattaatcactaccgtatattagagtattgtcaagtgtaaattagttttaagagaaaattgtatcttgggcctgtttttattaccgtagttacaacttggactaggtgtaaaccaaacttttcattttgggccaggtttctctatatgttggttcaatttggaccctcttcttcttcctcaaagactctctctctctctatagctcaaagcacggtagtgtagctcgagcaggagcaacacgcaaagagcaaaagcttggctcatatgtaattgaggttgagcataagtgcatgactcatctcctttcaaattccttcacattactgatcaagcaactcaaccttccaaaagaactcgaaggatagtttgtatttctaattttcaaccagcacattgaattggcgagaagctcaagctcaatgatagtgtcggatgactagagctttaggatgggaatggttagggttgatccatttatccactaaatctattcgtaaatttgtcctaatggatttttagggccgctccaaaaatataaatggatcgaacagatcaaaacattagaacctaggtttaaggggttcaacccaaaatacttcacatgcataaatgtttcaaaaatttgtacaaagttgcttctctatataataattcattcctacaaaattcaactaaatttaacaagttttcatagtgtgaacgcgagtttaaaaattttgggtccgagttttacacacatgtaactagaatttttgggtatcagtaatgcatcgtgggccccacatgtataaagggctcaaaatttacacaaagttgcttctctgtgcaataaattatcccaccgaaattcgactgaattcgataagttgttatagtgtgaacgcgagttaaaaattttgggtccaagttttacatacatgtaataagagttttttttttctactagtaatgtagccgatccatttagatatccatggataacctattgatataatagactcgtgatggattgatcctattaaatcatggatcaacgaactcacttaaaacggtttaggttcaatccatatcctaaccattcccatcctggctcgagctagcatgcctccgcatgcgttgcctgcactcgagctccacctccacgcgtgctgcctacactcagagctcaagctcagctttgatgggcggctgcgctgggatggcttgcacttctcttctgaatgcgctactcctgattgagaagaggtcttgagctgtccgcaacagagaaatggagctggaggaagaatagagctcaaattgaaacattgtgtaaatatacccggtccaaagtgaaaaaggttaatttaccctcggtctaagttgcaacattggtaagaaagatgacccaagatgcaataaaaatatcgagatgtactttcaatagcctgacaatcttctggcacatatgtctaacaatcttcttgtcatgtcagcgatacaggtgcaggttctataaaacaacctacatctatattaggagatatatgtgccagttgtttcctctatgcggtatctaaaatcagacccaccacacccagtggtcaggtgcctgttggtgggacccagtttaatgtagttagtttatatacagaaccggcacatataacttctcaaatgtgccgattctataatttgattgctcacgtggataaaaaagacatatgcttatgacggagcgtggggctcctcaccgagagaccgcgcaggtccccctttgccggttcggccgggggcgctaagtgaggttcttagccctcgatctgtggaataatcgcgagagagcaaatgcacgaaacacgggcgatgtagacaggttcgggccgctgagaagcgtaataccctactcctgtgttctggtggatctgtgtatgaagaagttacaaagagctggggagccagagaattcaggctctagaacccctctattctccttctggatctggatccgggatcccctcctcggtgggcaaggtcctccttttatatctcaaggggataccacatgcaccacttttacctactcttcttttgggtggggacccatcctatcttgaccaaaacttggctcgcgccttcgcctggaagctaaatcatagcttgtccttgagtgagggccagcgccgtcactcgcctgacacaggggatacccctgtcatttcttcattaatgggtggagatttgcaatggatgctgtccgaatgaccctccgatgggatgggccatacctacccccactctgccggaagcagatgtaacgtgggagcacagttgtctgccgatgacgtgaccggcgtcagactagtcacagaccggtcactcttgtccaccacgcgtcagtttagcataccgcacgtctgcccttcttcatgcaatgacttccccgccatggttgcgatgaagcctgtaatgtatctggccgggactgacgtgttaactccaggagttaacacgccggctccggctagggacgagtgcctggaggctctcatcattccgacgggacgggtcgaggcgtgagagaggccgcctgttgccacctaacccgcgatctgaccggtctgtgaccggtcacacactgcgaccggtcacggaccggataagcgagcgcgctgcgctgcattaaatgcggcgtggcgcgctcgtccaacccgcaataaatgcggttaggtgagcgccgctgtgctcacctaacccacacacgtggcgccaacaccacagggggtcggggcgccccagccctcggggccgaaacgggagcggcccgacccctcggggagacagagggaggggtggccacgtcaccctcgggcccgacccccccgagggggttaggccacgtggatgaccgtggctgcccaagcctctaatcacgatactcccggtcccatgtcaccgacagtagtccccggcattatgccagggcgaccgcccccctcgagggaagcgctcgggcgtgacgccactccttaggcctggtgacaggtggggccggtctctacaggcgggcagaaacccagcgatcgcaaatcgcgcgcgtcggcaaggaaaaaacgaccgacaataatgagcggcctctttaagaccgctacattactggagtagcgcacgaatcgggacgagccggttcgtttcgcctggagacatgatgatggcgcttcggcgagcgtagttaacgcgcgcacgatatgtcccatctcgactgccacggccgcacatccgcctcgtgcgccgtaaacgggcgagtgggattagcggaggcgtgggtacgagaaacgagggggcgagatagtgggcgcgggaaacgaggagccgggcatagcgttggcaagggtataaagacgcggaggaagagattcgtttccttcctctcgccattattccccttgccttcgccgcttgcgctctaactcttcgtttcctgtgcccttcccttgccgcactcactcgctctcaagctcctcctccgccggcgtcatggcacggggctccgcaccgctcgaaggtagcgtgctgccgccttcccgcatcgtgagcgagaggcaggccgggctgccgcgccgattcatgccggaatctgttaccggccgggaggtggtcgcgctgggcgagggacgcccggcgccacactacccggggcgatccgtcttcttcctctctttcgcaatggcagggctggtcccgccattctcttctttcttcatggatgttctggagctttacgatctccagatggcgcacctcactcccaacgcggtaatgatgttggccatcttcgcgcacctgtgcgagatgttcatcggggtgcgcccatctctccggctgctccagtggttcttcaccgtacagccggtgtcgccgccgatggtagtcgatggctgctacttccagccgcgggggcaggtgctgcaccgctacattccctgcatccttcgcaagaagtgggacgactggaagagcgattggttctatactcccctcgccgacaaagcgcgcctccgacttccgagccagcccccagcgcaggcctccagctggcgagccccggtagatctgggagacggctacgacgccgttcttgaccgcctggcgggtctgcgatcccaggggctcacgggggccatggtgttcggcgactaccttcgtcgccggatcgtgccgctccagcggcgcgcccggggcgcctgggagtacaccgggtccgaggactacatgaggacccaccaggggagcaaatgggactgggtccctgaagacttcaagatggtggtccaacgggtgctgaatctcagctccgtggaggcatccctcatcccccaaggtatcctccccttctgcagcgattcagagcgcgccaacatcctgaccatcatgcagacggtcggggcgtcgggggagcgggcccctcgaggccacgatggcgcgggcgggagccgcaggggggaacaatctaccccaggagggggtcgtgcttctgggccccgcgacgggggcccggggggcagccgccctgccgacgccagggggaagaggaagcagcagggtaccccttccccatctcctccccgagggggtggggcggcgcgtgctagtcagcaggcgcccggagggtgccgtgccgtcgtcgcagcccgaggggagcgaaagaagaagtggctccgcaagatggggggaccgaaccatgccggggaaacctcatctcccccccaaggtggtcgtttagccgacctcctcgcaggttcatccccgcgcccactgcggccgtattcattctcccatctcccaaggcaagttttcactcacccgtttctttttgtcttctggtttttcttctgcctcagcgagatcccgtcgctcccccttcgccattccaagtccggccggtctgaggccgaggagacagcgaccgcggaggcccggaggcgggaagctgaccggcgagaagccgcggaccgccttcgggaagccgaggaagctgcccaggaggccgtccgggctcgccaggctgaggaaaacgctcgggaggaggccaggctccgccgggctgaggagtccatccgggaggcagaggcggcgcgcgcacgccaggcggcctgccaagcccccgacccgactccgcccgaggcgacgacaacttccgaggccacccacgacgaggctacgggcgcaccgctcgggcccgacccttcgggcgacgctcaggacgagccagcttcggggggcgtccccgagtccggcacgtcgatcggcgggccgagccgtgcggcaacctcaccaaggcggctctcccctatgccttccactgccccactgagcgcggagccccttctgcaggccttggctgccgcgaacaccacggtgttggacgggttaagtgcccagatggaggtcctgcaggcagagcggacggagctcgacgcggcgtgggcacgcgtcgaagaggggcgacgctcggtggaggcaatggtggaggcgggccgcaaggcacaccgccggcacacctcagagctcgaggcccgtcggagggagctggcggagatcgccagggaggtggaggaggagcgggagagtgccctcctcgccgccgccgtgctgaacgaggcgcgggacgacctccgcctccaatacgggagccgggcggcggagctagagaagaagctcgacgccgcccggggagtccttgacgccgccgctgcccgggaacggcgggcggcggagagcgaggcggcatcccggcggcgcgaagaggcccttgaggctcgcgccacggcgctggaggagcgcgcccgcgtgaaggagcgggacctggcggaccgcgaggccgtcgtcgccatccgggaggcaacactggcggcgcacgaggccgcctgcgccgaagaggagtccgcactccgcctccgcgaggacgcgctcaccgagcgggagcgagctctcgaggaggccgaggccacggcgcagcggctggcggacagcctgttccaccgcgaggcagcgcgggaggagcaggcgcgccgtaatctggaaggcgcccgggccgagagggccgcactggatcaggggccgctgagctcgaggcgcgggcgaaggagctggacgcgagggcgcgcagcggcggggcggccgcgggcgacggcgacctagccgcccgcctcgcatctgccgaacacaccatcgccgagctgcagggcgcgctggactcgtccgcttggcgggcgaagtagggcccggcatgcttcgggatgccgtctcccatctagaccgcgccgggcggcaggcgggcctctggggcgggcggactgcgaagtacgctgccaaccaagggggcctcgcccagcgcctctcagagatggccgggaccctccctcggctccccgaggaactcgaggagacgatcaagtcatcctcgagagacctcgccctgggggcagtggagctcgtactggcaagctaccaggccagggaccccgacttctccccgtgggcagcgctggacgagttccctcccggaaccgaggacggcgcgcgcacgcaggttcgggacgccaccgaccacatcgtccacagttttgagggtacgacccctcggctcgcgttcgcccttgactccgacgaggagggcggtgatggtggtgcggacgccagcggcgacgaggccggcgacccgggcgcgtcggaatgagcccctaggccctcgccaatcttatatagctttttctttttcttccgaggccttcgggcccccttcttgtatagactgatttaatctgtaatcaaataaagaggaaatttcggtgtcaattctatttgttgtgtgtatgagacgaggatggcctgtgccgcggtccttctgtgtcttggcttgaataagggctcgtgcctaggtcccagcctcaaacggcgcgggtcggagctagtgcctggggagatccacgtgacgagactggccaggccgggagcgtggtgaccgagggttatggatgacccgattgtgggcctttgccgattcccccccggagttcaccacgccccggggcacggctcggttctgggccccttttggcgattttagccggcccgggccaccgagggcaggatcgagcacgagcgtgctaattcaagccaagattcttcaaaaggaaacagtggcacagacacattccttaggaaaacgaaaatgcttttattgaaatacggaagagaaaaaagataagtattatgcatgtggtagcccccggccaacactgcacgcccgggggggtgcggggttggcccgagcccgagacctgacacccgacccccactaggggtagaagcgacgaaggtgttcgatgttccacgggttaggcagctctgtgccgtcgcccgtggccagccgaacggagcccggccgggggacgccgatcactcgatacggaccctcccacatcggtgagagcttgctcagtccagcacgcgtttggacgcggcgtaggacgaggtcgtcgacgcagagtgatcgggcccggacgtggcgctgatggtagcgccgcaggctctgctggtagcgcgcggctcggagggccgcgcgccgccttcgctcttccaagtagtcgaggtcatctctgcgaagctgatcttgatcagcctcgcaatacatggtggcccgaggggacctcagggtgagctcagatgggaggaccgcctccgcgccgtagacgaggaagaaaggcgtttccccggttgctcggcttggcgtggttcggttcgcccagagcaccgctggcagctcctcgatccacgagtcgccatgcttcttgaggatgttgaaggtcttggttttaaggcccttgaggatttccgcgttggcgcgctccacttggccattgcttctggggtgggcgggggaggcgaagcagagcttgatgcccatgtcttcgcagtagtcaccgaagagctcactagtgaactgggtgccgttatccgtaatgatacggttaggcaccccgaaccgagcagtgatgcccctgatgaatttaagcgcggagtgcttatcgatcttgatgaccggataagcctcaggccacttagtgaacttgtcgatggcgacatacagatactcgaacccgcccggggcccgcctgaacggacccaggatatcgagcccccagacagcaaacggccacgaaagaggtatggtctgcagggcctgggccggctgatgggtttgcttggcgtggaactggcacgccctgcaccgccggaccaggtcgaccgcatcgttgagagccgtcggccaatagaaaccctggcgaaaggccttgccaaccaaggtgcgtgaggcggagtgggctccgcactcgccttcatggatatcggcaagaagctcgacgccttgttcccgaggaatgcacttcaggaggactccgtttgccgcgcgccgatagagggtcccttccaccagcacgtagcgtttggagatgcgctggacgcgttcactcccttcgcggtcctcgggtagagttttatctgcgaggtacgcctggatctcagcgatccaagcaatcaatctaagggagctgggagcgctcccctcgggtcccgaggcctggactccgacgggcctcgggggccgttcaggcgcgtccgactcccctagggggtcgggtcgcgccgacggctgggcaagcctttcttcaaaggcacccggtggggtctgggctcgcgaggaagcgagccttgagagttcgtcggcgaccgcgttatcctgtctgggcacgtgccgaagctctatcccgtcgaa

SEQ ID NO: 27025 - DNA, 4434 bp, Oryza sativa
catttccagggcgcttttcgtccgagaggccgcgcggggcgcactcggcttctgtggcgacgacctcggggtcggagggcgacaggcgcggccttcccgcagtggccccggggccatcctgggggtcgggggcgcctggcaccatcggacaaacaggcggagggccagctccggccgttgggggcctcgggccgctgttcggctcgggggcctctcctccctgctctctcccgggtctagtcgacacagagtgggggtgcgcggagtgagggttgtcctcatcacgctccacgaccaacgccgcgctgaccacctgcggggttgccgccaggtagagtagcaacggctcatctggcttcggggcgaccaggaccgggggagaactgaggtataccttcaactgagtgagggcccgctcagcctcctccgtccaggtaaacggcccgaagcgtttgaggagcttaaataggggtagcgccttctctcccagcctcgatatgaaccgacatagggcggccatgcagccggtgacgcactgcacatccctaagcttgctgggggggcgcatccgctctatagctcgtatcttctcggggttggcctcgatgcctcgggcagagaccaagaacccgagaagcttgcccgcgggcacgccgaacacgcacttatcggggttcagctttatgcgggcggagcggagactttcgaaagtttccgctaggtctgagagtaaggtctcttggttgcgcgtcttcacaaccaagtcatcaacataggcctcaacattgcgtcttaactggctacccaaagaaattcgagtagtacgttgaaaagtaggacctgcattctttaacccgaaaggcattgtcgtataacaataagttcctatgggggtaataaatgcagttttttcctcatcctccctagccatgcgaatctgatgataaccagagtatgcatctagaaaacacaaaaggtcgcaccccgcggtggagtcgacaatctgatctatgcgtggcaaggggtaagggtccttaggacatgccttgttgaggtcggtgtagtcgatgcacatccgaagcttgccgttcgccttggggacgacgaccgggttcgccagccactccggatggatgacctcacggatgaatccggcctccagaagtcgcgccacctcctcgcggatgaaggcttgacgttccggggcctgccgccgcactttctgccggaccggccttgcgcccggccgcacggcgagacggtgctcaatcacctccctggggaccccgggcatgtccgccggtctccaggcgaagacatcggcgtttgcccgcaggaaggagacgagcgcgtcttcctatttgtcgtccagaagaccaccgattcgtgtggtcttggacgggccgtcgcccagggcaacctccttgaccgggacctcgtcgcacgtgatcatccgctgcctcggggcggctgggacggaggtgctgagcctctcgtcgccacccgcgggcttggacgccgcggcgaggtggtccgcgcgctgctccatacaagcaagcgcgactttgaggtcgccatggacggtaatggggccaccggggcccggcatcttcatctggagataggcgtagtgccgccgccatgaacttcaccaacgcgggcctccccaggaccgcgttgtagggcagactgaggtccgccacatcgaagttcacccgctccgtgcggaagttggcggaaccaccgaaggtgaccgggaggtcgatatgacctagcggccaagtgtgtcccggcgtcacaccgatgatcggctgggacggccggagcaccatccccggggccttgatggcgtcaaaggctgcgggggaaaggatgttgagggctgcacccccgtctataaggacacgccccaacttcacattgcaaacggtgggggaaaccaccatcgcgatctgtcctccccgagcaacgcacggcgagtggtcggtctggtcgaaggtgagggcaacctctgaccaccgcgcccgccgcgtcgcctcatgggtaggggccgcggccagaagctctcgcttcatggccttgaggctccggcgagaagcgtgagcgcacgctcccccatcgacggtggcgacggtggcctcgggctcctggaaccccaggtcatcgtcgccatcgtcgatgtcctcggcggtggccttctgcttggcctcacctcgtcggttgccggcgggagccaccggggccttgccctcacggcgctcctgcctcctctcctcctcccacttcctcgtccgctcagccaaacttttgaccgcgcggcagtccacgaggtcgtggagggaggtgttgtgcacggaacaccacttgccggtcgggcgctccctgctgggagcgccggcctccttctttttgtcgctcgcaggcctcccctttcgggtggcccgcgaagcgccctcgacggcgaggacgtgaccctcgtcgtcggaatgggccgacctcttcttcctcctcctgtcccgccgccctgaccgagcggcggacccgggggcggccgaagctgccacaccggaaccggaggagttccaggtccaggcctcctccttgcgagccacacggtccgtgagctgaaaaagctccgcggtggtctggggctccttggaggcaatcttttcgagcatgcggttgtgccgcacccccctccctgaacgcgtagatcaccccgtgtgcggggatgcatggtatggtgttgcggacttcacagaaccgctgcatgtacgagcgaagagactcatcgtcccctcgctgtaccgcgtgcaagtccgcttcttcacctgggcgtggatatgtgccttggaagttcatggtgaactgctggcacaaatcctcccaagagtggaccgacgcgggtggcaagttcattagccaaccccgcgcttgacctttcagggccatgggaagaaattcgccatgaccctgtcgtcacccccggcggcctcaatcccggtcgtatagatctggagaaactcggcggggttgacgcttccgtcgtatttttcggtgatggtgggccggaaccttgggggccaacggacgttccgaaggctcgccacaaaggctcgacagccggcaccgcctaccggggacacgggaggctggcccccgtgcccggaccgaagtggcgctccggacgaggaagcgccctccgttgcgtgggcagcacgacgaccattgcgccggtgctcgatattgaggcgggcatccggtcccccacgcacatcttcttgggtcggaggcgttggcgagggaatggcggacgaacggcgggtaacagccgccgctcgccgcgccctccgcctcgacgacacggagccggcggtagcagcgccagaggccttggtggcggaggaccgcccgccggtgcctaggcgctgctgcgccgtcatgaccaagtcggccacgtcgtccagccaacgtcgggctggagtctctggatcggggacgacgggcgggtgacgcaggagcgcgcccgcagcctggagcgcgccctggggcgtgctgccatcgccgtagacgaggaggcgacgctccccgtctcgccgtccttctccattgcccgcgggtggcgaggtcgcggatctttcgacctcctcgagcgcctcctcccgcccaagacttcggcgagagggggacggtggagtacgagctcgacggcgcgggttctgctctccatcgtcaccgctagcgctcggagagaggttgtgcgccactgcccgttcggccattgggctgagcgggagaagcttggcgcacacgaaagaggacaagggcttagaaagacacacacgcacccctacctggcgcgccaaatgacggagcgtggggctcctcaccgggagaccgcgcaggtccccctttgccggttcggccgggggcgctaagtgaggttcttagccctcgatctgtggaatgatcgcgagagagcaaatgcacgagacacgggcgatgtagacaggttcgggccgctgagaagcgtaataccctactcctgtgttctggtggatctgtgtatgaagaagttacaaagagctggggaaccagagaattcaggctctagaacccctctattctccttctggatctggatccgggatccccctcctcggtgggcaaggtcctccttttatatctcaaggggataccacatgcaccacttttacctactcttcttttgggtggggacccatcctatcttgaccaaaacttggctcgcgccttcgcctggaagctaaatcacagcttgtccttgagtgagggccagcgccgtcactcgcctgacacaggggatacccctgtcatttcttcattaatgggtggagatttgcaatggatgctgtccgaatgaccctccgatgggatgggccatacctaccccca

SEQ ID NO: 27026 - DNA, 29981 bp, Oryza sativa
ctccccccccaaaaaaaaccacgtcctatacgccgggtcgcgccgctcgtgggggcaggtacgcacgcacgcactgtcccgcaacacgatccaatccacctcgttggcacatgcacgaaccgcaccgcgcgcgcgggtgccgtgagctcaccccggacgccaccagttttgtcccggcccgatcgcgcgcgcgcgcgatcccgcgacagcgatgcgcgtttccttggagccgcacccgcgtgtgtacgtactccactactccagtccagcggcaacgcgcggcgcgcggagaggcctcggttaataccaccaggccaccaccacctctgcgctatcctctcgtttgcggccggcgcgcaacgagccgacgagcacgcacagcggaatctgccacatccgcgcgcgcgacgccggagcgaacaagcaggaatgtcctggcgccggtgatacaggacgacagggatggcgcgtcgtatcatcaccgaatactaagggtgtgtttagttgaggaaatgaaaatttttgggtgtcacatcggacgtttgaccagatgtcgaaaggggttttaagacacgaataaaaaactaatttcataactcacctggaaaccgcgagacgaatcttttgagcctaattaacccgtcattagcacatgtgggttactgtagcacttatagctaatcatggactaattagactcaaaagattcgtctcgcgattttctccataactgtgtaattagtttttttatttatctacatctaatgcttaatatatgtgtccaaagattcgatgtgatgtttttgaaaaaaaaatttaggaactaaacggggctaactgcaggcgccagtgcgctcgacgcttgtaaagcgaagcgagcctcaatgattgagagctctagcggtagccggccgtatcgccttgtcgctgtcgggatcgagcctgctgtgacgcactaggcaaatgctgcattgctgttagctataggatactgactgctttgatcggtaatttggagttttggacatgagcgctgcaccttcatcgatacagacatggatttatcatagctaggtgctggtgaatgattgcctgattagccgactagccgtgtgcagactaagaaccatgttcggataggttaatagtataataatacttgaagaagatattgtcgatacagacaggacgctaattaagcatgctttaaggtagaagatgaaatcagatgcccctttgccgcgcgatgctttgcattgccagatttctccgggatatctggtctgaatgaagtagtgcgaaggtcaaattatggtccagttgctgacgaccatgcatggttctcgtgtcgtgagattgaccttcctaccccggagcatcagaacatggctgagctatcggcaccgatcgagcaaagcagcaaattcagcttgatcgaccggtcgagcagaacagcaaattagctcgatggcacgtccgcacggagttgcggcagggggatagttacatgttcagagatttgactaattgacgaaaacttagctgaaacgcaacacggattaattctacttgatgcgaatgaaacgctgatgagatttattcaaggttggctgcctcctcgcaaaaaaagaaaaaaaagaaaaaaaagaaaagagagagagagagagagagagagagagagagagagagagagagagagagagagagagagagagagagagagagagagagagaggtgtcttcctaatgcagcttgatttgttgaacatggagccatcagccatggagtgattgcaatgctcagccagtcattacaggtagcgaaaagaaccacctggcctattagaaacagagcacaagcacaagcacaaagacacaaaatgctagtgtgaacaaacaaacaaacgcgagtgaaagcggatacattggattcatacatctgatctctagagttggtaaagaaaaatacatgcattagtaggatatatttaaacgtacgtcgcaggattaagactgtcgatcgagatttgcaagccaatacattcgcatgattcagggcagccggtacaggatcgtcttgtccgtattcaattggattcagaaacagaaactgtacagttccatttgtgtctttaacaagtcggctggctttctcgtgatgattcatcagtcaatattgtcatactgtctgtgataattatctttttataacctgacaacactgatattgtcgccacatgcagaaatgccagtgctgtgcggatacgtgcaattgaacttaccatccattccttttccttttctttgaaggaccaatggaacttatctgcaatctttttattcggaaaccgataaacaatctgcaggttgctgaccacagaaaacgtactgaaatgaaatgcattgttgataacaccgacggtttttctatttttcaaggaacattatcaaacattgttgctgctgcccctggccggcaagactatccattttacggtttacggattagtgcacaaaacacgccatgtgataaaacggataaactgttctttgccggccactaaactaatcatcagtgatggtaacacggtacatttctgggacaccgcttggatagaagggcaaaaaccataaacataatgccactagtttatacaataaaaaaaggaggaaaaatctctgcgtgaatgcatgaagaagatctaaatggcaaaacccacctcgcagtggatctgatcaaccaactcgtatccctgtggaacgcaacacagggcatccacctagaacaaacgaggttgaccaaattgtttggaagctaacgaaccatgagaaatatttgactttatcggcataaaagacgcaatgtctgggaattataggcaccaatttcaataccttaatgatctggagagcatggaccctgcaaaaagcaaattctatcaaaatagcgtatggatctcggatcgactcacaaccagaagctggccaaacaaacaacgggcactgccccctctgccaccgaatctagagcctaatagcctcttagatggcatatcaacaactggaccgagccaatgggaaccaagccaaaacgttaagcttgatgggaaatgttggccaacaaaaaggaagtacccaagaaatacccgcgcaccctaatcccgctagtcatttgggagatctggaaagaaagaaaccaacgagttttcaagcacaaagagaccacgacacctagcctattgacaaaaataaaggagaaagcaagaacttgggctttggcatgtgcaaagcagcttcgggagtttctaccaaactgcataagccacacgtaaaacattgtacggaacatttttcccttactcttaggggctatatttttttcacccctatatatattcaatgaaatagcacaatctcgtgctaattctattttaaaaaaaatattagtgcacagaacgaaatggtccatcatgctgggttgttgtttctgtgtttcttttgaaccacaaggaggaattggaatggtaatttgagattttttttttatgaaaaatgaatcgatttaccatcttttcctgcattgccattttgccagatttctttggagatcaatacaattcacatttggattataccctccacatagtatatctcatatgtttgggaattggcttgtgggtgttaataaaaagaccaaggaacttatttttgttggagcttccgctatatgttaggctctctggcttagtagaaatgaaatggtttttgatagaccacctttaaaatcttatttgcgggttcttttcagggcaacatattggctccggaaatgggctcaattacaaaggcatgatgatcatatcaagctaataaaagatgtgtatcgtaaacttaagtcgatgatcatgcagatctttgtcaatttcaggtggaaattcaccaatataatttagtagttgtggggtctttagcttatttggtttttattagtttgcttctacttttggttttgttacttcagctacatacttaccgtgtgagtttgcttttgtgaacattacaataactagcatggtggcccgcgcagattacgcggctagcatcattatattttctctcatataatagcatatatatttttttattatattgttaaaatatattacaatgacaacataattttaaattttgcaataactttacgaaactacaaatgtgtaatattcatactgtattttatatacgtgttagttattaattatttttaatatcaaattttagttatttataaattatatatattcctatatggactctatacttgtcttttaataatttttttaattctgaatttttattatttctaattgtatttctatgtgcactctaaactcatctttcaatattctttaattttaaattttaaatttcagttacttctaaattgtattcctatattgactttaaactcttcttcccatgtttttcttaattttgaattttagttatttgtaaattgtatttttgtacggactctaaacactgcttttcattttactatgtttattctgaattttagttagttttaaattcctatatggactctatactctacttctaatattccttttttttaattctgaatttctatttttttcttaattgtatttctatatggactctgtactctacttctaatattccttatttttaattccgaatttctattatttcctaattgtatttctatatggactctatactctacttctaatattccttatttttaattccaaatttcagttattttctaattgtatttctatatggactctaatctcctcttctaatattccttatttttttaattccaaatttgaactatttctaaattgtatttttgtatggactctagtctcctcttctaatattccttattttttaattccgaatttcagttatttctaaattgtatttctatataaactcatatttcaatattctttaatttttaatttcaaattttagttacttctaaattgtattcctatattgactttaaactcttcttcccatgtttttcttaatttagaattttagttatttggaaattttatttttatacggactctaaactctacttttagttttattatgtttatttagaattttagttagttttaaatttttgtatggactctattctctacttctaacattccttattttttaattctgaatttctattttttttcttaattgtatttctatatggactctatactctacttctaatattctttatttttaattctgaattctgttattttctaattgtatttctatatgaactctatactctacttctaataattcttatttttaattccgaatttcaggtatttcctaattgtatttctatatggactctagtctcctattctaatattccttattttttaattctgaatttcaactatttctaaattgtatttatatatggactctaatttcctcttctaatattccttattttttaattctgaatttcaactatttctaaattgtatttctatatggactctatactctacttctaatattccttatttttaattccgaatttcagttatttcctaattgtatttctatatggactctagtcttctattctaatattccttatttttaatttcgaatttcaactttttctaaattgcatttctatatgaactctattctcctcttctaatatttcttattttttaattctgaatttcaactatttctaaattgtatttctatataaactctgttttttctttttctccgattaatatgagaatttctaggccatgagagcgaacgtggaaactcatttttctattactttaacaatataatagattgactatagctcttgagcggtcaggatgtttcatttcattatcataaaaaagcgggtaggaaagaatttcaaggattagttcatgacttgctatgactgtgagagacatagaagaccagaaatcacttacgtcactcctcgcttgttaattacagtcttacttgcatatatgatctctggtttgtgtttaaaggctccaggtcggttcattcttaaatagcaagagagttcctctcatggaacgtcccacatgatgtagccacctgacatgtcggcccgtgagtggttgaccccatatgtcagtgaccgtcctaaatagcatggcgacaaccgggcctatcaaacgctgattttagtggccctaacttagattagggtctattggacctatgcagcgtactcactgtacagtatgactcaggactcggtcggcgtcggtcggtcctaaccaactggccaccggccgtatagacgccatggcatgtggccgccgagtcgccgtggtgccacttgccactagtaccatgaacagcagcagcttatcaggctctcatgggatagcctaatcagctaaagaataagctaaattttaaattttcaaacttaattttaagatatttttaacgtagtttttttttcaacattgacttttaagtcaccaaaaacacatatataaaagttttacctataaatttatttttattccttaataaaccgttttggtttattagggaaaaagccaaacaatggggacctcacctagtagccctgatttcggaaggctcgtgtcaaatccttgctaccctctcacgtgacacggcctcgctctcctctcaccggagacgcgtaactgcgtcagagactcagaaataacacaccagccgtgcccgtgccgtgtgtttccacccatagatcatgtgctccctccctatcttgaggtcgacgcgtcccgtacgttgtagatcgatgcacacgctgatacgcattgccatttcggttttacctcttcgggtgtacgttcatcgatcgatcgctgcaaatccttggagaggattgatgcggcaaaagctttcgtccggtgttaattcagccggtgaaagaaaaggtaatggccgctgtgtcggatgacagagatggccgcgtgcaattgttcagggtgaacttgacggggaggatcattaggccctgcccgctcggtcacggctaagccctgtcaacttatgtttagggctggtcttgggcttaggagtggatgtgttgagctcggttccaggttctaacctaatcacctatgctcttttgcatgctctaatctttcaaaagtgggtggcaaaaagcctatggaagtactaatactaaatgttcaaaaaaaagtactaatactatgttagtggggtatggggagaattaattgtgctttgcaatttatcactctaccaaaaaggatcatatagaataagatttcgaaatggcatgtctagaggtttctcgaagctcttttccaagctcgatacaatcaagcactgaaaagaacctagccatggataacgttgacttgctgcctaccactatgcgtctacggcggattgttgtttttgttttcgttttgtcgatgttctcgtctctcttatttttctttttcctttttttggcaaaagccggatttattgatttacctgagagcccttctccattttcttatgtttactttaacctgttaataaaaccataccatacgctaggtgagccattagcgcatgattaattgtgtattaactattttaaattttaaaaatagattaatatgattttttaaagtaactttcctatagaaaatttttgcaaaaaaaaacgtaccgtttaatagtttaaaaaacgtgcacgcgtaaaacgagtcacaatctcccctatctcccctaaagaacgcagccaagttggtttgaattatacctctcattatatgcttattacctgtaagtctaactaaaatttaaattttaaaactttattttctttctagtattggtttttaagatagctaataatatatatagaaatgctttatctataagttatttttagttgcttcgttaattgtagctgaaacaatcatgctctgaactaacagtaacaatgtacggtgacgatcatgggtggtcggcgtcagccacgccgtgactctcttgggctttattagctctccctgcagtctcggtgtgttatatatacatggctccatcccggtacatgtaggggcatgtgaaggacagtagcatctggccaccccgctcttcttgagctagcgactccgtgcttgagtagcaaaggagcgagtgagcatttggttctctgccatggcgaccacaacggcagaaagggatggagttgaggaggagcagaagaagaggaagcagggaggcttcaggaccatgccattcatactgggtgagtatttattgtaggattcacttatatgagaaatttttggtgaaatgatctttcggttcacttttagatagatgctgctcttgctcagtagcatctgctagctgctctgcttgtagattgagccggcaaattaagcaaacaagatagcatagtgcgcagtttctgggagagtgagttgcaatctgaatatctgatatagatgcccaagctgggcggtaatcccgtccaaaactactgcacatctttgcccgtggtttgcattttatttttttttatgcacgaaaacgtacggttcgcagttctcggaaatctggatctgatgccttgccgatgccagtaactttggtaggtttgtttgtttctagttcttttattcatcttttctttctgacggcaagagagagtgatgttaattaactgttaactgcacccatcagtaacaaaataacgccttcctatgttgttttgggaattaaaaagacataacttttgctactttattactccctccttcctataatacaagggattttaagtttttgcttgcactgtttaaccactcgtttcattcaaaaagatttgtgcaaatataaaaaacaaaaatttgtgcttaaagtattttggataataaagtaagtaaaaataaataaataataattttaaaattttttgaataagacgagtggttaaacaatataaacaaaaacttaaaatctcttataatatggaacggagggagtattggattacataaataaaacgtatacatgtgtgataatgtgatgaaagcacttatcatgacaaacttggcttacgccaatttttgtatgtccagaatgaacctatgcttcaatgcttgtatcacattctcttctatccaaagggagtatatcgttcacttcccgatttctattcagtctagtcacaccgtgtaacaagaagtcatacctccgtattttaatatatgacgcccgccgttgactttttgtctaacgtttgaccattcgtcttatttaaaaaaataatataattaccatttattctattgtgacttgattcatcaacaaatgttatttaaatatgacataaatatttttcatatttacacaaaaaatttaaataaaacaaatggtcaaacgttgttcaaaaagtcaatggcgtcatacattagaataaggagggagtaactgataataaatttgatcgataatattaaccataattaacgatgtaattaacggtcgagttgcagctgatgtgtataatcatcggtgtatatccatggttgtcgccgagaaaatctcatgagttgtctccgttgcagcgaacgagatctgcgaccggttcgccacggcggggttcggcgcgaacctgatcacgtacctgacgcagcagctgcacctgccgctggtggaggcgtccaacacgctgaccaacttcaacggcacgtccagcctcaccccgatcctgggcgcgctcgccgccgacgccttcgccggccgcttctggaccatcatcgccggatccgtcttctaccagctcggcatgctcgccctcgtcgcgtccgcgctgctcccttcgctccgccccgcgccgtgcgcgccgacgcacggcgccgcgtcgtgccgccgcgccaccgggtggcagctcgccgggctctacctcgccctgctctgcacgtccctcggctccggcggcatccgcccctgcgtggtggcgttcggcgccgaccagttcgacggccagcagcagaagcagcggcagaagggtggcggtggcgcggcggcggcggcggcggggaggaagcggagctacttcgacctctacttcttcacgatggggctcgcggtgctgctcgccctgacggtggtggtgtacatccaggagaacgtggggtgggggtgggggttcgggatcccggccatcgccatgttcgtctccatcgtggtgttcgtggcagggtacccgctctacgtcaggctgaagcctgggggcagcccgttcacgcggctggcgcaggtggtcgccgccgcgttccggaagcgccgcgccgccgtgccggaggaccccggcatgctgtaccaggacaaggagctcgacgcgctcatctccaccaatggcaggctgctccacacaaaccagctcacgtaagctttttttttattattttctttcctactgcacgtccatttcccgtgtcattgtcttcacttgggcagtaaaacaatttagcatagcgtgcacgtgacggccttggtgtctgtggtagctactttttggcggtagatacattgtcagggcagaaaggagaaagccaagcgagagtgcgctttcctttgaaagtgcttcctctttcttacctagtcacacaagcactgcccctaaagtttagatttggtgtcacatctctatctctagctattgtatcttgtgaccgggagaaaactagattaggttgaatacttattttttcgacgttagagtaggttgaatactaaattaaacacacccactattttagtttcctcccttccgatacatagcatttcctttctgaacagttcgttgccttgcgagttttaattggaataaaagaatatttgcatatacaataaacgggtttgctaaaaataagacgccatatttttcacttaatttcagtcacttttccataagtgatttttctcgctcctgtatgtaagtatgcttccatctctcatatttcctcttctaagtagataataaattacttttaatccctattctcctatatattgtgtattagaaaattacaatgtaataaggaaacatacaatgtacaatgtaattacagtgtaagttttaaaatttacagtgtgattacaatttaaatgcgagtaatttgcaatgtaaaaatgatttgattatttttatggaaaatatagctacatccgattttgcagtgtttttgtctatccgatgttcattttttgaatggaaattaaagataaggtcgaaatgtttacgttttttttggtttttttggagtgaaatgaattagcttagtagtttttgtttctattttgaaatggaaatataaatagaaataatatgctctatttgtaaatggaaatgaacataattaaacaagcatgccctttgtcaggtcgtcattattaacaattatttcaatataaacagtgattattttttaccaagatatattataaaaacatccattgcacgtgcacaattattagtgttttttttacttcataagataagtgtaaatttaaaaggtaatatttaaagcactttaaagcaatcttagtatttgttttgatgtctaagtttaaaagtttcggctgtaattttcaataatcaaagtatgtttctcaacgttgttttcaaccatgtgtatttttgaaatatcgttttcacccatgtgtaaagagaattttttgagccacatcaaaaggactgagcccgatatgttcagatttctttttgacatttctagttgttttttactttaaacccgtatcattatgagaaggggcaatatatatgtatcaacataaaagatagatatatatgtattgaaggataagtattgataaaattcttgaaaaaacatatcgcaagaaaatatttgatttgtattctaggtcaacatagatttacgtccacattttctcaagaattaaaatgatttatctccacattcatgacataagcagctggtttaaatataacaatgttgtaaaacacatattttctccgaggagtgtacactcctacataaaaggggtaaaaaaaactcaacagtaggtgtttcatgaatcacgaggaactatatatgattaattgatcattaataattttcaaagataattcaaatccgcttataatgccgtactggaatgctagtttctttttcctcaatacgggtctaagatacaagcccgaaggggaatatactatgaaacgtactgtagaataaatgcttgcgtgcgtcataacgaaataaatttgccaccattttaagcagtctattgtgatctaacaagacaattgatttttcgacttaattaactgaacgactattatagacggttccatcaaaaatacttgtgagccgtttgtgattaaccccttctgctgtagtaaccgtcccgtgccgtgctaattcgttcaggttctttgaccgagctgcgatcgtgacgccgggtgacatcgccggctccggcgagccggacctgtggcggctgtcgacggtgcaccgcgtggaggagctcaagtccatcgtccggctgctgcccatctggtcggccggcatcctgctcgccaccgccgcgtcgcacaacggcaccttcaccatccagcaggcgcgcaccatggaccgccacctcacccctcgcttggagatcccgccggcgaccatgtccatcttcacgacggtggcgatgctcgccggcctcgccctctacgaccgcgccttcgtgcccctggcgcgccgcgtcacgggcctcccctccgggatcacctacttccagcgcatggccatcgggctgggcatctccatcctcggcgtcgcgtcggcagcgctcgtcgaggtgaggcgccgcggcgccgccgcggaccacggcctcctcgacagccccgccgccgtcgtgcccatcagcgtgttctggctggtgccgcagtacgccgtccacggcgtggcggaggcgttctcgtcggtggcgcacatggagttcctgtacgaccaggcgccggagagcatgcgcagcagcgccgccgcgctcttctggctctccagctccctcggcaactacatgggcacggtgctcgtcacggcggtgcagcgcgccacgcgcggcggcggcgagtggctccaggacaacatcaaccggggcaggctggactgctactactggctcgtcaccaccctcatggtgctcaaccttggatactacctcgtctgcttccacttctacaccatgaagccattagaggtggcagaggaagacgatgacgagaaggagtgtgagctctcctccgtccacaaaaatggcggccccggcgggttggtgtgacgaggtagattaggataattttatcagggtggataatgttgttaattacggagtacgaagtaattagctgtgcatgtgcatgccaaatataatggttgcaaaatacagcctttagggcatgtacaaaaatagagtcagatatgagtctctatattatttagagactagcatcttacaacagttagagacaatatggtttctaatcattaatgtatccaaatactttttcttactcttctttcctttttttcactatcatgcaacaaaatttgctctaataaatgctaagagtcgactctgagccattgtcatgcattacaaccatacttctttctctttcttccatatcatcaaatttacttgcatggcaacagagagagaccactaatgaagaccgttgtacatgagataaaattagtatatttagatactgaggtaggatccaaatttggcaatcatgaattcatgatcatgatcatgcagcaaaaggtaaccttgataaataaacatgatatatatcgtagccatgtggagagataatcgcagaccactttatttgttggagtacactagtcactgatccccacaaccggctcaatcaaagagccacatgcccacatggacacatggtacaatgtttacacgtaattcgtgcgtaagattgaattattaggcatctccagactagaaaatatcaactagttttcatacttgctatgttatatagatactatgtataaaaactatatatacaatggattgaatcttcaaattaaattctcatccaatcatctctcatctctctccatctctttttatctatatatccccttattttcatttttgttgagttgtttcttgtgtaaagaaggtgtcttcatctttttacctctctcctcattaactctcttaccacatcagatttttcttatgtgacagtgtatttaatgctacactacatgatatgaagggttagggatggccttagagagagggagatatttagtgcgcattatgatatatgtaaaaataacgatacaatcataataaattgctagctttatgcaccatccagatagacgtggccatgttgttggtttagtaagctactagtggaaaaactctgagtacagtcatgattcataaatttttgaaaggtaaaatgaaatctaaaaaaagaccaacaaaataaaccatcttatcatctcaaacataatactccctccggttcaaattacatatcattctacgtttgttctaagtcaaacatatctatctttaaccattactttttaaaaatccatgtataatttaacatgtaaataatatattatgaaattaatattttggtgaaacttaaaaatataaatcctatgatgctaaattatataaagtttataaaaattatggttaaagataaaatgtttgatttagaacaaataagtaatttgtaacataggaatacagttatatttttggagggacagagtactctcaattgacaaacctataactaggtaaggcaattttgcccataggtctacccggcccgatgggtatgagaatgggtgcaatattttacccgtggacacgcctgctcgagacctgacgatgtggtgggtagcagctgggtctcatttattacccacggataacccatgcctgatccggtgtatgtattattgattttggcccatgcttgcattctcataccacttcctcttggcccattaaccccacacacacacacacacacacacacacacacacacacacacacacacacacacacacacacacacacacacacacatatatatatatatatatatatatatatcccaacatcaaaccctaacctaatttccatcccacctcacatggcggaggtggcgactcaaggcacgtgcgggtaagcgacgacgacattggctcaaggcagcgcgtgggcaagcagcgacagcggcggcacgagcaagtggcggtggcaggcaatggttccagtggagtcggcggcgggtggcgctacagagtaagcggtgcaacgacgggtgccctccgggtatgcacgtgcccattgggcacgtgtatgggcacaaagttttgtccactaaaattattgggtatgattcaagtgagtattgtttttctctgcccatgcctgacccgacccgttgccacaatcttctctcagcaaaaccaaaatccattcaacaccaaaacatgaacttcatctgacgccagtgggatatggtggacgccaactatttgcctttcatcagccttggtggtcccctcttcatccatagccaatggcggcgctgctgtagtggacggagctctccatcctcaattccccttgatgtccaagggcgttgttcctcggcagcttttcttctcttccattgacgttcgattgctactcctggtccagacgccaaggcgcgtattgttcatcgcacttactctctggttggaggggatgacattgaggccaataattatattgtcataacaaaacaaatttacaaacttactggtcagactcatcatttggctctcattcaagctgctcgccgttcgtcgttcaagctactcaccgcgcacctgccagagacctctcctcggacgctcaccgtccaggtcttctcctctgatgagggcgggtgggaccctcctctcgcctgcgccattctccaggaatgcgagctccacagctacttacgccaagcccgtcgtcctgcgcggcgccgtccactggctctgcctcacatactcgcgtcaccgaatcctcgtcctcaagtgggaacatcctccacgcggacgctgcgacgtcgcttcgccgccgctgaaggcgtcgctgatgagactcccgacgccgtgccacacgacatgtgcctcgtgctatcgcaggcaacaaacgacgtcggcaggacgagccatcgcgctgcagcgtccctgagtgtggtcgccctcccaggcaaccgcatcgccgtctaggtgcgcatcaccgccgtccggcgagggaggttagtcgacatctgggagcgacgccatgtgatctgtgaggactagctaggagagcattgcacggccataggcagccgcatcaccagttttttaattattttctgttgtaactatcacgtagatgccacatcaatggcatcgtgtgacaaagattagtcaaaggaggtacgttggcatcatattagccaaaatcagggacattactattgaaggaacttgtttgcacttgttttgtaagttgagggacctattttatctggtatttcggttcaagaacgaaaatcgaacccactataaatttaagttaagatacctaaaatgaactttattcctttcagaacgaaagaaaaagctcactcatgtaacaacaccaattctgaatccagaccgtgtcaatgaatcgttcccatagcacgcgagacatctacattactgaaaaggaaagctaatcccatgatcccaccaaaatgagccaagtaatcaacaaaacaaaataatgaccattcgattcacgtggagacaaaatagcttgaaaaaatctaagcagttggataaaggaagtagcgatcttcttcttttttttcactactataaaacatcaaataggtgttgccactgtaggtgctggtagtactaaaaccggcatctacaggcctttttccacctccacgggttgaaatcgtaaaaaactagcacctttaagtaagtaattataggtgtcagttctaaacaaaaaccaacacctattatattttgtgtcttttttaaaaaaaacccggcatctataatatattataggtgtcggttaattaaaaactgacaccccaaaaatcgagccaaatagagccgagccaagccaagctggagccaagccggcgggccccaccacgacgaggcgataaggtctcgctctctcgctctcttcttcccgcctcttctcctcttctttgtctcgctctcttctctcgtctctctccctcccgttgccggctactagccggcggaggcggcagcggcgaccgcgccctcccctccaccagattcagcgggaggggaggcggctgcgacaggaggggaggcattagcggcaggcatagtcggcggtaggaggggccgacggggtcggtagcgggcggggtgtctagatctagcgtcggcggcggacggggtggctggatcctgcttcgacagcgagcggagttgctcgaggaggggaagcggcgggctcgatgaggggaggtgacaaagggcttgctggcggggaggagccctcccatccgccagatctggtaggaggggaggcagcggcaggggcggcaggctcgcggaggagacacagcggcgggcgacatcgtgacggctcgaagacaaccgaccgtgcgatgacgacttcattcggcggccagatcttcttcaacaaggcaagccaccaagccaagcaaatccctctctctaccattcccctctcgcttctccggtggtggtgtgatttttttcattgaataaatttgtgttgtgggatgaatccatctttgaatgttgtgggatgaatgttgtagactgctcggctcgatgtgtcggctcgatcgagccggctttttttttattcgtcgaacctaaaaggtgtcggttctaaggaaccgacacctttttaattttcaaatcagtaccacctcccttgtgccggttggaaaaaccggcaccgaaagaggtttcccaaccagcactaaaacctttttctgtggtagtgtttttagaaaaaacatggagagtctagaaggctcatgagcctactaagaaaaaggtattaaggttgtggatactaatatcacttcagctatgtacctgtcaatggtgttctcatgattaattattattacaaaattaagcttagtgttatttaaacaacctataaatgtatctaaagtattgaaagcaaaatggtttcaaagcacctcattggtccatagtggcaaaaaaatatggatcatcagattgataaaaagacaaaacaagaaaagcaaatgtgggccatcagatcaaggaagtagaaaaccaggtcaactgataatgatgagcaatctaggtacttcatgcttgattattttttcgggtgcaatgctgaaagatggtgaatgctaaggaagaaaagatgaagtagaattaggggtgtttagatgggactaaaactttttaaactttttagtccctgttatattggatgtttagacgttaatttggagtattaaacatagactaataataaaactaattcataaatgagagctaattcacgaaacgaattttttaagcctaattaatccataattattaatggattaattagacttaaaaaattcatctcgcgaattagctctcatttatgaattaattttattattagtctatatttaatactctaaatatgtgtctaaatatccgatgtgacagtgactagtccctgtttcccaacaccatgcttgtctgagttaccagttaaacataatatcaataatatcaatggtgattttaatcattgctttttatatataaagcaaataggctcatatattactgattctaatggtcgggttaaagttgtgcgaatccacaactccactggctagaacaactggaaatttctttcctgatttaataagcatgtactccctctgtagcctaatataaggattatttattttaaaaattaagaaattagcaaaagtacaaataatggtacaaaatatgataggatatagaataaattagtacaaaactgggcagtcgaaggaataaactgtacaaaagcggatatatgtgagagaataaataattattttgggatcataaaatttcttatattttgatacaaatttgaagaccaaaataccaaataccttacattatatggcggatagagtaattaaagatttaaatgcacatgcaaatatgcaatgccaccctttatcattggacactccacacactcgacctatcaacttcaagtcttcaactagtccactgttcgggaatgatccaattatttatttgtaactactcaaacgcgtacctaaacactgatgcgtacatgatatcggcttgacatggacagcaagccacacacaaggtcaagctcaggccaacgtatggcggacagtcatgacacgagacgagaaacaatcacaacctggaaggtgctacacgtacggtggagaagatgcgcttctctgatctccacgtctagtggcggtcgacgaagctcttgatggcgtcgacgagctcccgggtcctctcgccggtggccgggtccatgtcgacggcgtacttgttgaggtagaaggagtggctcatgccgcggttgaccagcacctccacgtccttgccggcggtgcgcagcgcgtcgcagtactcgaggttggtgtcccggatgaggtcgtgctcggcgacggcgaccagcagcggcggcagcgggacggactccagcggcggcgcgttcggccccatcgggcacgtgtacgggtggtccttggtggcgccctcggggagcgccatggcgaggaacttgtcgagcatgtcgagggtgaagaacaccgagtcgggcctcggctccagctccgacttgctccgggtggcgtgcacgaaccccgggtggagcgggatgcctccggcgacgcggaggggcgcccagctgtccgccccgtcctcgccgacgcgcgcgccgacgtggtggacgaggttgccgcccgagctgtccccgatgaggaacacccgcgagaagtcggcggccgtccggaggagctccgccgccgggtcgccgagagcggcggcgtcggacagcgcgatggagcggagccggcggagcccgtcgacgccggtgtcgatgtgcgccggcaggcggcgctcgggcgccaagggcagctcgacggcgaccaccacggccgggagcgcgcacgcgaggcgcgcgtagaagtggtggtacatgagccaggacgggtgggagatgcagaagccgccaccgtggagctgcacgacgacggggaggcgccgctcggcgagggcgacctcggggaggtacacgcggaggttgggctcgccggggaggtcgtgcagcgtgtggccgtcgcgcggctcggcgtaggcgggcaccggctgcatcagcgggagcacctcggggggacccgtccacgtgcggtcgacggtgccgtcgtcgaacacgcgcagccagccggacacctcgtccaccaccttgcgcccgaccgccgccgccgcgacggcgtcggtggcggcggcttgcacctgcgcctgctgcgactcggtggcgatggccattgctgccgtacgtacgtcaggctagtggcgttgcttccgccgtgtgtgcgatgcgattcgatgtgcgcggtgcgagagatggatgaagtggcgagggttttattgccggtgaccgagtggctccgtgttgcagttgccgattgtactactgggaagtttcgcacggaatatcacggcgattgccaagcaaaattttcccggattcgcaagcagagttgctgcagagtggtggagacttgacaggttaggagtagggtcgtgtgtggacttgtagagcgactagaccaaccgaatagcgagtgttctttttttattgcgaaaattatattgactttggtggttatagacgagattgcaagaaatgatcaggtcgtcctcaagtttcatactactacatgtggcctgtggccatgtggatacagcaagaagccaagaagtatatcactaatccgttcgtgaatctgaatcttaatccgtatgaactagggcgttcatgaccaaggacttcagtgttttgcaggttaggtcgatcggagaataacaacagggaacatttactatgctgagttataatcgaactccaaacaacaattttctcgttttctgtttaaacttaccgaactaaaaaaaaatgatgtctcttattaaaaaatgtctatatatatatatataataaatctattttttataataattattccctcgtcccgaaataaatgtaaccctcttgttacttattttattttagaatgaaagaggtaatacttaattaattatatgctaatgagttttcctgtatcatgtacctccaaatctcctccccaacctgttgtttgaaaagctatttttttttcagttcgtgcgaaagacaaagtaatttctgtagaattcgtacggtaagttccaaacaggacgcaagtacttacatctggagtacgaatttttctctccataaaaaataaaaaccaatcctaattacaaacctaggtttatctttttttaaggacgaaatagtaaagaatgaataaaaaatttgaaggtagagaatgaacaacatccttatatccgttggatctaatatggatgggtcggaccagatcgtttgttaccgttctaatgctacagtaccgttccacatttttgaaaccgggcacagtgatgatatggacgtggaccagacctttctactactgttctaatcacattttttgaaccggacacagtattgccacactgatctgcattttcaccgctgtgcgccacagttgctccacgactttgcttcttcttcttcatcaggtcagaagttcagtcaggcaagtctttctgtgcgcgtgcgtgactcgtgcggccctttttgtgcaaaccgtggggacggatcgcgcgataaggtgaattattcgaatcgtctttagcactccaaattcgatcaggcagcaggtgcagggtcgtatggatttggagctttggacggaccagaggagggacaggattagtggggctacagtaaagcatcagagtaatcgccatcagcctatctagtagtactactgtatgttgggtctcttgaataagtcggtcagtcgttgtggtcaccattcaccaatgtacaaattaagcaggagattaaaatactactgtaccattcattaatgtagaatgaaaacgagaagtgggtattactgattcgatgactaaaacgagaagaaaaggatgtaatagtaaagagatttagggtgtgtttgagtagaacgggattgaggagattgagaagatacgtaaaacgaggtgagctattagctcatgattaattaagtattaactattttaaatttcaaaaatagattaatatgattttttaaagcaacttttctatagaaattttttgcaaaaaacacatcgtttagtagtttgaaaagcgtgcgcgcgaaaaacgagactcaatctcccctatcaccttgaaacgaacagagccttagtgaacttcactttaaaaatatagttttttggataaatttttggactagaactttagtctttagggtgaaggacagaggggaataatgtttatgcatgataacttgggttgggcttgggcacacggattacacctctcgtcaactggactaagttatacccctgactactttaatggaagcaaagtggaaaattggcaggttagtagtcagaaagacacattcagcgcttctgctaaagctagtaaagtctcttgaagcgaagacaagcattcctaatattttaggaagtattcccaatattttaggtgtagtactatatggagggcgtgaagacgtcaacgattatccacgggccttactttactgttttttttttgagaacattactttacagctatgatgctatatctgtttatatatacgagaatatatatattttttactatatgcacctacactcttcttcttctttttcgttcacaaaagatattgcttatagcggtggtggaaaatttaacactcagtctttaccatttatttcttttaaagctatttattttttctaaagtggtatagatatcataccctaatacaaacataaaacacagttcctactacccgactcgtgtgtcacattgttgtatgagttaactttgttttgaacgacttacaccgaatagagtaggaaaaaaattacaagattgcaactctggaaggtcgtaactaggaaaaagaaaaatatatcatcacccacacaccgacaacgccaatacacaggtccgggagaaggctagcaccggaccagtcgccgttaagcgtgaccgaccgccactaggccaataaaggaatatagacaagatcgtccaaaaaaacgcctttacaaccaacacaaagcccaactctatctagagcgcgcttgcaccaatcgttcaagaggtttcggcaaggggatgcctagacgacatcttaagggagagaagcgacgggaaaaccgccaccgccgtccgttagggtctcaaaagagccaaggttgggctttcacccggcaaccccccttaaggagtgagacgacacgacaatgccctcaggagggggaatgaaccatcgttgttggcccggccaaggccgagctgggttttcacccgctgctcaccacctgcgagtccacgctgatgcaccgatgctccaccactgttcaaactctgccgacatgtggggccactgcaccggtgccccctgccggccagccttcacgcgccaaagactgcgccacacccgccagcagctccttgcaccgtggtcgcctccttcaccaccggccgcgcctcatcgcgttgcgccggtctcctccaccggatgcacctctcgcgtcaatctggcctccagcccacggccgcgcctttcgtgccaagccggcctccgtcgcccccagcagcgcctctcacgccgtgccgacctcctccaccggacgcgcctctcgcgccaatccggcctcccgccatcgactgcgtcaagccgacctccgaccttcctacaatcgctgtcgcgccggccagatgcggccgtcttccttgccgccggctagccgtccgagaccgccatgcctcctccaaccgcagccatggtcacgcctccacttgccgccgctagcgatcgtctcaccaccgctgccggccgcacctccatccattgatgtcaccggccacccgctgactccaccagccatctaccgacctgcagccaccggccgccgctcggcagtgagctccacgccgctgtcccacgcgctccgtactgccgccgcgacggtcgctcgatctggccgtcggatccacctccgactctgccggatccgccacgctgacgccaaaccgtcgccgttgccaaccctgccgtcgtcgccatccccgccgccaccgccatctccaccgccgtcgtcgccattctggccgtcgtcgcccacaccccccttgcccctaccgttgccgtctccagccctgcgctgtcgctgtccccaccgccagccgccaccccgctagatccggccacagtggcgcggacttggcggtcaccgtcgccgccgcactagaggctccccttgctgctcgcgcaaggagaggcgtgaagccccgctgccgccgtccttgcggccacgcggctttgccggcggccactcgggcagcggcgaggcggaggaggaaggtgggggaggggaggagggggtgaccgggttggtctcgcgagtcgcccctgggggagagcgacacgggggagaagatgctgtactttatgagttaaactttataacactaatggatggagtatattataaagctaacaaatactgcatccatccaaaaatatttgacaccagtgcagctttgtcagtttaatacacaaactgcccaaaagctgaattagcgcaactctacgattccaaactcgtcaaaagatggaagttgtgaagaagtataaaggaaattgcatagatgcggaatacttgcaccatcttttcttaacggcctgtttggtaacctgagggaaagggattgggagtttacatgagggaattgatgatgagattaagatgggaatttgatttttaatcccaatatcttgtttggtagaggcgatgaaaattgatagggagtttagttggagattggatcattaaaaaaaacggatggatgagatttgcttagacaaagtaaaaaaggaattccctcccaattacctgcccctacccaggtattgaaaaggagagagttccttcctcaattccccatctccatcctaccaaaatttccatgtttcccaaccaaacaaaacacttaatagccttatccctctaactaaacaggccgtaagggaaaaggtggggaaaggagcaaaatgattggcgcctgtggtcactgcacacaaaatatggacaccgcaaaagaaaaaaatgtggcgacgtcgtttatgtgataaaaaaacataatttatgattttcaattaaaaggcaagagggaaaattgtccatgattttcaaactaataaagggaataaaaaaactaataagaggaaaaaacctgcactacagtacataatttactcagtgtcacaaaatgtcattttcctataacttgttcgtggcagtagtgcatggacgtctgtttgtggcagtgcactccctcaatcgattcatcccaaattcccaatctcggactctacagaaggtgaaaggtgcttaccacctgacaggcaaacagcatatatagtattaacacctacaagtgcagtagtctgctacacgagtacagagtagtagtttaaagtttaaaaccaagattttgcagcaaatattctgttgtaagtagtctacctaattatgaatatagacatgaaagggatcttctatctgccatgttcctttcctttccgtttgaaaactgtcttgaccaggccacacactttgtggctgggaaaaatatttcagaactccattggaaatttcgcggaatatgtaggagaattggatgggaacccaaggtaagctgtgttagtattttcttcaataatgctatgtacaggaaattagaaaagcagacagactacttgtcttaagtcgggtacttacatggttggcagcatatcctatggaaaccaaccatactgtgcaaactttggaaactcccatcaagatctctggatgggcatccgatggataggggtggaggtgggacaattttgtaaataaccgcccgcaattagccttgctaatctccttttttgcaaatcaacccccgcagtaaccctgttcggcgccctaggacgcgtcatccgcgtcgcttcctttcgactccgcctcccgtgattcaagacgacgacgacaccgcccagtgaatcgccggacgccgcgaacgcgatggagcccggcaatgccatggactctgcgatcgagtatgctcgcgtgtccagcgacgccatggattccggcgcgcgcgtcgacgccgcctaccagtgcgttttccaggaatacgacagggacgcgctcaaggccaacatcacggcatggggcccctggtgctgcccacctgggatgagctgctgttcgtgctcctccttcctcctcttgcttgtctgctgaagctcatcacggccatgaagctgaagctctgctgttgtttgttttctgctgttaaatgtactcttaagatgaattgagcaatgtactcttgtgcggcgcccgccatggaatgcttcttgtaaacacttttttttactagtgacatcattcagcttattgctcctaattttcagatcaattgtgctgcatgtacttgccaggtcaattttgagttaatcacattccattttgagttatttgaatatctgcacaatcgtctctgtccagctcggcgcccgcggcatctccactcggccaatggccaccttctcttcaccaccgttcacagtcccggccttgctacactccatcgccaccgctcacgcgacggtgccaggggccgttgccggagaaggactgcgccgccaactcacgggcgggcgggcgcgggcgactcgcgaaggaacgacgacgcagcgagaaacgaaggggcggcgggcgtcggcggcatcatgtgaggcccgcgaccccggcggcgtctggcgattcattgggcggcgacggcgtcgtcttgaatcgcgggaggcggagtcgaaacgaagcgacgcggacaacgcgtccagggcaccgggaaaaatttgataatttgacatttttttcgttgcctaattgctttaattgacacttgtgaagatgacatgtgggaccatccgagtgaataaaagtgggccaggatgtcaaataatcgaaacccatttaaaggagtgttaaattatcaaatctctcggggttgatctgcaaaaaatgaggttaagcataccacttcggaaaagtagaaaggcacggtgttaaaccacaggcctttaatggaactcgatcactccatctctttggacatgcatgtgttaaggacatagcaaggctaattgcgggcagttatttgcaaaattgtcccacttccacccctacccatcggatgccgagctctgctatacatacgataaacatcgtacgattagtgtacgatgccttctaacctctaatgcatgcagcaaatatagggtccacaatgtttccatggcccaatcatttattatgcatgactggatcgtaacaagtttatcgtatatacagcaatttccatcggatgcccatccagagatcttgattggagttttcaaagtttgcacaggatgtctggtttccataggatacgctgcctacatagttatagggtaaggaagacgacgtcatgacgctaactgtgagatatggtcaacgtgcaaacatgctagcctcgtctttccgcttatacttatgtttatcagccaaaatttaaattttcaaccttaaatttgaagttgatttttgaggtttttttcaatcgaagtttatttttcagccttagatatggtcaacgtgcaaacatgctagcctcgtctttccgcttatacttatgtttatcagccaaaatttaaattttcaaccttaaatttgaagttgatttttgaggtttttttcaatcgaagtttatttttcagcctttaattttagatcgttaagaacacgtatataaaatttttatttacagattaattttcgtttgtaaatatatcgtttggctttttcagttttgtgttttacctgtggtgaaaagaatagtataaacatcatgcacatattctgttagtctggttagccttgtgttctgtttgttctgcctttctggtttttaagagaagttgctcagtaaaatcatgactaacagactagtgctgcaatcaacatatataccatcaagtagaacaaagatgcgggaaggcacttgatttacactgatggatagagcactggcatgaatagatgaatgaaatgtttgcaagtcgagttcaattacgtacctgttggatgttggctaatcatgtagagatctaaccatttgcacaagagtactcttcattcttcacagatcaaggactgtaaaattgagcaactaaaggttgtcgtctcatagaattgtagtatttaagaatcacataactctttgaacagcagcacagttttaacctaccacagtgtccagtagtgaccaaatccataactaacagtcaatagaatccataactaatatttcctatctccagttcccttccatcagaccacgggcagaaaactgaattaatggataaactctaccattttctacattcccaatgagtatactcacttaagggcaatgatgatgagtacatgagatagctcaacttaaattggagaccatcttgttcagaagtttcagtctttcacccacactggtaacttgacaaacaagagccacacatagtggactgtttctctccatactcctaactccttagtgacatgcaggagtactgcatgtttctaatatgtgatcatcattttccttttttcatcaacctattgtccttatcagcttgagaagtggcttatttcatgtcagcactaacacagtagctcaaacgtactttcatgtataaagggcttccattaagtcatgatgttgatattttgagttgcaaacatgtcccatttgctcttcctttcattaagcacctatatttaccttcaaattatatattgcactgagtgtatatcaccagacacacttaactgctaagcaatacaaaatctgcatccattatatgaaattgatcatccagatcttggttcagagacattaacatcaaattcaactgaactatatccaggaagcttgtcaacttttacttccttcatgaagcctcttattctctctgcatcactatacctcccagcatctgaatatatgtttgccaagctcatgaagtaaccactctttgaaggtgacatgcccatcaacttctttgaaattcgttcagcagcttccatttccccatgcactcggcaggctgctaatacacctccaagcatggcctcatcaggctcgaaaggcatttcctctatgagcttaactgcagcaacaacacggccatcccttcctagcgcatcagccatgcaagagtagtgtttgagctcaggtttcacgccatgccgtttcatcccctcgaatattgcat

SEQ ID NO: 27027 - DNA, 10199 bp, Oryza sativa
  unsure (1)..(10199): unsure at all n locations
gtattggtctgggacccgtctcgttggcatatggtgaacctgtgtcggctttcgaaatgccttgtcatgaaagccttaaggtctctagacgtggccgttttgcacgggctggatgatccgggttagtaatgtcgtgtgggtaaagtgtaccccctctgcagaggttaacaaactgttcgaacagccgtgcccacggtcatgggcggatgtgaggtgattcctagcgtagttttgtttgactactgctttgtgaaattgctgctgtggaatgggttcgatgtttggaaaatcggcggctgatgggatcagccaggcccgggtggccgtttgaaagctgttggccgggtgccaaccttgatcaattcaaagactgatatattgcacatactccgaccggacgagacgcactgcttatccgtgtcgtttgagaagcactcacttagtcgtttcaaaaaggagtttaaataaaatcaattgcaaaaacaacagccttttctttgaagcctgcattaaacacttaattcccatggcttgctgagtactcctgtactcacccttgctctatataaataatcccccccagttgctgaagaagatgatgtggcccccgctgacgaagagttcttccaggagcaagtcggctacgatgagttttagggtttcggcctagttcccaagtcgcgcctgtgatgtttggtccaagtcttggcttccgctttcccttttgtaatgcagttgtgagctcaggatctgtccgcagcccaacatgactgtactcctactctataataaagagacctctgtcgctgtgatatactgtcttcctgtgttaccagcactgtttcctgggactggtatcgattaacaggttaatttggagcgtcacgggctagttccgctcggggctagttcggggcgtgacacgttgtccctgccctcgccttgccggatccgcaaacaccgtgaaccttgacgacaccagtttgactttgaccgaacatcttataacctaaaacggaggaagtatcttgttggaaacacactgttgattctgagctgttagcgaggtcgctgagccctaatttcttccataagtatgttcctggttgacatctggccagactgtgatctgctgtttcaaaggcagggcattgcggagggcataggtcacaatggggattgtcaatccattttttcttcatcatattgccatattggcattagtgtttaatatctgtctctcaaagctaaagcacataatgtctgatgaaaggttaacagcaccattctaaaaaaaaaaaggttaacagctgatatgcattcgaggtggagcgttgtttgcaaggggacagagctctttggtcaggtgaccgtgactctgaattggggcagaaatcattcagaaacagctgcatatcttgtagctctagctgtcttggtgagaagggtttggaaatttggatgcagttgtatgtgccaagacttaatgacaaattatcatgagtcactcggagaggagtcactgagggcatgtttggttgttgcctaatgttaccccttgccacaagcccacaactcaactcgtccttgtttaacattacacaacatgtttgccatgttggtggaccactgggcccctagcctgtactactactggacttcgatagaagacgaattgacttgctgctgccgactgctagtcgaagtctttcattaaacaagtaggatttgcgagatctattgctctgaactaggtcccgtataatttccttccccaccgggagctccgtcctgcactcacgcagtcacgccgcttggtctgttgtctttgtgcatctccgttccttcgtgcttcgctgttcccaaatcccaataccagccacgccgggttagttcactgacccacccgaagcttacactgttgcagtctaaatatgttgccacttgctgtcttgccatgtgccgaaagacaacatgggtcactccagtatctagtttacttatccatagaccacagctgttgaattgtgtgatcggctactagtacatcactgctcgtgattcagtacgtacaccgcggtaactggtaaggaggattcgcatcgtcgacaatggcggctgcagcggtggctgacgaaaatgggtcgcccaagaagacgaagcagggtggcttcaagacattgccattcatactaggtgatcctcctcgtaacctcgtttacacttccatatcttggtttggttcttgatggaattttcgttcagtgcaagtactgcatctcaagtgttcgattcgtgttctaagagtacactactccgtcaatgcagcgaacgaggtgtgcgacaggttcgccacggccggattcaacgcgaacatgatcacgtacctgacacagcagctgcacctgccgctggtggaggcctcgaacctcctcaccaacttcaccggcacggcggcgttcaccccggtgctgggcgcgatcgccgccgactccttcgccggccgcttctggaccatcgccggcggcggcgtgctgtaccagatcggcatgctcggcctcgtcgtgtccgctctcgtccctgccctccgccccgcgccgtgcggcggcggcggcgccgcggccccgtgccagcgcgcggacggcgggcagctcgccatgctgtacctgtcgctgctctgcaccgcgctcgggtccggcggcatccggccgtgcgtggtggcgttcggcgccgaccagttcggcctcggcgggaggcgccccggcggcgagcagaagtggagctacttcaacctctacttcttcagcatggggctcgccgtgctgctcgccctgacggtggtggtgtacatccaggagaccgtggggtgggggtgggggttcgggatcccggccatcgccatgttcgtctccgtgctgtccttcgtcgtcgggtacccgctctacgtgaaggtgaagcccgaagggagccccttcaagcggcttgtgcaggtcgtcgtcgccgcgttcaagaagatcaaggagcccgtgccggacgacgccggcgagctctaccacaacaaggagctggacgccgccatcgccgccgacgggaggctgctccactccgaccagctcaggcaagcattttcaatgcatcgatctctgtgtccttttacatgtggttcgttgtttattttgacgcaattcaacgtgtcagagagttaataacgtatttgccccaccacgtgaaggttcttggatcgagcggcgatcgtgacggcgggggacatcgccggctccggcgagccgaacctgtggcgggtgtcgacggtgcaccgcgtggaggagctcaagtccatcgtccgcatgctgccgctgtgggcggccagcatcaccgccatcgccgccgggtcgcacaacttcaccttcgccatccagcaggcgcgcaccatggaccgccacctcgcgccgagcttccagatcccgccggcgaccatgatcatcttcaccacgctgaccatgctcgtcagcctcgcgctctacgaccgcgtcctcgtccccgtggcgcgccgctacaccggccggcggtcgggcatcacctacttccagcgcatgggcgccggcttcgcggtcgccgcgctgggcgtcctcgccggcgcgctcgtcgaggccaagcggcgcgccgcggcggccgagcacggcctgctcgacgcccccggcgccgtcgtgccggtcagcgtgttctggcttgtcccgcagtacgcgctccacggcgtgggcgacgcgctcgccacggtggggcacatggagttcctctacgaccagtcgccggagagcatgcggagctcggcggcggcgctgttctgggtcgccggctccctcggcaactacctgggcacggtgctggtcacggtggtgcagagcgccagcagaggggagtggctccaggacaacatcaacagggggaggctggactactactactggctcgtcaccttcctcttggtgctcaacctcgcctactacttcgtttgcttccatttttacaccttgaagtcgttcgaggtggacgccggagacgaggcgcaacggcggcgagatgttgccgggagtgcagaaggagagactgagctctctgctggttgtgttgttgcgtcaagaaatggggtgttgtaagctagcataattagggagtgacttattgacatcagtgaagtaatttggtcagagctatctttcttttagcgagttcatattcaatcaaatatttttctggcatacgatcagaaattatttttttccgggataaattgatacatctcgccttgatattttacttgtttatgtaaacactgatcaaacagagaaaatcctttgaggacatgggcatatacacttcttgttcttgaatatatgacacacaaaaatacgttcttctattnnnnnnnnnnnnnnnnnnnnnnnnnnnnnttatatggtgagatcaaagcataaaccatctatgtagtaaaagtgaacatattattctgttccaatccggcaaggggattgaaatgcacattctacttcaaggttcctcctttcttgccatcgccctcgttgccatttccacggtagagctcgagctcctcctcaggtttcaccgtctccaatggcttgaaggtgtagtacctgacgcagacgaagtagtagatgaggttgagcccctgcaagccgaagacgagccagtagtagctgtccagcttggctcggttgaggttgtcctgcagccactgcccgctccgctgcgtcttggcgtggatgatggtgacgagcagcgtgccgaggtagctgccgatcgacatggtgagccagtagagcgccgccgcggtgctccgcatgctctccggcgcctggtcgtagaggaactccatgcggccgacgtccatgaaggcgtcggcgacgccgtggatggcgtactgcggcaccagccagaagacgctgatgggcagcgagctacccttgggcgcgtcgagcatgccgctcgccgcggccacggacttgcggcgactctccacgaccgcggccaccgcgttggcgagcatggcaatggtcatgcccacgccggcgcgctggaggtgggtgatgccgtttgggtggcccgtgaagcggcggagcacgcggacgaggacgcggtcgtagaaggcgagggtgagcagcatggcgaggttggtgaagatgagcatggaggccggcgggatcttgaagtgcggcgtgatgtcgcggtccatggtgcgcgcctgctggatcgcgaagctgctgttgtgcgacgccgaggtcaccagcaggatgcccgccgcccagatgggcagcatgcggaggatcgacttgagctcctcgacgcggtgcaccgtcgacagccgccacagcttcggctcgccggacggcagcacgtcgccgtccgtgataatggccgccttgtcaaagaacctttgcaagaacaaacagttgattaattagcccctaatcgcatcgccagttcgccgcttgctataggagttcaacttactttagctgatcggtgtggagaagacggccggtggtggagatgccggcgtcgagcaccttgtcctcgtagaggcggcttggctccggcatgacggctttcctcttcttgaaggcggcggctgcgacctgcgccagccggaccagggggctgccggcgggaggcatcttgacgtacatcgagtagccggacacgaaggcgaccacggcggcgaacatggcgatggtgggcacgccgaggccccacccccacccgacgttctcctggatgtacacgatgacggtgacggcggtgagcttggcgagctcgatgccgaagaagtagaggttgaagaagctccacttgggccccttgcgcccgcggcgcccgcgcgcgccagcgtcgagctcgagctggtcggcgccgaacgccatgatgcaggggcgcgtgccgccggtgccgatggaggtgaagagcagcgaggcgtagagcacggcgatctgggaggacgaggcgcgctggcagtcggcggcgtgcttggcgcagggcggcgggcggagcgaggggagcgcggcggacagggtgaggaagaccatgccgagctggtagatgacggagccgaacgtgatggtccagaacctgccggcgaaggagtcggcgatgaggccgccgacgagcggggtgaggttggcggtgccgtggaagttggtcagcgtgttggaggcgtcgacgagggggaggtgcagctgcagggtcaggtacgtgatcaggttggagctgaaccccacattcgcgagccggtcgcagaagtcgttcgctgcattcggtgagggatggcgggaaatgttacaacttcaaaaattgttgagagccagttctaaaataaacacaacaatttcctcctctagtccctgtttagaaaaggagaaatttacggtttcttgagagttattaagagctaggtacaaaaaaaattattgtaaattttcgtacattgtactgtcagaggtaccaaattttacaagtatgtaaaatcactccatattcgacttaagaaattagggaaaatataagcttgcaatggactttgctcattttgacatgtttttttaacaccgttaaggcgttaagttctctctgaatgggataagggcgaacacaagtttcggttaaaaacacatgaggacaaaatcacaattgaaaacagtggtaagaataccatttcccttttgagaaatagcatttttacggtccagcaatttgtacctcctgataccggtacctgtaggtaccaaaaaaatcgaaccgttcaattttagaggagtacgatcatgaggaaaaatagcggtggaggagatggtggcgggggtggtggaggcgacaccgcgatggaggaggaggaggagatggcgaccgcggagtaggcgccggtgaaggaggtggcagccgcggcggtagcaaagcagcacttgtggaggaggtggtggcggcaagggtggcgaggcgacggaggaggcgctgacggcgaagtaggtgccgacagaggaggagctggtggtggaggagatgcggcatgacggctgggaaggagacggcgcacacctctagctctattcatccgcacgcgaaattacattcttgcccctccacctctattcaccgcgaagtaccaaatcagaggcagaagtggtacctggcggtacctaattccgtcagctgttggatctgctcgatccaacggccacgatttgataccgtcaggtactgttggatggtaaaaatcctctttgagaaaacgctatattcttttagatagctaagtttgaacctacactgcaaagtaatgcgtactgaaatttccgttccactatactttagtactcattccgtgtgaaaaaatgtctgtattttttttcgccaagccggcaaatgtttgatagaaatgtttcattgatttattaaaaagtttgtggaaaatttgctctcagtcccttgatagaaaatgcaaacctgataaactcagaattttatatatatataaagggaggtgtcgagctcgtatgtatattctatcattctcgtgtttgtttctggtgaagggtgtcatgtactcatacctaattgtcgagctctttttatattcatcacaaatatctggagattccttctcttatacagtagttaagtatagaaatggggccttttccagccctagttaaaaaaaaagtagttaagtagtaattcaaaacaagggaaactttgttacagttttagcccttcatttccctcaaaaaagttttagcccttcatatatacgatcaaaaggatatttggatatttgacaaaataggctgcttgaatttagtggtcgtgaaagctttgccatagatctgattctgattctgcacgtagcaacagtagtgatatcgtttttttacaaggtcgcaaccacatgagagctactgtttggcatttttaggacttgggctatgcgtaaagatgatccttgatgctgttcgacaggtcgggttcttgggcgtcagtccaaagaaaacgtcatttcgtttcctacaagctcatggaaccgtgcaatttgtcttcgaatgtcgttttgactagtagacaccttgtttgactacatgacctcagaattaattcctactctatgcagctgcagcctggtggtatccagctagcccaagatccccaagaacaccgagatggaattaaacaaaaatcttttggatcaatctttgccaaactactaattttaatgatctaatcattcatgttctgatgtgatcatgtgagcctgatcaagcaaagaaaagaagcagcatttgtgaagcaaagatactaaaatcagattacctaggatgaacggcatggtcctgaagcctccctgcttcggcttcttcaccgccaccacgtccacggccttctcctctcctcttccatcctccgccattgttcttctccctcctcctctgcaggtgaagcttcacagttgcagcagcctctgctttctctctctctctctctctctctctacccaggagcaatgagctttcagtagcgtgtgagaaatggagatgctttttataaaggactcgcgcgaggttgagactattggattttggagcttcagagatatggccgtgccctgaaatgtccctgggaaagaacagctccaccaccacttgatgattgagatgcgacgccattgaggctcagcatccactgcagagtagtcagaatcgaacggcatcaaatctctccactataagcaagtactaacggttttttatttctgatccatatggattatctcattacatgttgtctgatttatcgtcaatatcactttgcaaatcttgcaggaaatgcgcaatcagcatgtctaatcatttgctcaagattagtctcaactctcaagtggtgggatatgttgtgtcacatctcaccagtaactaagaggaagaggaatagaggatccttggagatctgatcataacttggtggaatgtttggcttcaacgtaaccttagaattttccaacatatttggctaaacgaaaaccaggtggctttcttgatacaggaaattataagtgaatagctctttccaaaaggcccatgtgatagccttaaagggattacgagtcaatgtatctgtggagtttatatccatagcaatagctgttttagttgcttcctcagtcttttggcccttggcctttggcttttgattgtactgtgaacaattttgtttctactgcttctaatatattcggcaagtcttttgccgcttttcgttaaaaaaaaaaggctcaactctcaagttcaactacaaccaaaggcaaagatgtttttttctttttttctttaagtaaatgtatttattttccttttgttacttttgacatcatcacatatcacaatcatactaggggcactcatagtgcaagctacccaaaatgagaaacctcaggttaaggtcacacctcctctcccagacaacccctaaggggttgtttggtttgctcctaaagtttgccaaaggttaccacacctcatgttaggcaagtttgacaaagttagtatattgtttggttcatagccacacttgtggcaagattccttcttatctatttgggccccacgtgtcatcaactcaacaaagtgtggcacaatccaattttgctagctaaggtgtggctcactttttgtaagccacaacttaggcaagtgtggcacaaatagtatggtgaatagtggcaaacttagtatagcatccaaacagccccttagctttttcccgtcatcttctattctagtcctcacatgttttcaaactacatatcatataaaatttagcactaaacaccctaaaatctaaaaactagtataaaatttctccccctccctcaatctctctgttccccaatccaccacaaatagcgaagccggcggctcctcccaactggcggctcggaaggcgacagcggcggcgtgagagctcactgggcccctccaatcctggcggtggctcgacgacgaatctggcaccgcgcgagtggcggaggggggggaggcgacgacagatccacgatgccgtggaggctatggacgccgcgatggtgtcctcggtctcgtctccacggcgtgggagcggaagatggcaacgaacttggc

SEQ ID NO: 27028 - DNA, 11649 bp, Oryza sativa
  unsure (1)..(11649): unsure at all n locations
cagcagagaggggaccacacgcactttcttttttgggcgtgaggaacccggaccctagctaggaggcgcaaaccttgcaagggcacaggacccaccttttttttcctccacatcaacattcagcaactaggtaacgctccacgtagaagcattatgaaaggcttaatggagaagtaaaatatgaccatgccctaggactacaattctcatgtgaacatgagtgatctcgcactcctgtacaattaggataacgttttttaggaaactgttttgtctgatttgttagcgttatcagcttttctttttccctaaatccttaactgatcagcgtgattacgagtgacagaaatccacaagctaccgggcgtcactaccgtcaccgtcgacggcgacggctcggcgtgcagtgagcagtgagcagtgagcagctagcgcagtggcagcaccaccactgcaggtctgcagcagatagcagagattgtgatcttttctgctggtctgctagccactctggcagaaatgagacgggacactattgctacttgcttcctctgtcagttgccggtaacttgctacatggtcctgtgcatcatgtcctgcctctaggtgccacttccggcgattgagaagaattgcaagggtcaacccctttactttaaatttgttgccgattggggtatatgtgagtgagaggcagagatatttctgctgcagtacgtaccaagtacaccctcatcccaaaataagttctttttggttgttttgtctaacacaacagataaattatcaacaatgtcttatttaaaaaatttatgaaaaaaataaaaaaataagtcacacgtaaagtaatattcatatttaatcatctaatagcaataaaaatataatcataacagttttttaaataagatgaatggtcacacgttagaaaaaaaattctataaatagacttattttggaacggaaggtatactactctctgaagcacatcttggtccagattttgaaacagattgttgagtagattattgctaccgattatctatttaattatatggataaattgaatattttgataaataaatttaacaaataacttaaaaaagtcgtttaaataatacaatagaaatttttttcttataatatatattttaaacatggagcaaataatctgtaaaacaattccgtaaataattaagtaaacctcagcttgcaaattcctctaaaattaaaccctgaacctatctcactctcaccggttctcatccactggtttcttgaacagcagaagattatactctttttttttttggttaagcacagtaaaagtgcagcaagtcagaaccgaagaaatgtctactacactgatcagttaggccggtacaatcattcaatcatgtaatggtccattgtggtacagggatagcacagttggtgtgcagtgcctcaaatattaacatgcactccaaaacggatgatcgagaggcatttgttgtcaacactagctagttgatagaagccactatatatatcctaacatcattagattcaagcggctgcgcattagcactcagtgatgctcctactggtaggcttttcgctgaattttccttctttctttctttattttttgcatatatataatatgctcatttggttacatttatagcgacagcaaaagcctggccagagaagaaaaaatcctaagaaatgcattgcttcatttaaaaaattccatggtaaaaacacgcaaaaatttccccaaacctaggcaagaacgccgccaaatgttttttttgaataacccgccaaatgtatccactacggccttgtttggtttgaagaagattgagagtaaataattctacaccataataggtataaaataaatctcctccaatctctcctcttagcaattaatcaaacatggcctataagaaaatgtgctatatatggagcaccacaggggaggatcaggagaatatttctggtgccctggaagcacaaaagcaatactctctccatctacttttgataaacatatttcaaatctgaaaaaattacttttgataggtatatttcaatccaaccacctatcctcttaatgactttctcggatttaatgagtgactctccattcttcaacataagattggctacatgggcattgagaaatgcaaatattaatgaatcacttgtttacgaagaataactaggatcatgtttaaatggatgataagtagaattacttatccttggtcattgtgccaaataaaatataactatgaaaagtagatggaaggagtaccaagtaccgtaaaaatgttcgaattaaaaaaaaagaaacattagtgtctaacccatgtattatacttcctccgtttcaaaatgtaagactttctagcattgctcatattcatttagatattaataaatctagacatatgtgtatgtttagattcattaatatttatatgtatgtgggcaatgctagaaagtcttacactgtaaaacggagggagtatatgctattgatattgatattataaatattaaattttagtcatgttgactttacgaagtttaatgacttgtaccaaatgaagagtacggtacggcaacctatttaattttaatttcaaatttcggaactaaattaataatatactaagctgagagtaaggtacggcaacatatttattaattccaaactagaaaacctagtgcatgatattcggtataatctaggttataccgagattaataggagtgtaattaggatgtactctatccataaaatgagttaaatgagtttagacaggttcatgcctcactcaagataataactctgcgttttgttgcatgtgattggaaaaatacaaatacatatgtgtgttacacgggtctacaaatatgaatccttccctgagagaatagttttggaagagtgcatgtcttattagttaaagttgtaataatattagttaaaattaaatgaaaatggagggagtatatgtatacagaaatgctaagggacagggtcccatctctgcatccacaagcgatatccttaattccggatgctagcgtcatggtggtggcaagacggcgggtgcacgatggacaagcggatttgagcgagtccttgatggcaccggagatgttagggatgtattgtaggataagggtgtggaggtggataaggttggcctcctggaagacggcgagggagatgacgcagactgagtcttgatcttttcggcgtcataacagattattagtcactgtagacatttcacgtgtctaggaagtaggaagcaaagtggtagggactacctagtgcggcgccaacggagagaaggatcaccttcaccttgttgtcatcgtggcattacagttatttcttggcaaccgtcgctgcaccggaatagggacagggactgcaaggaagaggcggaaggaggaggcagtggaaaagcaggagaaggaggttgaggaggaggcacaatggcagtggtgagttagtgacaatagtattgcgctgacaataatgatctcatttagatccagctccatcatgaagcaagtatggtacctcatagatatcaggttgatacttgagcatcatgcctaatgtcgtagggcattgatggggtaccacatttgctactaggggtgggcattcggtctaaccgaaaatttcggtctcgatcttcggtctttcggtctttgacaagtgaagaccgaatttcagcgaaaaaatatcaggaccgacaaattcagtctcggtctcggtcctgaccaaaatttaacaatattttcatatatgcaaagaaataatggaaattttcaacacaaaaatcacaaaaaaaattcgtaagcacttatgagtaaagactcttattaggttgcatgcctagaagaagtagggatgtgaaaattagagtttaatcctattaaacatagtggattgtaggttgtatttagacattttttgataattcaatctttttggtctattcggttatccgaggagaccaaccgaattgaccgaacaaaattcggtttttcactacctagggccgaattgatgaccaaatttctcggtctcgattttttcggtcttggtctcggtctttcggttcggtctttttctgcccacccatatctgctactcagctggtatgtccaaaatgggacaccgtgtaatgacagcccccatacgtataacgcatattagtttggacccgtagtatcagcaatacgtacgatgcaataccttggagggggagagttgactaccaaattaagtgacgaggccaataccagatttgacacgttttagcaaccactagactcaaccactacgagcctacgaccagtaggagcaactaacagcgagaacaagtgcgtttcccacaaccccggtgctctggaatgctggaaggtaacgattactggcttgctgtttcaaatgattctagcgcatttggttgcataggtatagctactacgtatagcaaaatcagaaggacctttctttttgttgttgttgtcagtcgcctgatcatgtaggtcatcaggaaagatgggttaagaagctccactttgttgaacatgtagctacatcataataggggatatatccggtgaaaacgagttaagtgttgaaaactcgtaaaaatcatatctaaaagttttataaattcatgaaaaaaatactacatataagtgtagatatgaaatacattctcaccaaatttcaagttcaaactcaactttatttaggagtaacaaaaaagataaattttgggtgaatagaacatgacactattcactcgaaatttgtctttttttttctcttaaacgaaattgagtttggagttgagatttgatgagaatgtatttcatatctacacctatatctagtattttttttcatgaatttacgaagcttctaggtatgattttcacgaatttgcaacacttagctcgttttcaccagatatgtcctctttctaatatactcccttcgtcttaaaaaagccaacctcatattaggatacgacacatttatttttttttatggatggagtatctctcagttttagtccgtgactttatgttgatggaagctactcccttcgctccaaaatataaaaaattttaggtggatgtgacatattatagtatgaatatgaacaaagagttagaacatataatatccaaaaaaatctcttatattttgaaatagagggagtatcaagtagtagcaacctacttggactgacagctaagaggtcaattatgatgctgatttcttgaaatttatctgcacccagagatgtgaatcgatgtagtactatctgccattcctgaaaccaaagcaactaacaataaacaaaagaactgaagaaaaaaaaaggaccaggcgtagagaaatgtgaccagaacgaacggaatcaggggaggcattaaccaaggaaatgttaaagcgtgatcttctcttagagaaaaaaaatccctgtttcatcgccgagggatctccactctccagagcttctgcttgacggattccagcaatgtcggaagaggagagcaacgacgatgccggcgagcagatgccgcagcagggcggcatcaagaccatgccgttcattctcggtgaggtgttcttcttgcaatgttgctacccattttgttcttgtggatgaatgctgaggtgagatctcagattaatttgtgcggtgcagcgaacgatttctgcgaccggttcgcgacgatcgggttcaatgccaacctgatcacgtacctgacggcggagatgcacctgccgctggtggaggcgtccaacacgctcaccaacttccacggcgcgtccaacctcacaccgatcgtcggcggcctcatcgccgactccttcgccggcaggttctggaccatcgccgcgggctcggtggcgtaccagctcggcatggtcggcctcaccgtgtcggcgctcgtgccatcgctgcgcccgccgccgtgccgcggcgaggccgtggccgtggcaggggaagcttgccagcgcgcgaccccgtggcagctgctcgtcctctacctgtctctgctctgcacgtccgtcggcaccggcggcacgcggccgtgcgtcatggcgttcggcgccgaccagttcgagctgggcaagccaccgcggcggcgacccggcgaggccggcgcgccgaggtggagcttcttcaacctctacttcttcggcgttgagctcgccaagctggtggccgtgacggcggtggtgtacatccaggagaacgtggggtgggggtgggggctcggcgtcccgaccatcgccatgctcgccgcggttaccgcgttcgtggcgggctacccgctctacgtcaagatggctcccggtggcagcccgctgacgcggctggcccaggtcgccgtcgcggctttccggaagagaaacgtggccgtgccggacgatcctggcctccttcacgacgacaaggagctcgacgccggcgtctccaccaccggccggctgctccacaccaaccagctcacgtaggtccccgtgtttcacatcaactctccaactctaaattatctatgcatgtgtgtgatttatctttttaagattttttgaccgggctgcggttgtcactgacggcgacatggagggaggcggcggcgcacggccgtggcggctgtcgacggtgcaccgggtggaggagctcaagtcgatcatccgcatgctgcccatctgggccgcggggatcctgctggtcacgtcggcctcgcacaaccacagcttcgccatccagcaggcgcgcaccatggaccggcgcgtcacggcgagcctggagataccgccggcgtccatgctgatcttctccaacgtcgccatgctcgctaccctggcgctctacgaccgcgcgctggtgccccggctgcgccgcctcacggggcaccccgccgggatcacgcacctccagcgcacgggcgtcggcctcgccatcagcgccgtgagcaacgccgtggcggcggccgtcgaggggaggaggcggcgcgccgcggcgagccacggcctcctcgacgagcccggcgccaccgtgccgatgagcgtgctctggatggcgccgcagtacgccatccacggcgcggccgacgcgttcatggacgtcggccgcatggagttcctgtacgaccaggcgcccgagggcatgcggagcacggcggcggcgctgtactggctgaccatgtcggcggggagctacatgagcacgctgctggtgacggcggtgcacgagaggaccagaggcgaaggggagtggctccaggacaacctcaaccgggggaggctggaccgctactactggctcgtggtgacgctgcaggtgatcaacgtcgtctacttcgtcatctgcgccaagctgtacacctacaagaagctagaaacagtcgatggagtgagcacaggggagagaaatgacatagttgatgatcaggagaatgcaggggagagagatgagaaaggaagcgatgtaaaagatgtagagcttcagcctctgctactatcggatgtaacgctcccatagagatgtttttagagattttgggggtgtgttttttttcactgggaggcaactgttagtgccgagctccccctctctcagccgtcgtgctccatgttaggtttaatgaaactaatttaatattttaggtgtcgctaaatttttctataaacatagtcaaatttaacaaagtttcaaacgacttataatattaaacaaagggagtacattataagatgaagatggttgcaattagttctccgtagaaaatcaaatggggaaaacaagtacccactaggtttagcgggggcagcaatgaccgtctcctggtaacccacgaagacccatgtccaaatacaaattattaaattcttgaggtccaatcgacctatgattagtggataaatgataatcttgtgttcttgtcacgtggattatatatattgatatgtcgatttaatgtgtggatggtatgtattgcatcatatatgcgatttgagatgtagatattgttttaagtggagaactggagatgatggatcacgggatcaattcccgcacgggatggtgatagaaaaattgttccccgttataattggcagggacggaatgggaatgtatttccggaagagatcatctgtagttgatgcaccgtgcctttgtcactgacatgtggaaggatcctgatccgccacgacacctttgtctcgctgttgacactggccatcgctagccggccgtctttgtcaacactatcacatacaccctccgtcaaaagagagagagagagagtaatttctgacgaatatggaaacaacctatgtctagatttgtaactagaaattttttttttcatgagatggagaaagtagatgcaagtatgtactattttcaccttctcataaagaaaagtttattttctactccataccagtaaaaatatatgcataaaaacaagtatatcctcttatgttggaggtcctttgcttacccaatagtatatcactacactcgtttccttccattaaataataggggctttcagcgccagtttttatatattgaagacagaattctggtcaatcaaaatgcagtaaaattcggaacttactcatcaatgtaaatatgtaataagatgatgactgacaattattaaacaaaaactgaacgatcgaagcctacctcggatgggaacggcccaggatagtcaagatatatcaggttgatgcctacctcagataaaaccatgtacactattgccagcattatattagaagtccggatgatcacaggttattttttaataatatgaaccagatcctgctaactatataaaaatatgttagcaatcatttctcattgtagatacagaggtttgcattagtatagctgagttccaaaagggcgcgtattgttaatttctaaccatatatatctacctcgcgaaaatataaagaagactgcagatgaaactgggggatgaggtatctgtaaagtgcaatcgaactggctgagaaatgtagaagatcaagaaaaatatttattcgtaaagaagcactcgagacattcacataaaatttgtgggcagcattattgaataatctacaagattaaaatgccgtcctctaagttaattattatattgttattcctagcctagaaatttcactagtttattacatagcgacatggtatagactcctattatcctatagcacctttgatgtcatttacatagtacatactcgctcaatattttctatgactgcactcattacaacttctctacataaggagttttcctaggcaatttgctaccacggtgaatttatctttcaatatctgatacctacaatcaactaattacgcatccatactcaatattttacgaagcctttttggttttgtgctttgccaagagttgactctatatcgccatggaatagagaaagctgtttggctaaagcaaaaccacaatacataccatccacagaagcacttaatataccccctgcatagccagcaccttccccaataggatacagccctgcagtgatgtgctctcatatgtaccggtatttcgtgaaatttgcaatggggagcttgttcttgtctggaaacaggtagaaaattgcaataaataaaataaaagtaaatcgtagttgaaaagatagaattatagttaaaaggtaggtgacatgaatagaagtccaaagaaacggtgaaggattggagtgctttctaagaaattatcttgtgcattgaacagttcaacaggtcatcagggtgtgaagggcgacaacacagtagaagagactcggtataattaatttctcatgcagcagatactgcacaacttaggaaagaaaaggggaaccctacatgactatggtttacacaaaacagtgaacatggaaagaaactgaatgtactccatacaggaaatgttttccgtttaaggggttattaattctaagagcaatgtagcaacaggaaaagaaaaacgtaggtacagtcatagcgaatatggagaagaaatgataactgataaggacatcaatgttaaatatagctcagggatagagataaatgcgataactgaagtcacaagagaaggttcagtggaaggtggatgcagctcaataagaggtatctttacaatggcaataagtataggtcagggatttaggggtgaattcagtaggttaaagcctagaaccctgggaaaggttgttaggtcaaaaaaaatgggtgattatttcaaagtagagaaatcagagcatccagggagacccacgaaccagcattgacctctttagggaaagttggaagctaaaaaaatcaatgttcccaatctcataaagtgtggattttattgccttgccttgccaggcttttttccatttcataaactatgatataatggctttaccgccttaagtttgcccaaataaattaactaagaagaaggattcagtgtgtaggctagatccaaagagattggctgtaaatcataagcgacaaatttgtanacatatgggcacgttgctttgagattaagtaatgctaccgtccaatgctcaggcattggtgggattggagtcattggactaacactagactctttgatgttaaacaattggtttcaggatttaatgaatgaaccacaataaattctatggaaatagactgatgaaaaatttcgagcttgcatatgaatttgcatacctcgacaccatgaagtaatcctcactagatacaaatcctggcatctgaaaatattgggttgcaatgtcagagagatggtatttaaaaccacagaagaagaaaaaatagtgtgtgtcaaacctcttcctcaatcattattattgattgttgtagaacttcagttatgtgcgaagggaatagctcatggagtttggatggccgaactcccagcctatagcttgatggtgggagagttgtaactggaacagataataaagttaattaataagaagaaaagtatatactccgtatctttaccacctaataaaatcttagtacctgacaatctgttactgagaaaatctgtgacacactgtgcaggaacaacgaaattccctccccccatggtagctgctcttctttcaaattctctctgtttccatgaacatatacttgttaaatttgcatttttggaattgaacactaaagcaaggaaggaagaacatgagggaaatactacttaaaatggaattttatcttacatacaagaggagtattgtctttgcccattaacaaaagaggtttaggcaaaaggcagcacatggcatcccacattcatgagcaaatggattgcaggcacatgtgcacacagcatagtgatgactgacgcaagcgacaatctctaccatgctgcgtatccaatctatttgtcatactccctccgtcccaaaatgtatgatatcgttgacttttcgcataaagtttgaccatttgtcttattcaaaaaattatataaatatcatttattttgttgtgacttgttttatcatcaaagaaactataatcttaacttatactttttcac

SEQ ID NO: 27029 - DNA, 18651 bp, Oryza sativa
ctggccctagggataaaattttctttttttatatattttctctatatttgaatttgaaataatcaaataatggttatgatcttcaacatcaatttaccgcagtgccacaatttcgggatatcctataacaaattccacaaaatttaagcattttgtagcaaattttatcaatatatagtgttgtaaactttaattaagatcttttatgctttgatttgctttataattcttacatgaatccgtttagtagaccgtatttattgtacgtgagttcgatggtagattcgatgttgattcgctttataacttcgtttgattgaaattggaacgatgcgacggaaaagttaaagtttgtatgtgtatgaaattttgatgtgatgaaaaagttaaaagtttaaagaaaaagttggtaactaaaccagcccttgatcaatatgatgaaaacattcaggaactttgaccagcattaactcgagctgacgagaatatacattccggaattctcaccattggttttgcccgcgtgaattgtcttcactgctcagtaattgcgctgctcgagcgcgaccaatggcctcacgaaaactccaggtggttcggccacggaaccagagtatggaactgattgcgtccttggcacgaaggcgaattttcaccgcgattttctccatttgtctgactcgtacaacctttcacctcctctttttcaccctttacccaagcaagaagttggtaaaaagaagggcaggtcacaaaagaatgaggagagcaagaaaacaaaaaaagagttcccatctcatctgcaccactactgtgtgacagcagcagcagccagccaagaagagagaagagcacattgcattattgcttttcctgcaacaactggggcaacaaaaagccacttggtactttgcttatttttatccacccaatctacttttgctccttttctcgcaaaaagcccccttgcacctctcccctcccctctctgtccggctccttgtgctctgcagaaaggccagttccgctgctagttctgggatgcggaaaaggcgaccgcatccagccgcagcatggacagatagctgtaggatctcatgcgccgcggcggcagcggcagcggcagctcgccgttgcgattgcgctgagctcaacgatccctcaacacgccggccggtgcgcttggcgcagggggaatgtgcagctgctgttgctgccgaaaagctagcgatccgatgcttttgtgtgtgtgtgtgtgttatccgacggacgaggacaaaagacaccgggcatctcggcggcgacggacgggctcagctcggcatctgatgcctcttctgatgttgatggggggttttcaggtaagctggtgggtttggttttcctttttttagttcttatgcaagtgggattttgatcgaattgcttttctggtgccttttgtgacaggaattttgtactctggtagttacattcaagaagcatacgcgcttcaccgcacacgtgcaacacacaagcacatccgtgagggtgaccttaacacattattactcaaaaacaatggagagaccgatagttgatcaaacattcgcacactcacatctccccgctcatccacgcgcaggtgacacggggaaaaaccctagccgccggccaccccctctcctctccgccgcaccgccgccggagcacgccactacaaaagctaagcgatatgctgggaagacagcggcatggctaaaacctggcgaggctaggtctccagcgtaggggagacaaagtgaaactggccacgacgtgcccccgataagggtggccgcgaatccaatgccggctccaccggatctagtctcctcgcagctgaatctaccccccgtgcgagattctaggtttagggtcccctccctaaattatggtttagggtcctaggttgggtgggggtggaaggaaggggaagagatggggacatcgctgaccttagaggggtagtcatgggaggcggtggccttatagtaggtggtagacacgggaggatggtgaggtgccaacacggcgttagagccatggggatgaaggatgatggtgggccagtgttgacggcaaggcaaagcgaagcttgtggttagtagacagcggccgacaatggaagatccggcaatagtgagaaaccgaagatgaggaagacgacaggaggtgggctcctcaccatcggtggcttcaggatgaggagagggaggaagggggtcttctctggtgctgttcgtgccttctagccaactggcaagaccgggcaatggggcggcagcagcgtagggcacgagaggagagagcgtcgtgcaatgggggtgggtatgaaggagggaggagaagagcgagggggttaccgggggagaggagtgtgcacgaaggcggcggggaaaacacgtcgacagcagagcttctcctcggcatgggaggcaaagcggcgtacgcacggcgggagacagcggccgaagcggacagcgggtagatccgcccacgccggaggctgatccggcctctcggtggtggatctagcccccagcggctagatcgggataggccgagctcgcggtggcggtggcgctactcgagctcgtggcagcggcggcgcgactcgaagctcgcggcggcagaggcgcagcccgggaggcatgggccagcggaggatgctctggcagcggcggagctcgtggcgatggtggcgacagcgggcagccggcgggccggtcggcgacgatggagaccggtgaggcgcaaggaggcgcgaccgatggtggtggaagccgacacggtacggccggtggcggtggaggcggccgtggtggaggctcgggcgaggcgtgtgccggtgcggtatgatgaggctggtcggcgtggtgcgaggaagtgcagccggcgacggcggtggccgacgcagcgggaggcgaggccggtattggcgaagcccgatgaggcgcggccggtggcagcacacaaaggctggccggggggggagggcgtcgatgcagtggcgcccacgcaccggcggaggtttaaatggcggtggagcaatgatacatcagtggtagataggcaggtggtggacggcgggtgaacccagcccggccttggctgggccgacaacgatggtgttcgagtgtcactcccctcctgagagcgttgttgtgccgtctcaccccctctaacgtggctatcgggtgaaaactcagtctcggttgtccttgagaccttgacgaacggcggcatcgatgctttcatcgcttctctccttggagacgtcgtctagacatcccattgccagaacctcccaagcaattggtgcaagctcgctctagattcatatcctcttgtgttagcgtcctagcttctgtaagttagccacgttggaaggcctaggggggacagcagtgtcattctactctctcaccctctctccctctatcccaaagatttggatagagtgggattttgtgtcggttgtaagggtcgggttttgggaaatctcggttgtgtttttttgttggcctagcggcggtcggtcacacttagtggcggccagtccggtgctagctttctactgggtcggtgtgtggatggtggtatactttttttttcccttataacctctcagggttataatcttgtaatttttttctgctctataaatagaacttcgttaaaaaaaagatttggccaggtgttttatatccattgtcaaatagacagtcctgaagactaatgcctattgtcgagtgtatgtagcaatttcgtgtttgcaccacacttttccttatagcaatttcgaggggagtataaggtatgagtagcgtggttggtaggaggtgaattcggtgctttgggaggattgtacattcaaccacaaccaggattacatgcttgggtaaattaagcctgggaagttaacacctgaacccttttaggctacaacagatgaactgattaggacttaggagtatacgaaattgctgaattgagacctgatcaacttgtcagtaccgaaattagagatgaggcccgtctttcccggcgatctttattccgagagctccatgtttggccaaaagtggcaaaatcacccaaggaagaaaattagttttgggacctaacaagtggcactatatcaacctaattgcactaggtttggtaatgacacaatccaattgcaaagccatgtggtgaaaatatcttattcggcaaattgtcatctggtctttattagtaacagcagcaaccaaatttatttctccttaattattttccatctaacgcatcagagggtaaattaatcagtgatcttcgtggttgtgtttcgctgatctaatactacatccgttttgtccgtaatgaatataaaaccttcattagcttttttttagtgataaaacacgtgtctgtcaaggtccactactagctgccactactattctattgtgctgtcaccgctattcacacgttaaacttctgtacttaacgtgtttgaactgattttgttgcgaagaaacttctctatcagggaaacttcagcagaaataaatttgttcggtatagattgcttctacttgcgagctaagataatggagttaaacatggttgaaacataccaagcaatttcattttaaggcagaatttaatattggtcctgttggaatcgtgagtcagaatgagccatttatattactgtataaatattctgatcctttttctcattggactcatgaaagacttcgtaatatgtggagcatcaaaatggtgccttccttggaagccatagctttcccagaattaaattaaatatatttctgaaagttagtattcctacaagtttgggctggtcagctgcactttacaacaaaaacggtcagaaaaatgtttatatcattcccgtttttcctctaaaatagatttttttttgagaaacacagtaaaaacgcagacgctcacaacgtgcgcacactcacccctataaacgcacacacgcacaccctacccctataagcacctccggaagactgggctggcatatcttgagattgacgaagtcaccacaggcgtctcgctgtcgacgggtatgtcgcctatcactgaaagaataattagccgtaaatgcgagcacctgtgtcaaatctaggatttgaatccgggtatcggtactattgggttattagaaaatattgaaaataaaattatcgaaatagagcctcagaaacaatatcgtaggagtaaggagtattagtgaatattccaagcagtttgatttgcatacttaataacggtactgtagcatcaacgatgacaacacctattttttaaccaatggttatgtttttcatattttgatgggtaatcagtaatttgttccaacatttcacatgaagacgatataccaattaaatggcccgaaaaatcagtatatcattttcggaccaagtaaaatcagaacggaattgcgacagaacttgcgacagtaatcagaataaaacgaccggtacaaaacggaagcgatattcatatcgttttcatcccaagtgcagcagttcagagctcctttggctcggtaagcggcgccggtgcagccaaacggccccactcatagtacttaattacgcttaagtaggcttaagtacgaattattgtaggtaaatcaggcttattaagcaggcctgtactacagaaagatggtttactaaagcgcaaataatgagtgagcatttaattgcggaaaatccaggcaggcgagagcgagaggattcatggatctcccgaccaatgtaccctgattctcctctgatgatagccagcccagccagccagcgagccagccggatctcgcaacccccagaactagacgcaagtacacgagcgagatatcaccaacagcatgtgccactgccaagtgccagccaccatcatcacacacccaaataaaaaaaaactaaaaataaaaaaaataaaaagggaaatcgcatttatcgcctctgcagataaacattgccggttgtcccagcacagggggagaaggggagagagagggggagagaacgtcaggcatgtgggccccacacctcggggggtggtgggcccggatcagtgacgccgggcgtggtggggccagcggcagatgagatcagaatctgggtttgtccttttctcggctcttcgctgcgggcctgacgcgcgcgcgtgggagtagtatctgcttggatcggagccccccaagccgttagctgtcaaggtggggtgtggggtagtggagagaggagaaaagcgggggaggggatctgatcgtcgcaggagcgcagggtgcagcggcagcgccactcaaccagcgggagcggctgctgctgctgggcttttgctcctcgcttgagcatggttggggggaggaggaccacaccatggtgtgccatcgtcgccctgtgcggcctgtgtagtgtgtgtactactgtagtactgtcttcctcgcactattttgtgtgtgggggcctgtggggaggggttgatgatatcgaatgtcctgacgtgtcccccctccctccctgtccatatcgtggctacccttcatatcccaaaataaatcaatttaaataaaaataagatattatacggtataatgaatttatacatactcttatctagatttatggtaatatgttacgttatatcccaagtaagattagcttagaacgaaagaagtagatctttttttcccgtgtttgtgttagacactcttcatcataaaataaaccaacatgatgtgatattgtcggtgacatgggaccgggagtatcatgacttagagacttgaggcagacacgatcacccacgtggcctaaccccctcgggggggggggggggggtcgggcccgagggtgatacggccgcccttctctttgtctccccgaggggtcggaccgctcccgtctcggccccgagggccgaggcgccccgaccccttgtgggttttgcgccgcgtatatggggtaggtgagcatagcggggctcacctaaccacatttattgcggtttggacgagcgcgtcacgccgcatgtaacgcagtgcagcgcgctcgtttatccggtctgtgaccagtcacagaccgatcagatcgtgggttaggtggcgacaggcggtctgacgcacgcctcgccccatcccgtcaggatgagagcctccaagcactcgtccttagccggagccggcgtgttagctcctggagatggcacgttggtcccggtcagatatataccaggcttcatcctaaccattacaagcaagacattgtatgaagaggggcgaacatgcagattgataaactgacgcgtggtggacaagaatgaccgatttgtgaccggtctgacactgatcatgtcgtcagcagacagccatgttcccacgtcgcgcctgcttccggcggaagtggaggtaggtatgggctgtcccatcagaaggtcattcggacggcaaccatacaagtctccgtctgtttatgaaaagataggataagtccccacaaaaaagagagagatggtgcatgtggtatccccttgaggtataaaaggaggaccttgcccacttagaaaggggattgattttcggatccagaaggatcagagagggagagagtaagagctctctggttctccagctcttttgtagcttcttcatacatagatccacaaaaacacaggagtagggtattacgcttctcagcggcctgaacctgtatacatcgcccgtgtcttgtgtgcttccattctcgcgaaccttccacacacagactaggagcttagaatctcacccagggcccccggccgaaccggcaaaggggggcctgcgcggtctcccggtgaggagccccacgctccgtcatctggcgcgccaagtagggggctctgcgagtgatcttctgagctctcgcactctttcgtgtgcgccaagcttttcctgttcagcccaatggccgaacaagcaaaggcgcacaacctctcttcgagcgttagtggtgacgaaggggagccaaacccacgccgtcgagctcgtactccaccgccccctccacgccaaagtcctaggcgggaggaggcgctcgagagggtcgaaggatccgcgacttcgacatccacgggtgatggggaagggcggcgagatggggagcgtcgcctcctcgtctacggcgacggcagcacgccccagggcgcgctccaagctgcgggcgtgctcctacgtcacccgcccattgtccctgacccggagtctccagcccaacgttggctggacgacgtggccaacttggtcatgacggcacggcagcgcctaggtgctggtgggcggtcctccgccaccaagacccctggcgctgctaccaccggctccgtgttgtcaaggcggagggcgcggcgagcggcggctgttgctcgccattcagccgccactccttcgtcagcgcctccgacccaggaagatctgcgtggggggccggatgcccgcatcagtatcgagcgccggcgtaatggccggcgtgctgcccacgcaacggagggcgcctcctcgtccggagtgtcacatcaacacggacgcggggatcagccctccgtgcccccggttggtggtgtcggctgtagagcctttgtggcgagccttcggaacgtccgttggcccccaaggttccggcccaccatcgccgaaaaatatgacgggagcgtcaaccccgccgagtttctccaggtctacacgaccgggatcgaggccgccgggggtgacgacagggtcatggcgaatttctttcccatggccctgaagggacaggcacggggttggctaatgaacttgccacccgcgtccgtccactcttgggaggatttgtgccaacagttcaccatgaactttcaaggcacatatccgcgcccaggtgaagaagcggacttacatgcagtccagcgaagggatgatgagtcacttcgctcatacattcagcggttctgtcaagtccgcaacaccataccatgcatccctgcacacgcggtgatctacgcgttcaggggggggtgtgcggcacaaccgcatgctcgaaaagatcgcctccaaagagccccagactaccgcggagctttttcagctcgcggaccgagtggctcgtaaggaagaggcatggacctggaacccctccggttccggtgtggcagcttcggccgcccccggatccgctgctcagacagggcggcgtgacaggaggaggaagaagaggtcagcctataccgacgacgagggtcatgtcctcgccgtcgagggcgcttcgcgggccacccgaaaggggaggcctgcgggcgacaaaaagaaggaggccggcgctcccagcagggagcgcccaaccggcaagtggtgcatcgtccacaacacttcccttcacgacctcgcggactgccgcgcagtcaaaagtttggctgagcggacgaggaagtgggaggaggagaggaggcaggagcgccgagagggcaagtccccggcggttccttccggcaatcggcgaagtgaggccaagcagaaggcccccgccgaggacatcgatgacggcgatgatgacctaggtttccaagagcctggggccaccattgccactgtcgatgggggagcgtgtgctcacgtttctcgccggagcctcaaggccatgaagcgagagcttctggccgcggcccctactcatgaggcgacgcgccgggcgcggtggtcggaggttgccctcaccttcgaccagaccgaccacccaccgtgcgttgcccggggaggacagatcgcaatggtggtttcccccactgtttgcaacgtgaagctggggcgtgtcctcattgatggaggagcagccctcaacatcctttcccccgcagcctttgacgccatcaaggccctggggatggtgctccggccgtcccagccgattatcggtgtgacgccggggcacacttggccgctaggtcatatcgacctcccggtcaccttcggtggatccgccaacttccgcacggagcgggtgaactttgatgtggcggacctcagtctgccctacaacgcggtcttggggaggcccgcgttggtgaagttcatggcggcggtccactacgcctacctccagatgaagatgccgggccccggtggccccatctctgtccatggcgacctcaaagtcgcgcttgcttgtatggagcagcgcgcggaccacctcgccgccgcgtccaagcccgagggtggcgacgagaggcttggcacatccgcccccgccgccccgaggcagcggatagtcacatacgacgaggtcccggtcaaggaggttgccctaggcgacggcccgtccaagaccacacggatcggtggtcttctggacggcaaataggaagacgcgctcgtctctttcctgcgggcaaacgctgacgtcttcgcatggagaccggcggatatgcccggggtccccagggaggtgattgagcaccgtctcgccgtgcggccgggcgcaaggccggtccggcagaaagtgcggcgccaggccccggaacgtcaagccttcatccgcgaggaggtggcgcgacttctggaggccggattcatccgcgaggtcatccatccggagtggctggcgaacccggtggtcgttcccaaggcgaacggcaagcttcggatgtgcatcgactacaccgaccttaacaaggcatgtcctaaggaaccttaccccctgcctcgcatagatcagattgtcgactccatagcggggtgcgacctcttgtgttttctagatgcatactctggttaccatcagattcgcatggctagggaggatgaggaaaaaactgcattcattaccccgataggaacttattgttatacgacaatgcccttcgggttaaagaatgcaggtcctacttttcaacgtactactcgaatttctttgggtagccaaataggacgtaatgttgaggcttatgtcgatgacttggttgtaaagacgcgcaaccaagagaccttactctcggatctagcggaaacttttgagagtctccgctccgcccgcataaaactgaaccccgataagtgcgtgttcggtgtacctgcgggcaagcttctcgggtttttggtctctgcccgaggcatcgaggccaaccccgagaagatacgagctatagagcggatgcgcccccccagcaagcttagggatgtgcaatgcgtcaccggttgcatggccgccctaagtcggttcatatcgaggctgggagagaaggcgctacccttatttaagctcctcaaacgctccgggccgtttacttggacggaggaagctgaacgtgccctcactcagttgaaggcgtatctcagctctcccccagttctggtcgccccggagccaaatgaacccttgctactctacttagcggcgaccccgcaagtggttagtgcggcgttggttgtggagcgcgatgaggacaatcctcattccgcgcacccccaccctgtgctggcttggcccgggagagagcagggaggagaggcccccgagctgaacggtggcccaaggcccccgacgaccggagcaggccctctgcccgcttgtcagacggtgccaggtgcccccgacccccaggacggccccgaggccactgcgggaaggccgcacctatcgccctctgaccccgaggctaaccctgtgccgattcgacccaggagagagcagggagaagaagcccccgagccgaacgatggcctaaggcccctgacgaccggagttggccctttgcccgcttgtccgacgacgccaggagcccccgacccccaggacggccccgaggccactgtgggaaggccgcccctgtcgtcctccgatcccgaggtcgtcggcacagaagacgagtgcgccccgcaaggccgcttgggtgaagagcgccccagggatgcggcccctagcgaagaggatcggccccaccgaaaggtgcagcggcccgtctactttgttagtgaggccctccgggatgcaaagacccgataccctcaggcccagaaaatgctttacgctattctgatggcctcgaggaaactgcgccattatttccaggcgcatcgggttacggtggttacgtcttaccccctcggccaaatcttgcataatcgagagagtactggacgggtggtgaaatgggcaatcgaactttctgagttcgatttgcactttcaaccacgccacgctatcaagagccaggccctcgccgactttgtggcagagtggaccccggctcccgagcccgtctcagtccccgaagccagctcgggcccctcgcagctgcctcacaccgcccactgggtgatgcagttcgacggctccctgtctcttcagggcgccggtgcgggggtcacgttgacctcgccgagcggagacgtcctcagatatttggttcgccttgactttcgggcgaccaataatatggcagagtacgagggactccttgcgggactcagggtggcagctggactggggatccgccgcctcctggtgttaggcgacttccagctggtcgttaaccaggtctgtaaggagtaccggtgctctgacccgcagatggacgcttacgttcgccaagtacggcgtatggagcgccattttgacgggatagagcttcggcacgtgcccagacgggataacacggttgccgacgaactctcacggctcgcttcctcgcgagcccagaccccaccgggcgcctttgaagaaaggcttgcccagccgtcggcgcgacccgacccgataggggagacggacgcgcctgacagacccccgatgcccgtcggagtccaggcctcgggacccgaggggagcgctcccagctcccttagattgattgcttggatcgctgagatccaagcatacctcacagataagactctacccgaggaccgcgaagggagtgaacgcgtccagcgcatctccaaacgctacgtgctggtagaagggaccctctatcggcgcgcggctaacggaatcctcctgaagtgcattcctcggggacaaggcgtcgagcttcttgccgatatccatgaaggcgaatgcggagcccactccgcctcgcgcaccttggttggcaaagcctttcgacaaggtttctattggccgacagctctcaatgatgcggtcgacctggtccggcgatgcagagcgtgtcaattccacgccaagcaaatccatcagccggcccaggccgtgcagatcataccactttcatggccatttgctgtctgggggctcgatatcctgggaccgtttaggcgggccccgggcgggtttgagtatctgtatgtcgcgatcgacaagttcactaagtggcccgaggcttatccggtcgtcaagatcgataagcactccacacttaaattcattaagggcatcacaacccggtttggagtgcctaaccgtattattacggataacggcacccaattcactagtgaacttttcggcgattactgcgaagacatgggcatcaagctctgcttcgcctcacctgcccaccccagaagcaacggccaagtggagcgcgccaatgcggaaatcctcagacgccttaaaaccaagaccttcaatatcctcaagaagcacggcgattcgtggattgaggagttgccagcggtgctctgggcgaaccgaaccacgccaagccgagcaaccggggaaacgcctttcttcctcgtctacggcgcggaagcggttctcccatccgagatcaccctgaggtcccctcgggccaccatgtactgcgaggctgatcaagatcagcttcgcagagatgacctcgactacttggaagagcgaaggcggcgcgcggcccttcgagccgcgcgctaccagcagagcctgcggcgctaccatcagcgccacgtccgggcccgatcactctgcgtcgacgacctcgtcctacgccgcgtccaaacgcgtgctggattgagcaagctctcaccaatgtgggagggtccgtatcgagtgatcggcgtcccccggccgggctccgttcggctggccacgggcgacggcacagagctgcctaacccgtggaacatcgaacaccttcgtcgcttctacccctaaagggggatcgggtgtcaggtttcgggcccggggcaaccccgcacccccctcgggtgtgcagggttggccgggggctaccacatatgcatattcttatttctcttatatctgtatttcaataaaagcattttcgatttcctaaaggctgtatctgtgctgttgtttccttttaaaggatcttgacttgaaataggtcactcgtgttcaatcctgccctcgggggctcgggtcggctaaaatcgccaaacggggcccagaaccgagccgtgccccggggcgtggtgaactccgggggggaatcggcaaaaacccacaatcgggtcacccataaccctcggtcaccacgctcccggcctggccagtctcgacatgtggatctccccaggcactagccccgacccgagccatttgaggactaggacctgggcacgagcccttgttcaagccaagacacaaaagaaccgcggcacagacatccttgtctcatacacacaacaaatagaattgacacaaaaaatttcctctttatttgattgcagattaaattagtctatacaagaagggggcccgaaggcctcggaagaagaaaagaagaaactatttaaagattggcgggggcctgggggctcactccgatgcacccaggtcgccagcctcgtcgccactatcgcccactccgtcgtcatcgtcctcctcgtcggagttgagggcgaacgcgagccgaggggccgaaccctcgaagctgtggacgatatggtcggcggcatcccaaacctgcgcgcgcgcgccatcctcggtctcgggagggaactcgtccagcgccgtccatggggagaagtcgggatccctggcttggtaactcgccagtacgagctccaccgctcctcgggcgaggtccctcgaggatgacttaatcgtcctctcgagctcctcggggagccgttggagagtcccggctatctccgagaggcgctgggcgaggcccccctggttggcggcgtacttcgcagtccgcccgccccagaggcccgcctgccggccggcgcggtctagacgggagacggcgtcccgaagcatgccgggccctacctcgcctgccaagcggagggcctcgacctccccggcggacgagtctagcgcgccctacagatcagcgatggtgtgttcggcagctgcgaggcgggcgattaagtcgctttcgcccgcggccgccccgccgctgcgcgccctcgcgtccagctccttctcccgcgcctcgagctcagcggcccgctggttcagcgcggccctctcagcgcgggcaccttccagattacggcgcgcttgttcctcttgcgcagcctcgcggagggacaggctgtccgccagccgttgcgccgcggcctcggcctcatcaagagctcgctcccgctcggtgagcgcgtcctcgcggaggcggagcgcggactcttcttcggcacaggcggcttcgtgcaccgccagtgtgacctcccgaatagcaacggcggccttgcgatccgccaggtccctctccacggcgctggcacgctcttccagcgccatggcacgggcctcaagggtttcttcgcgccgccgggatgccacctcggtctccgccgcccgccgttctcgggcagcggcagcgtcaaggaccccccgggcggcgtcgagctttttccctagctccgcctcccagctcccgtattgaaggcggagggtgtcctgcgcctcgttcatcacggtggtggcgatgagggcagccccccgctcctcctccacctccttggcgatctcccccagcaccttccgacgggtttcgagctctgagacgtgccggcggtgtgccttgcggcccacctccaccatggcctccaccgagcgtcgcccctcttcgacacgcgcccatgcggcgtcaagctccgcccgctctgcttgcaaggcctccacctgggcacttaacccgtccaacaccgtggtgtttgcaacggccaaggcctgcagaaggggttctgcgctcagtggagcaacggaaggcgtggggaagagccgcctcggtgaggatgccgcgcggctcggcccgccgatggacgtgccggactcagggatgtcccccggacctggcttgtcctgagcgtcgcccgagggagtgggcccaagcgatgcgcccgcggcctcgtcgcgagctgcctcggaagtcgtcgccgcctcggcctggcgaagtctggcctcctcccgagcggcttcttcagcttggcgagctcggacggccacctgggcggccttctcggcttcccgaaggcgatccgcggcttctcgccggtcagattcccgcctctgggcctctgtggtcgccgggtcctcggcctcagactgaccggacttggaatggcgggagggacgcgacgggatctcgcagaaaacagaagaaagaccagaagacaaacaagatggatgagtgaaaactcgcgttgagggaatgaatacggccacgatgggcgtgggacgaacctgcgagggggtcggttaaccgaccaccttggaggggaaatgaggtttccccgggatggttctgtccctcccatcttgcggagccgtttcttcttccgctccccctcgggctgcgacgtcggcgtggccccctccgggcgcctgctgccggcacgcgccgccccgccccctcggggaggagatgggggaggggttccttcctgcttcctcttctcccgggcgtcggcagggtggccgctccccgggcccccgtcgcggggcccagaagcacgaccccctcccggggtagattgttcccccctgcggctcccgcccgcgccatcatggcctcgaggagcccgctcctccgacgccccgaccgcctgcatgatggtcaggatggaggcgcggtctggatcactgcagagggggaggactccttgaggaatgagggatgcctccacggagctgagattcagcacccgttggaccactatcttgaagtcctcaggagcccagtcccatttgaccccccggtgggtcctcatacagtcctcggacccggtgtactcccaggcaccccgggcgcgccgctggagtggcgcgatccggcgacgaagatagtcaccgtacaccatggcccctgtgagccccagggatcgcaggcccgccaggcggtcgaggacggcgtcatagccatctcccagatctaccggcgcccgccagctggaggcctgcgccgggggctggctcggaagtcggaggcgcgcttcgtcggcgaggggggtgtagaaccagtcgctcttccagtcatcccacttcttgcggaggacgcagggaatgtagcggttcaacaccggcccccgcggctggaagtagcagccaccaaccaccgacggcggcgacaccgactgtattgtgaagaaccaccggaacagccgaagggatgggcgcaccccgatgaacatctcgcacaggtgcgcgaagatggccaatgtcattaccgcgttgggggtgaggtgcgccatctggagatcgtaaaacttcagaacatccatgaagaaagaagaaaatggcggaaccagccctgccattgcaaaagggaggaagaagacggaccgccccgggtagcatggcgccgggtgtccctcgcccagcgtaactatctcccggccggtggcagattccggcatgaagcggcgcggcagcccgccctgcctctcgctcacgatgcgggaaggcggcagcacgctaccatcaagcaaagcggagccccgtgccatgacgccggaggaagagatgtttaagagcgagcacgtgtggcgaaggtagggcacaggaaacaaggagttagggcgcaagcggcgaagacaaggggaataatggcgagaggaaggaagcaaatctcttcctcggcgactttatacccttgccaacgctgtgcccagctcctcgtttctcgcgcccactatcttgccccctcgtttctcgcgcccacgcttccactaatcccattcgcccgtttgcggtgcatgaggtggatatgcggctgtggcagtcgagatggaacatctcgtgcgcgcgttaattacgctcgccgaccaaagcgccatcaccatatctccaggaaaaacgaaccggcttgtcccgatttttagaccggccccaccatgtcaccaggccttaggaagtggcgtcacgtccgaccgcttccctcgaggagggcgatcgccctggcataacgccgggggctactgtcggtgacatgggaccgggagtatcatgacttagagacttgaggcagacacgatcacccacgtggcctaaccccctcggggggggtcgggcccgagggtgatacggccgcccttctctttgtctccccgaggggtcggaccgctcccgtctcggccccgagggccgaggcgccccgaccccttgtgggttttgcgccgcgtatatggggtaggtgagcatagcggggctcacctaaccacatttattgcgg

SEQ ID NO: 27030 - DNA, 13835 bp, Oryza sativa
gattttcggatccagaaggatcagagagggagagagtaagagctctctggttctccagctcttttgtagcttcttcatacatagatccataaaaacacaggagtagggtattacgcttctcagcggcccgaacctgtatacatcgcccgtgtcttgtgtgcttccattctcgcgaaccttccacacacagactaggagcttagaatctcacccagggcccccggccgaaccggtaaaggggggcctgcgtggtctcccggtgaggagccccacgctccgtcagatatctattcagattttattttaccgctagtatgtgtcacattttatgctaggtttgtttatggctcgaatcttttcgtattcgtgaaaatcgagcatctttttaagtttcagcagttttgtaaaccccaattgtatgatgcttaattttgcctatgcatatccttttcttagccatgacataagaatttgtttttctatctaacaaaacggtagtcacatatagcttggacaaaattaaccaagaaatcgagcatttggtatgcggcatcgtactaatagaggaaaggggagtgaattcgatctgaagtcaagtctgaaccgcgcgattgtgacagcatcatgccacagtatccgcatcaagtacagtacaccaatcaaggctcctatcggatggcctaatcagccaaagaaaaagccaaattttaaattttcaaacttaattttaagattgattttaagatattttcaacgtagtttcttttacaacattggcttttaaatcaccaagaacacatttataaaagtttcatctacaaatttatttttatttactaataagccggcttattaggaaataagccaaacaatgggacccaattgaaaccgagccccctccgcgatcacgccttgtcggcgccgaaagaatcatttacgactggccctgcaggccccagctgcagtagtagctgcgactttgatccgtgcgaaacatgtgaccgaatactgatgtgtcgcgcaccggatgctcgctcggtcaccctccgggagccaagccagcaactcggacatggacacgggcacacggcgctggtggattggttgaaagcgagagttggggtcgtgctatgtgcgtacgcgtgtgatgcgtcgtaggggaggcgctgcttgtcgaatcggcggtcggtcggtcgaatcggcgtatacgtgtttatcgtctcacgcgcatgcgtcgtcgatcggtccgatggtcggaacagtggtgatgcatcgctttctgctgggatatcgaaaagagggttccgtagagccgtatagccaggtaggtggccggcgatccggaaagggattgcgtacctgagatcgagtgtctaacgctcggagggcaaaatgagtagttgcatacttgcattggctcgagtatatactgctttctccattctaaattgatttatatataattttttttaagattatttctaaatgatctacatatttatttttatttattagagtctattcgttatttgtgcattggagtaaataaacattgattcatacatccatacacataagtatttataacccacatgcaatatcttgatttgctattgactagaaaatattgggatgatgcattcattgagtttgttgctagagtaaatatagtatgagagttattagcttttcttggtattggtgtacttatgaaatatgtagatcaatttggaatggatggagtatatagcataaaacgacactggaggtagtaaatagtgacagacgtacaggttctgattttttttttttgaagactacaggttcggaattggattggctgtgttcgtttcaacccactcccaacccctctctctcgttttccgagcgcacacttttcaaagtgcgaaatggtgtgtttttttaaaaaagtttctatacgaaagttacttaaaaatttaaattaatctatttttgaaaaaatagataatacttaattaatcacgcgctaatgaaccgctccgttttccgtgcgaggagatgagttcccaaccccaggaagcgcgcactctgcggctctccgctgtctggtccagtagctaagcccaacctgatcaatttttggtgggcattggcccagcatgagtccaaaaacagcccaaggttggggagaggaatcgtaaataaactctaaattctataaactgtaacccttgtcagctcatctgaacatcgaagtttagataaagatggcatacgatgaattgaaagaacgaaatgtcgaattatgcagtgatttttgtggcaggatgaattttctctgaacagcatcctgagcgattctcttttcttctaaaataacagtaggatcttgcagctttttcaaaaacaaatcctggcaatagtttattgtggggaagcaaatcaattaccctggcaaattttaaaacgtcaggtcgtttacggtttcggtccactaccgtctaccgtgcttggaagctgaatcagtgcatatgttcgaactgatacgcagactagtactattgtttgtaaattagtgcacaataacgtctcatcgaaataggaattcttatacagctatcttttgacgctacacggaagttcgacgctgggaaagtttgactacaaatggactcaacatatgacaacacaacatagcaagttttaacaaacttggcgcattccagcaagtaggatctctcagccatggttgaaggactggtaaaccggaacctgcaaaagtaacatcacatccagcgcttagcaactccaaaaatatattaccaagtcccgtaaggaaccaactaaatgacccactattggcataaccacagtaaaatcatagtgtacgatttgtatgcaaaaataagtaaataaccaaatcagacctaaacaacggaaaaccttacatcaggctaacttcattgaaaatatcacgactcattcatattcttttggggtctatgcaagcaatggaccatacccaggtactaaccaccgagaatggcaatagtagaaatgatcatgtattgatttctaaccttttgtatattgtatagctggaaacatcttttaactatacaaaaggttagcctaccgaatttgggccactaatgctagattttaaaaactctaatccacatagactagatacaacacacgctataatgtgtacaataattgcacaaatgtactgactttatgatatgaaaggtcaaaacccagtgaatggctcacctgagaaatcatatgcccaagattgtcatagcaatgggggtatatcattgctggagttggccactgtgggtagacagcagttccagaagaggagcccatagataaatcgggttggccaaagtacacagaaggttggtttcttgacatattagcagactgcataaaaccaacaccatactgcataaactgtggcacaacaaaattgaagccaccaggactcacattgaagtcgtgcactgggcccctaacatacctgcaaaaagtttacatgttacttcttagtaatctcatcattgaaatccagtagttgaagcagaatttgaaaggtgcaactaacctcttgtagttacgatcatagtcaggatcactacgatccttttcagtgtccttaaaaacagcaactctggaacggctgttcattgtgttcaccttattctcatcaacaggaggctcaacattaattggttcatctctcgcaacagataaagctcccaaatcacttgtgccttcaatatcagaaatggaaccgttgaaaatgcgtgctcgtgctttgttgtattcctctatcctctcttcaacagttcttgctgcattgttcttggcaccggcatcacctgcaccattttggaaagccttgggccttggacaaataacaaacttaagcttctctgcagcttcatgctcatttcttgcttgtttgctgggaacttctgacaatgcaataactggaagtttgctttcagatgttttctttgcaactatcttgctaactgaaccatctactaagctatctgctactgtagtctctaaaccatagtgttgtgcaacacgatgagcagcacagcggagataagaagttggaaaatgctggaattcgaattcatgcagttgaggattctgcataaatttctgtatatccattgccatacgcaaaactgcagttaagtagaatatgatagtgagttatgtaatcagaaagaaaattcaaataaaaatacattattgatgaactggatcacaaaaaagaggcttaattcaggtgaaagattcacaattcaaagtcgtggaggttttttgagtttagtgcatagagaaataatatgacagcactagcacaaaatgtagttcgatgcagaaaaaataaacagcactgaaagatgcaaagacaggatgtgtcgcctaggcaacataatccagggtttgctttaatccatcatccataagaacttgaaaagaaaggaaaaaagaagataaaaaagaaaaatagctgcaagtgaaaggagctcagctcatactcatcctctcatggagatactgaaatgagactcaccaatcaccatcctccctcactgtagctttgttcttatgtgtaccattcatatcaacaagaatggctctatcggtgtcatatcaacaagaatggctctatcggtgtcagctatagactaagcagattaatccaaacaaaaatgttcacaatgcattgagctcaactactcaacatacagtattttcatccagctctagctgttatttcaacatagtagttttgagaatagaggacagaaaccacatggaaattcctccaagaaataaacatattgttctggtataaccttacaagttaatagcatggcactaaaaagttatgatgcctataattgattcatgttccccaatcaatttctcaagaactttaacaggttcaaatagtatgtgactaaaattcgacatggagtttccagcacagtgagatgttcaatatcaacttcaatatgttacctaatttctaaaaacaataacctaagttcaacatcagtccattatttattgataagtccattcccctaccacaaacaattagcaataacatccacacgtttacaaatatatcagcgacaatgaagctaactccttacatggctctgtcaccaaacaaagttatagcaagctgcaacaaggaatgtgctgcaagcttaagaggtagacagattgctggaatccaacccaatttcgcacggatttttagcaaatcaactgtaccaccgccctctcctagctacctcgaaccagagggaaacctagtccccaaattgcacacctagaatacgccgggaccaaaactctagcgacagccggcacaaatccgagcctaatccgaccgcgaccaaacgaattcgccgcacgagcacacccaaaccctagccgcgggcagagagctaagatgagaggcagcggttacgtacccatgaggcggtggcgagggttgtcgagcgcctcgacgaggaagggatccacgtgcgaggtgaccctcccgtcctccgcggcggcgggcggcggcggcgggggcgaggcggcgccggagctcatcgtgcggcggcggcgggtggtggtggtggtaggggggagggggggcggcggacagagagagagagagggagggggggaagctgggcggccgggtcgcctgcctctctcccttccttcccctctcctccgcttcccgatcccgaagcggctgcggcctcctgcggacggagagagaggaagaggcgtagcccgagggaaaacgagagagaaaaaaaaaaagataggtccgcagcggcagcacggctcctgatttttgacgcccgcgaggtgccgtttgattcaggatcggtgtcggggtcgcgtggaacggctgtgaccgttcgagtcggatccgacgatcggaaataaggtttggggccttgggttgggggttcgatttttatgcgcacgatattgtagatttgtagtacttggggtcctattcagtctgaacaggattaggattgtgctacgctgtttttatctacttctggagagctctcaatgccacatttttattgtaacttgtagtagttgctacgtggagaattcgtatacaatcaaaacaggattacattgtttatctacctttagaaagctctcaaggtaaaactttttaattgtaacttggatcattgctacatggagtactcgcatatcgttttaaagtcacgaatttcaaatggtaccaagagaagaaatacgtatataatgtgacatatgtaagttcttcacgaattacaaattctacataagttcttcacataaactttcaactacatattgcaaaagactagtataaagtgacatatgtaatattacaattatatgtatatacgctattagtctagaagcctgcgcctctgtaatatttgtaatttatagagtagaggcttatgcatatatgcgaacatgtatttcgtttttgtgtgaggcgtagtgtgtgatgtgtcctttccattttaaataaagctagcgagaaaaaaaatattaagctagaaaattcgtatgttatgtcgtggaagattatgtgtatccgtaaaacataatgtttatcaggatatatcgatctctgtcggtcgctctgagaaaatgtgagaaatgatccaaatatataaaatcgaaatggccctatcgcgcgatgtgtctcaaagccgttcgatcatgcgccgtgccgtggcatccatccgtgtggggcttcgcaggtgtggctttgttgtgaaggatctacaccaccactctgaccacaccttgcaatctcgcacgagatccccgttcactgtttgaaatcgagagtcgcacaagagagcgagatgcggaggctgcagtttctccccaaatccattgatagcaacaacaaccactgatttcaagaaaattataaatgatccccttttggtccgtgatttcaactggtttcagctccacatttagagattttcggacagattttaagattttatcatatgacctaaataaatcgactgaaaccctaacccgccgtcggccaaaaccctagctccccaaggtgccatcatcagcatcgtcatcctcgcagccatcaactagggttgagggcagcggatccgcccctcccgaggacaacgttgctggatccgccgccattgagctccaccgtcaccacccgctattgtcgtcctcacccctcccggtgccaagggcgacaccaccagatctgccgtcctcaagctctgccgtcattatcaccccctcggagctgagggcggcaaatccgcccctcccgaacctagagggagctgctcccgagcccactactgttggcctctctcgagcattccgttgtcactcccggccgcgaccggcctctcctgagctcaccgtcgttgctcccgcccacggccaaccgctctcgagtctactaccgttgctcaggagaggagtgcccggatatatgagggagatggaggggaggataaggagagagaatgagggaggagtggataaaaatgagggagtgggacatttttttaggtggagagaggttgactggacttttcaccacgcgagcgcccaggaaaatacattttttcatgttgatttttttaaggagctatatgtgaaaatgctgactgatttttacagggacgaccagtggtggtcagtatgcaatctataggataacctcgtcaaaaaaatcattttttttaatagtgccatgatgaaggtaaccagtaacgcgtgtccttaacccattgccaggacatatagagatgagataggcagatagctcgtagtagctccctttatcggtagcgctatccgtcgagttaaacagttccgcaacaaggagtggaggccgaggatgacacgcacgccggaaagcgaaaccaatggcgcggcctgccggccaggacggctccgccgcgggtagcccagcgaaaaatttcggcaattttgcttggtccaacgcgcaggctcctcggcgtcggcatcacggcgggggaagcaaccgcgtgcgtccacatgaaaacgtttgttttctcggcaggcggccgatgtttgatgggttgccgacttgccgtcgttttttttgcgcgttagcacaagcccagtcacgatggcacattggcacccgtacggccgtacggtccatcacgtgtaggaaattgtggtgggtgtgtgatcgcttttgctgatgacccgtggttttttttggtttactgttaggatgcttcttacgggatgaaaacagctggaaactatcggaatcggcagcgtctctttgaaacggatattcgattgtaatgtttatcatttaaattactcaatttttgacgttaatacaataaagaggatattagaaaaaacaaaatttgtatatagcaaaaaaggtaacggtcgaaaacggtatccattgtatggaaaatgacactcggtcgatcgggaatttatgtgatcattttcaccccttcatatcttggcatgtgaattgtgaaatagaagctccaactcctcggaaaaaaagacccctttgaatcgtataaatggaaaaaggaaggaatagaaaaaaacatatgattatgataggaattcaatgcaaaataggggattgcaaaaaaaacacacacacaagaatgatcttctgattgattggattgtagaaaaacatagaaatcagatgggataaatatactcgaagacaattttccaaaatttagtacaagacatccaaaaatgtgtaattagctgggagacaccgtaagaatgcgtatttgctataggacaccacgaaaaactggtaattagctgctggacaccagcaagttatttcgttatatcttgaggaattggagagagaaacaacaatgtaagtacaattctacccttttgattttttttttctttttctctattcttctctactccttccttattcttttctacctctcattctttctatctctactctttcttcaagcgagcccgaggggaagggagagcgtcggcgacggcaccgcgaggcgtgggccggtacgacgcctcggctggggcggcgttgcatggtcgcccgcagggggccggggccagcacaacgcagcgaaggtggcgccagagcaagaggggaggtggtgccgacacggttgggcggtgtcgactcgtagtcgtaggtaagggcagccgggctcggcaagcgtgatcaggccaggagcgtggtggctccgagccggctttgggtagctcgaccggatggcgtcaggtgcttcagtcgggctcgggaaagaagagcgtgaagacgacgttgggcccattgatgcgatagcagtggcccggtaaaggaagggagtggctgagtggggaggccggccgccgcttcgtcctatgccatcggcggcctccccaggcttgctaaagaagagatcacccccatacccgagatccccatccaacctaactctattgggcggctgcaacaccaccgcctaactcccgccggccgaaggaactccttgtccacccactcgcttcgtcggctccggcgagtcgtcgctccaccgcccaatctggaaagaaagagtgagatagagaaaggggggcttacatgtgaggtccacattggattcatttgagccaagggcaaacttgcctttaatatttttctctctcctattcattaaaaataataaaataatatcgcaggtatccaacagctaattaccagtttttttgatgccctaaagcaaatgtgttcttacagtgtctcctaactaattacatgtttttttgaggttctgtagcaaattttgcattctccaaaatatttacaatattcttcattccataggaatttgagaggatacagtaagatttaattctttgtattaaagctctcatataaaatttttctatatgataaaaattctttaaaatttatatatttttcatgtgaatcaaaggaccccgagaagccgccaatttcctgcggtgatgaggaagataaatatgttaggtcccacaatttaccgccaattgcctatggctgcagttgcctttcgttagcaatagcgagcggaccacacatctcgtgagaacaggccagcatatccacgtttgccttgtgaacgtatggtactgaaaaacaaactaaagagaagctatgaactttcaaaaggaaaaacgaacaccaaaaggaaaaagagcccgaattaccccctacatcgcaaataaagtcattttacacgttaaactttttaaaccggacagaaaatccccctaacccaatctgaagcgttttttttaaattattacacagtacaacgcagacactcacaacgtacacaaactcacccctataaacgcacacacgtaaatcctacctctatgagcatctttgaagactggaacggcaaatccatcctggagattgacgaagccgatcaccatagacgcctcgccggttttgattgtagatgacgcacgagtggtagtctagtttaggggggaaaacggttttattaaaattgcgatgacatatttttaatgtcaaatcacagtcgattctttttgcattgggtttaggcggatactcctgcttgtttgtgcattgtgacccagcgtgttaggtctggaccgcgtgagaagtaaacatggttgaatacagtgcaaacgatgagtaacgaagggcatacccctacacgctaagctaaatagccatgcagcgctttattacgcattcgtataaaaattactctacactgtaagtattacaagttatatagggcaagttttaaaacatagtacattgtaattaggaaaaagtaccgatcaccctcttaaactatagcagttgactaaattaccccttaaactcaaaaaccagacatcgttcaccctcaactattcataccgaatgaataatcccctaagcatcgtcttggatggttttaacttgagcttacgtacgtggccgccaacatggcatccaatcagcaaaaaaaattttaaaaaatatctaggcccacatgtcacctcttttctcaagcaaggcgtccctaatccccattccccctacttcctgctctctctctttcatgatgtcattgactggagaaggacgacagagagggacctcactcgaggagacgacaatgacggaggtgaatcgacatgagctcagccaggcgcgcggaggtcctcctcgtagtccttctcagcctcctcatcatactcgtacatctcggcatctgagtgcggcagcggaggtgacatgacctccacggcaaccactacctcgctgccaccatctccggcgaccaccacctcgtcgacggcagtggtggatacaatagcgcttgcttcaccctatttgtcagcgcgctgtctagccccgcccgtgatgccctcttcccagcggcgaaggtgcaacggtagaggcagccatgtgtggaacggggagtgggagcggctccagtagtgcacggaccaacaccggaggtggccaccacgcttgtcctccccaacgatgtcccacgccgacgagctcatccccaacagccagatccgaccaatgcggctcccgtgccatcgtcgcctccgcggtcaccgccctcgccgccggtcacgctgctctcgcctctgcctccatgctgggaacgctcgtgcccctcctctagggcgagcgtgtgcgggagagcgggccagtcgctgctaccacacgcttcagaaggggagggaggagagagaaatgggggtggggactctaacaagtgagccctagttttttttaaaaaaaatgtttgctgtgactggacggccacaagtgctattcgaaccctaaaccattctcaacagtgctgtggggggagggggttgttcggtattaaaaattcagagtgaacgatgtctggttttcgagtttagggggtaatttggtcgaccgctatagttcagggtaattcgtatctttttcttgtaattataatgtaagttttaaaaattacattgtaactgcagtgtaagttttgaaaaatatagcgtaaacccttgtattacattgtaagaaaaatcttattatattttgttaaaaatatgacgccataaaaatatatagtaccaaaaattaacataaaaactgataactgttcacctttttaagttgagtttttttatcatcaattatcgatgtggcactgaaacaaataaaatatgtgtatatatatgttagtataaatttaacacgggaactggtaattctcaaaatagacggtttcatgattattctcatatattgaacatgacgattgtaccttgtccggccaaaaagagtagatagaaaaaccaaactagatcatttccatctggtctgggcctttatacctctttcggttgatctttgtcttgcttctacgcaagggaaagctcacggcgcccaaaatgatgaaagccacgtcacacgcaaaacgccggcatcgatcgcatagattgggaaagctccatgcatatatgtactgttcgaagcttagaaaattccatcccgtcagcacggccacgaaaaggagaagtggagtgagagtggtgcatattccgaatgagaccctctctaagccactaattttagaggtgcatttctctcaaaaaaaaaattagaggtgcatttgcatctcaactttttcaactcgaagattctttatgtgttatgattttcattgtcctgatcaaagagttatataagaacattttcacaatatgctaactcgtgttttcaatgtagcatatgtacaaaaagaattacaatgcacactttcacaaaattggaactggcctatgcttgcattctttatggtcccatctgatctcccggaacaagataataatgaatttaggatcgatgacgtaggattttctcattatatttgtgaaatatctcttctctactacttaaaaaataagaggtgcttccatcgtccgtaaaaaagaccgggcaaaaaaccggcgaaaaaaacaaaatttatccaataaaaaaccgggtaaagaaaaacgtgtgcgaaaaaagaaaagaaaaaccgatccaaagaaaaagcggtaaaaggaatccgatccaaaaaaggggcaaaaaaaatggacgaaaaaacaaatctgtctgatccaaaaaaagggaaaaaaggaaaaaaaattgaaacgaatccgactttgttgacgcggtaaaaaaagggcaaaaagataattaaaaaaccgtccaattcaaaagaaaaaggaactatatatgacacggtaaaaaaattcgaccgggcaaaaaaaaactagcgaaaaaactgggcaaaaaaacaggaaaaaaaaagtccgataaaaaaaacagggagaaaaaaaaccgggtggaaaaaaaaatctgtccgataaaaaaaagggcaaaaaaggaaaaaaaaagtgcttctgtcatccgtcaaaaaacagggtgaaaaaaaccgagcgaaaaaaagtccgatcaaaaaagggcgaaaaaaacaaatctgtccgataaaaaaaacaaggtgaaaaagggaaaaaatcgaaacaatccgactccaatgcagtaaaaaaagggcgaaaaaaattaataaaaaaactgtccgattccaaattatatatgatacggtaaaaaaaatcgaccgggcgaaaaaaaccaggtgaaaaaaagaaaaaaatttctgataaaaaaacggggcgaaaaaaaatctgtactatccaaaaaaaggaaaaaaatcgaaacgaat

SEQ ID NO: 27031 - DNA, 8504 bp, Oryza sativa
aaattacgagtttagattttaatcgtgtagattggttgcaaacatatctagcataggaactatctagcatgggaactattatataagaaacaaaaaaaatgtagtttttctaaaaatgttatatcacatcgctaaaaaaaaattgcgtggaaaaatcggttttgcactacaagaggtttaagtgaacatgtacatgaaaacccctttcagagtgaaggtgaaaataagcagattcaagagggcgtatatggaaaattcaataaaatacgcacaacaaacttatcccgaatagtcacagttcctgcaccacccaccagaaccttcccgatcaaaaacctcgtaacaccattcttacctttctcgtctttacccacctcacctacacctaaccaccgtgggcccgagaccccaccataccagcgcacacagttccaggcgccttaagttgtgcgttactcgcgtcgtcctagcacttttcagccactctccaccaacggcaatgctagatctagccattcacccccacccccccccccaacacacacagtcacccactcacctcgacaaatatggcaatgacttgtgggcccagatctacgtgggccccacgtgtcacgggggtaaacccagccagcgtctggaaaacatacaggtaggggggaaagagccggatcaccacgcctcgagcacgagctcgtcaacgactccgtcgtctcgtccacctccgaattccaaattttccatacccttcctcccagtccttacacctctcgatgcaaaaaccctagcgggggaagcaccacctgcgcagccgcagcggccatggcggagccggccctgctggaccccaccgccgccttcgacctccgcctctacccggcccacctcttcgaccacgaactccctctcgccggcggcggcggcggcgacgacgacgacgacctcccgctcgacgggctcgagttcgacctgcccggcgatttctccgtggaggacttcctcctccggtctccggagcgggacgactccggcgagggctctgctgccggatccgggcccaccgcctccccgtcgtcgtccccgaccacctcggcgtccaactccgccgtcgccaacggcagcggcggcgaggtcaagcacgaggagtcggatgaggggaggagcggtgggggtgaccccaagtggagcctgaagcggaagcaggcgagccccggcccgagctcggacgcggccaagtgccgccgatccggggacggcgacgtttctccgtcggcgtcggcgtcgcggaccgctgtggattccgacgagggggggacggtgtgcgaggaggaggaggacgagcggcgggcggcgcggctgatgcggaaccgcgagagcgcgcagctgtctcggcagaggaagaagcggtacgtggaggagctggaggagaaggtgaaatcgatgcactcggtgattaatgacctcaattctaggatctcctttgtcgtggccgagaacgcaacactgcggcagcagcttagtggcggcagtgtgaattgcccaccacctggggtgtatccgccggcgccaattcccggcatgcatttcccatggatgcctgggtatgcaatgagaccccctggttcccatgtacctcttgtgccaatcccccggttgaagccgcaacagccagtgccttcatccaaagtagtgaagaaaccagagagcaagaagactgtggagaacaagagtaagagcaagaccaagaccaagaaggtggctagtgttagccttcttggtttgctgcttattatgcttgtctttggtgctttcattccagggtttaatcataactttggaatgtgtgggcagagtgataatgctatgtttaggaattttggtcagtctcatgctagggtgttgagtgtcagtagccaggataaaagtagtttgaacaatagcgacatgattggtgttgatgttggaaagatgacggggaatactgatgggccagggaagaaacatcagcctgcacacaactcaagtgagatcctccctgctttgttgtatgtgccgaggaatggaaagcatgttaagatcaacggcaacctgattattcattctgtgcttgcaagcgagaaagcagtggcacataaggcctcaaaagatgatagtgatcagtcagctagagatcacaaagagactagtgttgccatagctcgttatctttcgctgcctggaaaggatgtgaatcgacaggagacatcctcggcagatggaccattgccacaatggtttcgtgaaggaatggaaggtaagcagattaatatgtttgccaatcttctattcttgttttctgcgaatttgtgatagttcaatttttaattttgtatttcgaccagagccatggtttgtttgtcgaatacaaatattcttgtgtatgctactgaagctgtgaagtttattgcctttattatttactcagatatgtaatatgtaaatataaatactaacactatatagtggtccatgtaatttcttttaatacacggccattgcatccaatatggtttggaatgcagtcatgaatgcaagtttgaaatacaagttaaaaaaagaatgaagtgacttcctgtaggtcatagagaaagcatgaagttaatatggttagacagggatttgcgttatgtttacatgccaacaataggacacaattgttattatctaggaaatgaaacccacatttaaggttgtgaagtaataatcagacactgcaagtctgcaactaatttggaaattggaatattatttattgaaggtcccctattaggcaacattttatacacgtcactctgacatatgggttttgagatcacccagttttgtgaaactgaaaaatatgccacccgagtttcttgttgctctgaattatgtcatcatatctcattttcagttcttcccttgtgttttcttctcatctcatctcttattttcttttcaactgaactaccaatcttccctttaccacttgggcgattaaattggcacgggataaatttgtgctgatccaaaccagtgaatagttgacccctaagcagaaaggtactgcagcatcccaaccattcgttcttcgctgctccatccactggcttgctactgctcttactcattgccttccacgcgagctctcttcattgctgctcactcttttttgcctgagcgcatggaagcatggatggatcttacagtggcggaggagaaagatacagctggggacagagacggaggaaggtggttggctggcggcggttaagttgaacactaatggctatattaataaaatctttgtagtcaatgtgataaccatgtgtcatagactacaaagaacctatgtgttgttaatcctttatcccataaatttctttgtgaacttaacataacagcatggcgttctagatctcaagtttctgtaacaaaataaataaatacaaatttcaacttgtattggttattttgtagtgatccctgcttttgctcttgtgacttaagtgggaactcactctttgctgaaattgtggcaaattggccagtgctaaagctagttcaaactaatttacatcctattataccacaatcctagaattatgttttttagggcaatcatagaattatgctgtgttgtttaaagcatactccttggagttcctttcgcttttctttctaaactttaagctcaactgaaaggtttactgtactggtcaaatatatattcagcggatccctaaatgttcacaagcttgtagttgcacaaaatcaacaagttggagtcttaaggacgtatatactttgtgttgtttagagtgttagaccgatttccaaattgttgctatcaggtatttcttttgaaaagctcaattgtttattcctactctgaattctgattgttatgtaacacagttcctaactctatgttgctatgcaacaacttttgcaggacctatattaaattctggaatgtgcagtgaggtatttcagtttgacatttcgacggcttctagcaatcctggtggcattatacctgcatctcctgttgtgaactcgtcaagtgtcaatgctaccgagaaaatcccagcacattctgctgcttatcatggcaagctgaaaaacagaagagtcatgtacaatgaagcgattccactcaccgggaagacggcgaacaacacagagccttttaacagaacctctgaaagcagcagcaagttacctgatagcaagccagcatcatcagttgttgtctcggtgctagccgatccaagggaggctggtaatggggatggcgatccgagagtatctccgaaacccctgtccaagatatttgttgttgttcttgttgacggtgtgagatatgtcacttactcctgcacgcttcctttcaagagctccagcccacatcttgtgaactaagcggctgggttgttcgccaaaaactgacagatgaatagatttatacaatgatctgatgctgtttcctaaccaaggactaaacttcctatgcactcaggctgaggtaattcaagtttgtcgaaggttcggagtgatgagtgcgagtttagttaatgtatgcagtttttgcagtgctgtgataatcgggttcgtttgctgtacctctagctgtaacggtgatgtaatcatgtaatactgtttgatcgttgagatataagtgcaactagtaatatgggtagtcgagaacacgtgcagaatatacatgcctttttttaccttagtttcaatgaatatcataaacaaagctacagtacatcaggttgctgaaaggtattttttatgctttgatctggatactatttagattatgtttaggctgaatttgttaggaattttgtttgtaatgaattcaggaactagctagaaagaattgagtctggtcaacatatctatgagaatatctgttgttaacagctgtgcgttgagcttgctagtctatcttttacagcactatctaatctagtatctactcgtcttgttattcacaaggtctattctaaaaaaaggatatttaaaatttccaacttacaagcctttgcctcataatttgaatcgtgaataaagaaaatagccgttattagttaggagtgtttttacacttcttccagaactgctaaccgatgcaatttttttaaataattctatacgaaagttgatttaaaatattgtagtaatatatttttaagctttttagctaatatttaactaattatgtgttaattcatcttttcatttacgtgtcagtgaaaaagttcacaaaccctccaaccgaactatttggaggagctaaatattctgaaaaacaactatttaatagcagcttctaaaaatctaaaaaactgtattttttctagtttctggtttattttctgaattttataattaaaatatggatgaacaattgaactttgtagggagttactaattcttgaaaaaaaactgccgttacagaaaaactcaaaagagatccttaaaatgaccctgaagaaaccgtcacgcactggctaaaacccacattatcctcaggcgcaaccgcgctctccgttcttccttccaccccaactcgccatggcgctcgccgccgcctccgtctcagttctccatctcccggccatctccctcccgctcccttgccttcagggctcaaaccctagccgtcccagcctcggcttgaccaatgccctcccgtggcgccgacgcggtgggcgcggggcgggggcggtggcgggggcggtgcgctgcgcgaagcgcacgggcaagcggcggtacccgtcggagaagaagcggctggataggcgacacaaggagctgctccggaaggccgcgccagaggagggctcggcggggcgggaggcgggttactggcggctctccaagctcgccgtccctgcccgcgacgaccccggcaaggacttcgctggtgtctccccgccgctcctccaagccatcgccaaagcactgaaattcccggtacgataatgcattgcatttttgtagtagctggtgaaatgcagtaaaaaattgcgaggttttagaatagctacaccgttgatgatacagaggattttgggggcgtggattcccatgagtcgctgctctggatgtgtggaactgtaggaaatattgccctagttccttgtgcggatagctcaattcttgatttgagcagcaggttgctaatttcctctttcaagttatgaaattaagccgcggtttgcaacttactaaacatgcgtacggctctgtctctcgagcatgtttgaacgttgttcgtaaccgtctatcgaattatgcatatggttcgtgcattatctggcagggctgagtgttagctgcttgcaacctgttatacaagtttccgattgcgtcctgctggagtaatctcaatatttaaactacaacgtttagtgatacgcctttcccttgaacattgtgactatggctgcttttgcatcttttgtccatattgctgagctcatattttatgcttagacttattctaaagttatgggcttctaaaatctattctgttctactgtaggtttcttctatgctccctgaagaggccttcaccgttattcgcaagtcgtttgatgcacggaaggttctttatggaatgattccatctatatcttatttagtatttgttatcctgcaaagagacgagattgcggcttggttgttaactgtaacacagatgcttgatgttgaagctgctaaatagtgcacccaaatcggattaacattaacacaaccgggaagaaacccaatgtagtaaccttcatttcagatctccattaacatgtcatccttctgttgatgtgtccgtcctaacacacagggtaacctttatttgcatcccaagtttgcaatagttccagatggccctgtaatggctcatctgagggtttaaggaagaaaacatgaagtagtgaagaatttgactatttttgtgctacctggtattttgcttagaatactggtcttctttactagatccttttgtcttgatgtcttgcagcaaagtatattattgttttgtttcctttgcttggttgttcttcattccgagagtgttatttcaggttttgcagactaggatgaagtcatgatgctctgcatctacttgtggatttgtagtcaacactaatttatgcattttggtttacatctttcatctctgtttctgactttgcactatttttttttttgttctgtaggcatttttctgaattaaacacatctttgtttatgtggactttaccttatttcagtgactggttttttagcgtgattatacaattgtagttatgccatataaaagttaattgtaatacttttcctttctacaaggctctgtgttataccgattgcaatttgcttcacctgtgttgcattcatgtgtcagtgttggttctactgcgttgataattgtttatatcatttatatgctgattagtttatcacttgcacaatttctttgtgactaaagaaatcatgtttaacatggcagattttgaaagaacctcaatttgtttataccgttgatgtggctgttaagagacttctggatttggagccgagaacgtgggattttattgctagattggaaccaaagcttggaacaatagaatacatgcctgatgagaaagtagcatctgatctggtcagtatgcttaatgtttataagcaaggttctgatggtgaactgggaatcaatgatactgtcaataatggctctatctgtagtccgcgaaagaaaccaagggtggcagttgtaggaagtgggccatcaggcttgtttgcctcccttgttctaggtgaacttggtgcagaagttaccttaatagagcgtggtcaacctgttgaacaaagggggcgtgatattggtgccttagtagttagacgaattctccattcagaaagcaacttttgctttggagaggtatactactcgttcctattttgcttacaggacttcaccaaatacatgtcagaattgtcttgagatatgttcgaataggtattttgttgacaatggattgaggcatttaacagctcgacatatatcttttgataaacatataaagtagctatatgtccatttggctactattatggccaggtggccacatgaagtgatttcatactatggcagttggtgcatttataccaattacttgacctgaaagaagcatacatgtctagacgttatatgcatctgaaataatgtaaggatgctttaaatctattgaatgatcatgctattttgaaaactgttgtgccataatcttcatatattatcaccattttgtccatctgttttcatatcatttaccatgtataaattaacaatttaaaattgaacttatacactgtacagtatgctcaagtcgtgaactccctactcgattactcccacccagtcacaaatatctggcgtttaggataagatttggtca

SEQ ID NO: 27032 - DNA, 698 bp, Oryza sativa
cctcataattcagttataaaatgcatggcactgagctttgcttgcagggccagggcttgtatccaaaagtgatctatgacatagacaccataaaaattaccatttactgtgtggtaacaacgatatgttgtagtatgtgtaaaaacttatgtagagacctgtgcagctactgataccaggctcctttgatatatgtatctatcgatagtttaaccaaccatgtaagcacttgaatagttgccagtttggtacagctacaacatactgtatttcattttgtatattatatggtatgtgttatttgcattcaactgcagtactctgaattggctgctgaagtacataaagggcgtgggcggatacctgtagcagattacaagatagtgaaatcttttggtgaaggagatgcagagctaccagaacaaaatcgcagttgttactcattttgcatgtgtcctggtggacaggtcagttgctcttttgttgtttcactcactccctcttctaatataggagtactactagttactgcaatcctatttctactgaattctaataataacgtgtgttctgattttttaaaaaaaaactcttgcaggttgttctaactagcacaaacccatcagaattgtgcatcaatggtatgtcattctcaaggcgtgcatccaagtgggcaaactcagcttttgtggccactg

SEQ ID NO: 27033 - DNA, 808 bp, Oryza sativa
ttggcaaggggatgaccataagaaaaaaatacaggctcactaggtgggatgttgtttgtcaacccaaggaccaggggggtcttgggattcataatttggagatacaaaataaatgtcttttaagtaaatggttgtttaagttaattaatgcggatggggtttggcatgatttattgaagaggaaatatctttataataaatctataacccaagttgacaggaaacaaggtgattcccatttttggtctggtcttatgaatgtcaaaagtactttcttaaatatgggttcttggattgtcaataatggggaacaaatcagattttgggaagatagatggattggtaacttggcttttaaggataaatatccatctttgtacgcaattgttcggaggaaaacatcttctattgccactgttatgggatatgttccgcttaatgtttctttcaggagagctttagttggtcagaatcttgtttgttggcatcagttgtgtgcctctatagtacatattcagttgaatgatttgtctgatagttttagatggaatttccatcagaatggcttgttctcggtgaggtctatgtacctagctttaattaataatggctatatcgagagaaacaagtgtatttggaagcttaagttgccacttaagattaaaattttcatgtggtacctgcttaaaggggttgtgttaactaaggataatttggcaaggcgtaactagaatggcagcttgaggtgttctttttgtttgaagaatgagtcctatccaaccatctctttatggattgtcattttgcg

SEQ ID NO: 27034 - DNA, 5744 bp, Oryza sativa
ttctctacacactttaaatcttctataacattattgagaataacatttttatttgaaggaatcacacctagattattaagggaagcagaaatttgatcatttgtaaattgtaaaaaagaaacattaacatccatattacctttagcatggggtttctccaagttcttttccgccttcaacctttcagctctttcaaggacaagctgatcactatcagaagctctccttttgcttttcctggatggagaaattaacgcctcgggaatagcagagatttttccaaccagtttttcttgctcaaccaacacggtctcctcatccaacccgtcaaaatcttcgtcagacgcagtcaaaccttctgactccggtatcaaactcaactgagaagaggtaaaagaaggaccacccctctcagtaagattactatcagtagccatactcacatcagagacacccagtccagacttctttcccatgtccttgtcattttccccatcgtcatttctcttcccatcaccatccccaaaattatccatatccaaaggaacaggatccccagcaccaatatctgactccactttaaaagacagctcatacaaatgatcaccaatggccacatcaacaacatcagggattagagatgggtcaaggaccaaaacttgtaaacgagctatctcataccttctagtaaataacatatcaacagctttagtaatcccaagaatagaaccaactgcccaaataattaaatattccctcaacccagaaggaagccccttacactgaacccaaacttttggaatgacatatttcacctcattcccaacacctctttctatgatctccatctgagcctcaccaactttagtgtgcacctttccccattccaccatgcgattcagctcagcagcagaaggaaagatggtatgaaaagtgttatcaccattgtcatgtaccacccacctccatttaccaggaattaacctctccaattcagatacaacagctttaactgtcatctgaccattagatattttaaccaaggccgccctagggtcatgcctaatcctttgtccagctgggagggggatatgaaaaaatcccaaaccatcacccccataaccacataactgagcagtaggtttcacagctgatctaaaaacaggacaccgggtagcaatgtgatccacactttcacaaatttcacaataaaattttgatgaacactcctgaagagtatgccccttagtcaaacacctatagcagtaaggtttacccaatcccttagtgtctgcctttgatttacctttctctgaatcagtggcgcaaacaagcaacccttgttgtacgggttcagcacccaccgccggggtaacagatgcgatgacatcacccgttttagcagcagcaacaagagtaccacccacagcaaccgatccactaactgacccagaggtatttgcagctaaacccgtagaaccactagccgaagttcttccaaaactcggtatcacaccaactgaattaactgcagaagtcccaacaatcttacccacatgtccactcggcgtcaaacctgcaggtagcactagcgatgctgacacagaggtagcagtggctccctgaccaccaccacccagcggaagaccagctgcaggaactccacccgggtataaaccacccggcggcccaaaagcacctgccggcggcgccataccacctgccggcacaccactagatccacccgtcgctgcaaattgaccaccaaacgacggcacaccgaagaactgtgacccagatgcatcacttgccggccggccaaaagagcccaaagggaaccctaaaccggaattgaagccagttggcccagcattctgtccaaacccaccgttccaaccttgtcctcctccaaagttgccatgccatctaccactgttgccgtgagagaagtcatggcgattgttgtgaccgccaaactttccacgaccccgtccccttcctcctctaccatctctgccttgctgtggaaaaccacctccggaacccggatgaaaaccccgagcaaagccaccgccatgcccgccagcaccgaaaccctagcgattgtttctctccattggcgaagaactagcgacagcggcgtaggagcgagcgcgagaaggagatcgatctcccaccaaacacctgcgcctcacggtaccagttttcgcaaaaagagcaactaacccgggtatgggcctataggggatagcgggctttggataaggggtacattgtggacttacgttaattgattcagattttgtaacctccggaagtttgggaaattccaaattcgtcaccgtcggatgaagtggaaacctcaccgaatcggaagacttcaccggagaaaaatcggacttttgaaaccgcatcttccccaccagaggagattgaaatctcgccggggtagaaccagaaacggtcgccgggaaaacggatgataccttcccttgcagcgctgaatagatagcctcaccaacagttctcggcggagacttcctcggcgacggcagcggcccactccatggctttgatgcgcactccagagaagatgacaccaacggccaagactcctcaccatgcaaagcctgcaaaactgaaaaacgagaaccagaagactcaccgattccattttcctgatgatcaacagcagcaactgagacatgcacaggcttcggcctcaacgccgaggccgccgcgacctcagccacatggcgtagccgaagacgatacttgcaaatacctcctttgttccaaaataggtgacatttaagaatatatgtagctgaatctctaaatcttaacttggtaataaatacacaatgttgaaatttggagtacatcagttgatcagtagtacacatgtgatgaaaaatatatgagaaagcttccatatggctgaatttttaaaactactactcacatcgttccaaaataagatcatctttgcctccttttaattgtcaaaaataaattcatctttgagcaattattacattgaaatatgtaaaaggggaaaataattgtattgggatttcataaaatgaagcgttttttttcttttgtgatagtatgggcgtgatgggtgaaaaagaaagttattttatgattaggcgagcgtttgaaagggtgataaaatttcctcgttttccacgtgcatgtttcctagactactaaacgatgtgttttgtttcaaaagaaattctattggaaagctcctttaaaaatcatattaatccatttttgaagtttaaaatcatacaatagtgggtcactgggtcaccacattttatgtatcttcttgtttcccctcctctaaggcaacagaggagattcactggtggagaaaccatctttggtcggtcaacccaaatccacaatagtcccggttccattaaaaaccgggactaaaaacgatttttagtcccggtttataagcgtaacaggactagatcatctttattcccggttggggttaccaaccgggactaaagatcatctttagtcctctttagtcccggttggtaacaccaactgggaataaagatgatctttagtcccggttgtctataagtcagaccatgtcaggcggctaggatctttagtcccggttggtaacaccaaccgggactaaagatctaactttattcccggttggagttactaaccgggaataaaaatcaacacgtactatataatccctattacttatcctcttttcccgtccacacaacgaactctttctctatctcttttttcctctctaactccctatccttattatttcttctaccttcttccttagttcttcttcttccttagcccgcttggatcggagcgagagaggccagccacttggagcgagagcaggccgagcggcagccggcgcggcggcgcggagggacgggcggcggtggccggccggcgcggaggggaagccggcgcgcagcagcgcggagggccgcggcggcggcgcgggggccggccggcgctgaggggaggcggcatggaggcgggcagcgccgcggcggcggcgcggcgtcgggcagcgccgcgggggccagccggcgcggaggggaggcggcacggcggcgcggcagcaggcgggcggcgcgatggcaggcgggcggcgcggcggtggccggccggccggcgtggaggctaggcggcagcggccggccggctcctctgttgtttttttttttaagaatttgtgatttattgcagcatcatgtgatgaatttgatttgtatgtgatgtgaacttgtgatgtatttgtgatgaattttgtagaaacttgtgatgtaatttgatttgtgtgtaattttttttaggatttgtgatgtatttgatttgtgatgtaattttttagaactttaaaatttgtaatgtggacttaggatcttacttcgatttgggatatgcataccacctatattagggagaaaataaataaaggatatgcataccacccagattcggaagaaaataaaaaaggaaaaaaaaacctggctatcctctttagtcccggttggtaacaacaaccgggactaaagataccctatctttagtcctggttggtgttacgaaccgggactaaagataccccatctttagtctccgattgctactcctggttgaaaacccgggactaaagggggttcccaaccgggagtaaaaagggtttttctacctgtgattgtccgtatgaaaaaaaaagaagcttcaaaagaaagaaaggaaggaagacaacaagatcaggaaggtagaactgtactacagctagcaaatggatttctgaaggaggtcacacgcaacaaaggtcttgttaaaatcagtttgattttaagaaatagcttgtcagaagtcggtttctaataatttggagaagttgatattcagttcattttatgatttctgtaactaaagcttctcaaaatctgaacgaacaacataatcgtttaatttgaggagaagttgtagctatctatgagaatctcgtcaaacatacgcagggtaccatcggtaagactacaacatttagggcatctacaatgcaagacacccatatagtgtcctcactaactgaatacacccatatggacattcgtctcacaatggaggccacaactagatgggtttctcaaaatctatgggtatccctaccaaaaagtcaccgcattaaatttcctcatctaccctcctcggcaactcctccctctctctcgtcgctcccctttctcccaatctcacgcgtcgagcccctccccaaccgccgccgcgcctccctcctcgccctccccagcaaccgccgctgcgcctccctcctctcccttcccagctgctaccaccgctgccgctttctcccgcgagatttggatgtggggagccacggtgctgcctcctactcccagcccagcgcgtcggcggctcggcgagcaacgcgcggatccgtcgtcgccgccggcatcgtctccaggtcatcgccggcttcgtctccctctccctctcgccgccaactctcacctctctctccctccctctctctctctctccctcgccgccgccgctggcctctctctcccgtcaccggcggccgtgagggcgatgagtgagaggggcgaggggtggaaggggaaattttttgtgggaacggtgtccacaagccacgctcgcgtccaacgtgccccctcggctgcgtt

SEQ ID NO: 27035 - DNA, 5039 bp, Oryza sativa
  unsure (1)..(5039): unsure at all n locations
gggggggggcggacggaaaggctaacgaacgttgctaggggcacggatcgaagctacgcattggtgatggccttatcggttttgtttagggaaaccataaccctactgttttagtaagatgacaaagaatcagttggtctacttctctactactagtggagagtggagtgtaggcagctgcggcgtggtgggggcggtgtgtttgggggtagtggtgggcgcccgccactggtggtgtgtgcctccggcaagccggcagtcacgtgaacgtcaattccatccactcactgccccaccccaccctccctcacatgcgttgccacgctcatctctattgctactactgctaccaacattgttcgacagaaaacgaaatattttcaagtagtaatatcttttggaacaaaaggaatttcgcaaaaacgatagagaaatcaaaccaatctctactagtactcacaaacactggcgtgtatatgtagttgctgctggtcgttgcatgcacgtacgagctcgttcgttttgacttgggatgcatgattggtagcactagtacggtgtactccaaaaatagccgttgcattgcatgtccggattcgttatccagatctatacgattataactacttatcgatctcacttatatcacttggactttagctactaagtaggagtatcagtgtatcactcactctctcccggtcggataacacaaaaacctctctgttttctccgacacgtacgcccaatcatcaacacagctacaactatatctagctatccaaggaatctttcatgcatcctcttcttgtgtagctctagtccaactacagatcacaatgtcaagagaaaccaatcttaacttaacattataccctacccgtatctatctaaccacataccaccaaaaaaaacacctaaattctattccaatgatttcatactagacatttccaaaaactatcagccgctgactacctaatatttataactatactagtaataatttattttttgcagcagcaacagcgctagtactagtgcagtagggttgttaaaccactctcactcatggtggaagacggcaaaagtgaaaaggcgccttcactgcccaacgcacgtaaaagcaaatgtagcctttcccgaactccaacccaattccaactaaccacctacgctttccagttactctccagcctttccctacgtcaccgacacgtgggccccacccacgctctctccctcagttctgacaccaaaaaagccatggatgaattacgaggtcgtggtaaaaaaaaaaacattacagcgaacacctcacgggcattacatcgaacacctcgccgacgccggcggcggattaacgaagccagcggcggaggtcggtggtggatgacggagagaccacgtccccgccgaggctctccgcgcaggacgacgacacgttcgaccgctgctccgacgagaacctccccgccgcgctcttgaagctcgggctccgcaggctctgcgcgtacgcgccgtacgggtcgatggggacggggaacgacagccgcttcttcgctccgccgccgccgccgccgccgccgaatgacatcctgtcgcgctccggcgtcgccgggcgctgccgcggcgcgctctgggaacgcacccgcgccttggcggactccgtcgccgccatgtagttcggcaccgccgccgcgccgcccgacgacgcgtggtggcggtgcgagtgaaggctcggggtgtagctccctcccccgccgccgccgcgctccacgcgcgggcttgccgaccgcacctggatcggcggccgcgccttggatggcgacggcgtgaccggcgagtggtggtgcgcgcggtgcatcggcgacgacgacgcgtggtacgacgcgttgccgtgccggcgtggcgtggagtaggagaagggccgcgcggtgtcgatctccagcgtcttgacctggtcgcggtggtcggtggacgcgcgcccaggcgccgccgctgcggaggcgcggacggtgctcctgctggtgtcgaacgacgcgcgcgacgccatccacctctccgcccacctcggctgcccatcgacgtccatctcctccaccgacggcgccgggttcctccaaatctaccacattacaccaccaccaatgaaatcgaccacgaacaccactcgtttgcggaaatgacaggaagagaaactgtcatattacttgatgggagaaggcgtaggagagcgccctctcacgcttgagcgcggcgtccttcctcgtctgcagcatcgcctggatctcctctatcgtccgcggccggtcgtcccagtcgtcgccggcggcgaagctgctgccgtctcgcgaccgctcctgcaaacaaacaaaccaatgagaagcttgcaatgtgaggacgaggacggggcaaagaaagtgggaggagaagtggaactgacgatggagcggcggtcggcagcggcgaagtcgtgggtgtacttggaatcccagaaggtggaggtgtcgacgctgtaggaggacttgctgctgccgcatggcgcggcggaggcggcggcggcggacaaggagatggagtcctgggagaggcgcatccgctggtcgcggacgcgggcctggacgcgcaccagcgcctgcatgcagcggagcgtcatgttggcctgcttccgcacgttgtggccgcgcaccagcgcctgcagcttcacgagccccttgagcgcccggagcgcgcgccgcgccaggtacccgcggaacgcggtctggaccacgatggcggcgtagtgctcgcggacgaagctggagctcggacgcgtcagccggaccacctccgccgccgcctgcgccgtcgccaccgccgcctccgcggtcgccgccgtcgccacggcgagcgcgatggcgtgccgctgctcctccgtcacggccgccgccctcgattgctgctgctgctgctgtggcggcggcggtgtcggaggcgcgggagacggcgacgaggacttcctgaagagccatctgcggcgctccctcttgccctggacagagagaagaggagagaagtgagcgaagagaaggtgttcgacgaaatgcgagtaggcgggtggtggcggaccttgtcgtcgtcggtgtcgtcgcggaggcgggcggccttgttgggggagtcgtccttagagggggagcggaaggcgcgcttgacggcggtgagccaggaggaggtggtgccggccttcttccccatcaatggcggccacgggcattgacgtacgggaggtgtcgcaacgggcggcacgaggtgaggtgtatgagtattattgcagctggggtagcagtgacagtggctctcatggctcacgcgctgctgccgcgccttttatgtggtggaggagccattaaagtaaggttngntggggggnagggtggagaaagtnagagngagagagtgggggagggagaagaagaaagggtaaagggggggngggaggggggggccanggttgtaaaaacaatnnnnnnnnnggggggggggagtgagtgggtgaacgttgcgttgccttccattattccgttcgtccggtatgatgattcatgaaccgctgcgcacctgcaatctctgcatctcatcctgatgatgtgatttcaagtttcaatcgctttctctcatttatgtttggttcacatcaaaattaatagtttggtattaaaaatttacgtgtgtagaaaaattttgatgcgatagaaaagttaaaagtttaaataattaagccctaggacactaggaagctggctagggctgcctagggatggagaagtggaaggcccgtgaagtggtgaaccctcagaccgttcacaatgcaggtactcgtagtgatacctaaggtagtgtttggttgcaaggatgggatgggacgaacccacttttaaaggtgttcggtttaagggtggatgggatgggttggtccctggaaaggaataatcctctcagatccgggaccaaccgatccgccaaaaactggcggacaaactcgtcccacctgggacgagagacggggtcaccgcgccatccaccaccttcgcgagctccgccgggcgcccacgagcgtcgccgcttggtccacacccgccgccacctccgcacgtccttctccgccgccgccgcctccttgagcgccgccgcctctgcctcgtccgcgaccgccgccgcctccatgagcgccgccgcttgcccgcgaccaccacctccgcgcgtccacgagcgccgcctcgcctccgcggccgccgcagccgcctccacgagctccgccgctcgtccgcgaccactacctctgcgagcaccgccgccacctccgcgcgtccacgagcgccgcctcgcctccacggccgccgccgccgcctccacgagtgccgccgctcatccgcgaccgccacctccgctagcaccgccgccgctccactcagatccagccgccgcctcgcctccgcgcccggcgcctcctccgcttcgtccatgactgccgccacctccacgagcaccgcgaccgccatctccacaaactccgccacctctgcctcgtctacgaccgtcgccgccaccttcgcaagcgccgccgccggtcctctcagatccgggcgccgccgagtgcctccgcccctagacggcactaacggtgagtacaaatccatccatcccatcccacctcaatctcttctaccaaacaaaaaactataaccatcccataccataaaccaaacagacaactggaaccatcccatcccacaaaactaggataggtctgacccatcccacttcgtccccaaaccaaacactacctaagagaaacggtgagccggatcccaagttaatcgctcgaaccttcacgtgaggacgcgcgcgcacgccctacctgcgcgagacactcctccgtgcctatgttggctaggtcgcctcctcacgtttaattacatctggtcgtcccctcatgtttcatctggtccggctagccctattcagatgttgccatgatcgagtttgatactagggtt

SEQ ID NO: 27036 - DNA, 4560 bp, Oryza sativa
atatacccttttttaaaaattgtcttcataaaactgcccacgcatctgcgcgggctttctttctagttaattaaataagtatattaattacaaattaattgagcttgtaattgattagtttttagttagctggccaaaatacagtgatatatataaatgggttaggtcatgtgcttagtctcgggtgtgtggcatatatttatgcaaacgacgtctttttgatcaaaactactaacgaccctatcgtttggctgattataagcataagcgaaataatatatttacaaattacaaataacttgtgattaaaatttttatatacgtgtaattaacgatattaaagcaaaggctgaaaaataaaatacgacgaaaaaaaatctcaaaataaacgtaactccaaattaaatttaaagttaaaaatttaaattttggctgataagcataatctaagcgaaaagatgggggccgtaagaccatagaagaggacctgcgagctagagcacaagaaatattaaacaaacaagagacaacacttcctctcttttctcttttctgatcatctcttttcaactttttcgatccaattccatcattcaaacagaaaggaatggctcacaaaggacgccttttatgaccgagatcgaaggaaaaagtgcttttaatttctatctgacgcttatatgttaaaaagaacaaataatgtcaccattatagtcagtgaggtgtgacttagaacatatataaaaggccagcatgttttcctcgagggcacatacatacgacagcgccagttaagtgcactaacgattaattatgcgctctaaattaaattaattaatcttgagaatatttttattttgcccttcttttatgaggcgatccatatatatatatcacagatctatagatggatgtgaatcgatgttcattgtgtctttcttttttgtgataatttttagtttattacctatagtgtcatcagggatatttcattatactagttattgccctgaaactcttgtgcaacagttgcaggttaactatgggccagtagccagcatttgaatttcttttttggaatgcgcaaaaggtttgcgaatccgtatattatatctgagttacacaacgcaaaaggctatacatgctcttgtcgggtacatggtagagatcttaggaagagtaagcggaaaaaaaaaagaaaaaaaaagctaaatagtccgtccacaaagaaatggttgatgttatcacctttttggctttttcacggtcttctgggtatgatttcgcccacaattttatattcaaataagtttataaaatctaataagtttatgagattaaaagggcattttccaagaaaaatatatacacatcaatttttttgaagtttaaatctaaatatctgaaaagtaattggtagtaaaagttttaaagtttacctgaagacaggcacccggatttaaagttaatcatatccgttagatttaagtgcctcaaaatttgtaaattttaatttatctaaaatgcacctttctaagcctaaaattacattgttatgtgatgtacaattttagtccatgttaactgtaattttgctttcatatctcatctatggttttactttgtgttataagattaatttttttgcatgtgacgccagtctctcctcacgtctcacgtcgcttgctcttccccatgtttttagccgacgttactttctccatctcaaaaaaaaaaaaaactcaacctcatactatgatgtgatacatcttattacaatgaatctagacatactttacgtctagatttattgtcctagtactatgttgtctttttttataaaaagcgttgttatgcaaaacttttttcaattccatctcttctctctcctgcatatcaccaaattggcttaaatggcaataaaggtacccggataataatacccatggtatatctaataggatctatccacaccctacataattaaaaagactagcttaatacatcatcagtacgctctaccttttaagttatgatccgcataatcaattatcactatcagattaaatccaccaatgacatcatcaaaccacgtcatccttattacataaattgcatcattaattgcatctcctagagaaagaaatgtaaagaaagagcttcaaagaaggaaccgcctggggtgtttttcatgttttagtattttatttttactagaaaaaatacccgtgcattgcacggataatgattttttaagtgatatattaaaagaataagagctaagcaataaatagaaatattaggatcactatacattataattgaaaaggataatgaaaattgtaacactgggatcgctatacatagattataattaaaaaaaagttaatgaaaatattttccgggttttgggccgaaagctttcctttcttttcagccctaggccagtccactacctctctctgtttggcatgcttcccttcgagccagggacaagtagagccgtaagccccgctcgcaccgtccaataccatcttcaaccttccgaagatagtcccgtacccgtacagttgccagagcaaatcttctcatcaaattcgatcgaatctttctcgatcacttaaaattggttgaggattttttatccactcgttctgctctttcctttttcccaataaggatgaagcaaacgatgatcaattagtaattaatatacaagaaacaaacgatgatcagtctcctctctctcccctcccccattaattcttcctatccatggcagccggggtggccggtctcagagcatctataatgtttgaactagaagatgcaaaaaaaaaaaaagtcatcttctgtagcaaagattaaggtctcaactcttaatccccaaacatagcaaaattagggcttttcccttgagagacttgagcggagtgatggagcggcagcactaggcggatctggcacgtactggtaaatctcgagcaaagcgctggccatgaattctcctcccaaacacatgatttgttaaaaatgttttatttttcacgaacacgtaaaagaattgcacgttaatacattagaggaaatattaaaaatgttcggattttcatgcatcggaattattctcctcccaaacacattatttgttaaaattgttcggatttccgtgcattgaaaatcagcgcatgcactatatacaatttaaatatagatatacgtacatttaaaaatggagagagtagtataaatttctactcccatatttcaatataattgtcgttttaggattggtgagctattagctgaagatgaaaattactaagttatcctcaaattattactagtaccagttgcatgtggtcatttcaacaagagaattaacacaaacagcactagccacacaagaaatattttaagcatagaattaagtagtgtcacatagaacagtcccaacccatagtgtccataagtagtgtctatatagtgccatgtcaataagacatcataatagaaactacactcgacagcccatgatttcttaaagtgggccattaataaatacatcatctctcttctctaccaatcatatttattcttcatctattatgaagacattattctatcctaatgtaaaacttgatagtatctagtgcataggttctcatgttgaagctgtgtcttgcatgagacccagtttcttcttggcttcactctctcttaattaatatagtaccacattagcttaaagttctattttggcatggtattaatggcattaaaccctattctaaatgaagggtgggaactgccttattccaagtaatactagtgctactttactgtcaaaacgtacaaaacgtcaagtgctcagagacaaatgttaggggggtacgtaaaacgtcgaagtaatctgggacagtatgtgccctccatggcactattgcatatgcatgcatctgttgggactttatgatcgaactgcaattaatctatcagttgctatttgattctgcgttgcagggtgtgaatttaattaattaaggtgcagatcgagacgacagtgtggtcatctctgttcgatctgatgcgatgcgatgcgatgcatgggcatcaggagcaacatgccacatgtactgctattgcaactctgccaacggtagctggcggtgaaccgatcaatgcatgccaggtacatagtactccctccatcctataatatagtaatctagtaccggatgtgatattttatagtataataaatctggacacctttctgtccagattcgttatactataaaatgtctcatccggtactaagttactatattatgagacggagggagtacgtcctttaattttggttgtcaactcaacgtagtactagctatgatcatttcagatcgatcgatgcagatggagtgccagttatcgatcgatatcacttaattatgctaatcacaatgcataatatatagtactttctagctgatagcattttctctcttgcttgttgcatcgcttgcaagtgttgcttaataataattagtttttgataat

SEQ ID NO: 27037 - DNA, 30408 bp, Oryza sativa
gtatgctttcaacactctaactgtgccttctctaacggtacaaggcctccgtaagaacggagaaatttcagagtaatttcagagatatcatacatcgatcgagcaaataattgatcgataacttggctggccgattaattagcagcacctttaagctcaagagagagaaagagagtcaagactataccatatactccctccgtcccatgatataaaggattttgagtctttgttatcctatttgaccactcttcttattcaaaaaattttggaattattatttttttttgatttactttattatccaaagtactttaaagtacaacttttcattttttatatttgcataaattttttgaataagacgagtgatcaaacactacaatcaaaaactcaaaatcccttatattatgggacagatggagtattgtactactacctccatcccaaaatgtttgacgccgttgacttttaaaaaaatatttgaccgttcgtcttattcaaaaaatttaagtaattgttaattctttttctatcatttgatttattgttaaatatacttttatgtatacatatagttttacacatatcacaaaagtttttgaataaaacaaatggtcaaacatgtttaaaaaagtcaacggtgtcaaacatctagagaaggagggagtatatgcttcaacgctctaattgcctctccaacgggacaaggcctcctttagaacggaaaaatttccaagtaatttcggagatactgatcatataaattcaatggaaaatttatctgtaagatgcagagaaatgacaggttatatttctctaacaccaaagacacaaaagcacttctgaaaggctctgatcagttaagctacgatcataaagtgaggtaaacaaaacagagcaaaacaacttagaaatactccctccgtctctaaatacaagatattttggttagatgtgacacattctagtacaacgaatctgaatataaagtctatctaaattcgttgtactgggataagtcacatctaaccaaaatcccttatatttagagaagagagagtaatttgtaaaagcaaaggctgaatcatagacatgattaaaatagaccctaaaattaatctaccatgaagttttaaaatttaaattttgcaatgacacaagcggatgaaagaaagaaaaaacagagatattaaatactgtgcaatatggagcaacacgtgtggcagataggcgatcacgtcggcggatcgtcggagcacccaaccaacacaaatccgtggtgcaccccacagtgggggcacaaagaaattaacctaccactcgtaggatttgctcctaaaagccatggaaacacacacataatataatcagattaaaattaattaaccaactactagaaaaactagctatatatagctaggtgactatatcatcatcattatcatcagcttctgtttctcaatcgatatcgaaatgtgacaacctagatgacagtacatatatgcatccatccattagccatgcatgcatcatcctcttgagtttctcctttgtgcattgacttgggagagacagagctaaaaagtctaactaaaaagctatctattgatctatagatgcagatagagggtgtcacctgatcattttccctgctcctccctgtcccagcactgcagtatcagcctatttaggcagttaagaaggtcaaatcagatatcctgcaagtcgtaataaattggcaccaaatccccttaattcaatgtgggttagttcaaatagtggtaataagttatccatcaatttttagaccagtatggaacttttacctctttgtgcaaaatttactcctgtatgagaagccaatgtgaagccagttttttttttcctttttggctcctgtatgagaagccaaagtatatatagtcatctgtagctaattgatgttaaatttactcaaccaaactgtagaaataatcaatgtggctatatattgtagcagtgcatatatggggtgttggtgtgtatgaattaattagtagggtatctattaaataaaagataaaggttttatgatatggtgtgggtgagaggggcatgaatcatgccagcaaaggtattgtattactgtgcagtatagtagtgttactgtatgtgtacaggtgaagccgctgtacatggaagaagccagcagacatgccatgctcaagctatgcaggctagtgacacgcatgctactactatatagtgtacttacctgcttttgatctgcttttgactcctgctatagtgctgtgaaggctatcccatctataaagcatttcatactgtcaccagaagcaacatgtttttctcacatgggaattttccttgttttatactccctccgtcaaaaaaaaaaagacaaaccctggtttccgtgcctaatgtttgaccgcccgtcttatttgaaaaaattatgaaaaaaattaaaaagataagtcacgcacaaagtattaatcatgttttatcatctaacaacaataaaaatacgaattataaaaaaatttcatataagacggacagtcaaagttggacacggaaacacagggttcgccttttttgggacagagggagtactctccttcacagatacttgttcaaacactatttatattgaactttgaccatttgtctttttctataaattttcttttataatacttagaaaattcagtattaccaaaatgttaatcctaaatataagtattaaactttcattcatgtatctttgtttaacaagctaactagaaactgtaggtttggtaatctactaaatttaaatcataatgtgctaagaatatagatcacccttatgcaggatttggggatcaccgaccgtctcttctagaaccggattggaagtagaatacaaagtccatcgaactgctccggtgatcatcggtgtagggaaagtagtcatggtagtggtgcggacgaagtggttgccgacttgatcccgaaggggtcactggcgatgaactgcaggatagcgtcgtgccatcgtccttcgaggcgccacctacactaacttagtcctttgaataccctccaacgcttaggtcaattttcccatccgaaactaaacaatgccaatcaaatcatcagtgacaagtattttgaaacggagaaagtattttatatgtctgtaaatatttttacaacattgacataaggtagcagagagtgaggaaaggagtcataaacagtgagaccatggacttattggaagtgccatacatgtgtggtggtacgtatgactacgaaagaaaaggaaagaaacaaaggaccggccagcctcatggtgaagcccaatctgagagtaacaatttttatttcaagtggattagagcagtttgtgtagatgggcttgcctagatttgcaggcaggcagccatacatatatgagtaaatttcactaaactacatatactctggtcaaattatcacaaaactacagatttaaggagatgtatcacaaaactacagatttagcactaaatttctcaaagaactacagatttaagatggagtatcacaaaactacagatttagtaacaaaattatcacaaaactacaggtttagtgtcaattcaatcacaaaacttatgcatttataactcaaatataacactagtgctaaggatttaaattccaatatatgtagttttgtgataactttgttattaaatctgtagttttgcgatactccaccttaaatctgtagttctctgagaaatttagtgttaaatctgtagttttgtgatacatctccttaaatctgtagttttgtgagaatttgactaaagtatttgtagttttgtgaaatttactctacatatattgattgggtcatagattttcagcccaaataatgaatgcttatcttggcaatttcattagtagtttggccagacaggttgggcttaagtttcagaaaacagaaagctgcttgggcttgcagcatctgggaatttttttagtgcagataaaggaaaaggtacaccgaaggtccctcaacttgtcatccagataaaaaaacgtcctcgaaccacaaaaccagatatgcggggtcccttaactatacaaaaccggtcacccgagatcctccagtggttttgaccctggttttagcctatgtggggtgtgggacccatgtgggccccacatgtcagcgtgccacgtcatcaccatccctctctttccctttgtcctctcaggcgacgcgatggtagcgacgacgcgggagcagggaaagaggaggccggcggggggacctcccatcccgacagccaacgcctcgctcttctttacctacgacgaggccacgcacctgctcacgccgccgacctcctctatttgtgtttggcgagtggtgtttgatcgacgtcggtgtttggtggatgccgtgcaggccgagcggatgcgcgcggggctggaggaagcgcagcgacggcacgtccgggcgttggtggcggctgtggcgtgcgccacgatggggagggtgcgtgcggcggaggccaagctggatcgcgcacgctgccacaactcggagctggaggagaagctccgccagattagtgcggaggggcaggcgtggatgggcgtcgccaagagccatgaggccgtcgccgctggcctccgcgccacgctcgactagctcctccagtccccctgtgccgtgactgccgtcgccgccgccacgaggaagggcgacgccaaggacgcgcagtcgtgctgcttcaagaccccaggcggcgccgccgccgccactgccgccgacgcggtgtccggggcgacgtcgtgcaaggcctgccatgtcacggaggcatccgtgccgctgctcccatgcctatgcgacgcctgcgaggccgccgccgccgcttgccccgtctgcaccgccaccaagaacgcctctgtccatgtcctcctctcctgaagtcactcacacgtgctacaccagccagccactgcatggagtaggagattttgatagcgcaacagctatggccagaccgaaaccgggcatccgtcagccaactccggtgtcaagcaaaaagctaacaacaatcatcctgtcccaagttacatggaaattcatgctagggaagccacggttctgtgcatctgtgcatcagtgatctccgggccatgcgagttttgtcagtggaaacaacagttttcggtgcggtggattgaatggttgattgccaatctcatctgccgcaggtaccattgcttcaaatatttggcagcccaggtcggcacgtatgccgccccgtctccccgccggccgctgctcgtcagttgtcctccccatcggctgccgcccgtcccggcacccgttctccccgccggtccccacctgttgacgatgtcccagcgccactccccatccgctggccaccgcgcgctcacccgcctgccgccactaccgctccgcgcctccgccgtccgccgctcagcctccctcgccgcccggtcgtctgctccctacccgtcggccggcctgcaagagaagagtgcgagagagagaggggggagagagagagagaggggaccaggggaggaagggagagaagaataggggaaaggggagttgacgtggaacgctgacatgtggagcccacgtgggtcccacgcgccatgtaggctaaaactgagtcaaaaccaccgaaagatcttgggtgactggttttgtatagttaaggaacctcgcatatctgtttttgcggtttgaggatgttttttatcccgatggcaagttgagggaccttcggtgtactttttccgcagataaacaacaggggatttacatgatgggcctccatttgcaagcccacaaaaatctagtctcaaattaattgctctcactcacacagagagacagtgaggcctcagacctcagttttactcactccgtactaaaataagttaatctcgtacaagagaatgtgtcacatacactagattcaaaacatacattggtaaatgagcagaagcaaaagggtactttaaataaaattgcctggataagaattgggctaagctcaaggaaaaacacgatcgtcatatgctagctctctcctcaactgcatacatatattgacatttactccctccatcccaaaatgtttgacgccgttgacttttttaaaaatatttgaccgttcgtcttattcaaaaaatttaagtaattattaattcttttcctatcatttgatttattgttaaatatacttttatgtatacatatagttttacacatttcacaaaagttttgaataagacgaacggtcaaatatgttttagaaagtcaacggcatcaaacatttagggaaggagtgagtactagataatttgtttgtatgtgttgtagattaatatgccaagtaattgtagtgattaaatactagccagcatcactacgaccaagaggattgtatcaaaataaatgtgaaagatatgcagcaaatcttcaataatttcaggacttatcaaataaaaaatccaccatttatcaggtcattctactaaaatctacgattgcaaaaaatcgtaagacttcattacttgtatttatttgccactccatacatagttcacactacagcttcagcattgaattctcacgtcatatacagcagtgaaatttgaaaatatcgatctgaaccgatgtttaatacaaggttttgagaaaaataaacaagcggaataagtttgttgccggctgattccctcatgaaagtccacctgaaatttaggaaaacaccaaaagtgtggcgatatatatagtcatgggtaatgtgtttgaaaatttcatccaccaggaatttgcactcgaccttcgtatctttgattatgtgtcttacatgtgttccgcaggtgtgtgagtgtcatacatgtttattttcttgtaatgaaaaaataagacaatgtaggattcaatttccaacaaaaaggtaacattattcatagatttgccaaattcaagtgtttttctttttttttaaaaaaaaaggcagatgtgctactaccaaacggatacgcatatgcacgataagcttgcccggtagtacgactcactaattcaatggtaattttgtcgccaactaagctgcaaccctgtacattgctcatttgtcctatctatctttacacacaaatcgcttactataactacaaattaattatatttgcaattgagcatcggttgcaaccctttacctaactcatttcccctacgccggcaaggcccacggcgtccacttcgagatgaagggaaatggacaattttaaattcaaatatagtacacaattgcaaatgtaaatatttcaaacgaaaactcatatttgaaaatgcgatcgattggtataactaaaacaaaatgcatgtccccgtttacaattccaaaactgcccaacaacttggaccgaattattcaacaaaaattattaaacaaaaatgtttagaccgatcgagctttttttttcccacaagtttgaataaattatgagagagaatttggcgaaatcaggctaaccaaacatgtttagcgtgacagacttctcctccctccggttcatgatcaacgagccgagcgcgatgagatggcttgcaaacttgatcccttgctcaagcggtgccaccatggctactggggcgcggaacaaagagcctacacgagccaactccggcagcagctccgccgaggtggccatccttactgccttggaccacctgagcacagcgagcctgactgctctgacgcggaacatgagcttcttgacatcggcgagcctcatggcaccaccaaactcctcgcttagcatctggagagtcacctcaccgagccgccccttgagacggaggtacctcctcacgacacgggcagtgaagtggtcctcattcggtgcagaaacatcgccgtcgctagtgctatcgacggtgacctcatggcgctcgcctgtgatggggtggacggcaagcacgttaactatgcagccatgtcgttggtggacgtcccgagcatccttgagcagttgctcatagtcctctttgaatggcttgatgctcttgacaatcttcaccatggcgtcctttttcccggactatttcatctcaaaaaacaaataaataaattagctaaaaaaggttattatgagatgcacattagttgcaactgaaataagtgtttttgctcattacttacgtttctaactagtgacatgtacacatatattctctcaataaaaaaatggacacatatattttgcataagtgttctactcattacttactttgctaactagtggcatgtacacatctgttctctcaataaaaaaaattggactcatatatttcataaggatgcaaatggattggccgtactttaccaattgtcatgtcaatcactacattagtaataatattataataaagaccttggtatagtgaccagcaatttagcagtttttctacttgctattattattctagaataaaatcatagatctgcggattgcatccaagaatcgatcaacttctcactagccatgaaaagaatattttaactcgtaacgactccacagtgcctcttgccagctttgtttcaaaattaggtaaagctatatatatatatatatatatatatatatatatatatatatagacacacacacaattgcatgaatgatgttcaaggaagcgccagtaccaatctacgctattgatgcactgacaaatgtttagagacaattgagaaactacattacgataaaagtttgagggcgaacatacctagcgatgtgaggagagatggaggagccgtaggtcgaagattttacaaggcaagatcaataaaaaagaattgacaatgcaatgagttgtgaggagagtggaagagaatttatagcgagggagaatagaaaagggttgacgcaccaccgaaaaagacaaaactagttaattgaatttaaaatcaaatctaattcgaaaaaaaatcaaaaccatttaatatgatttaaaatcaaatccgattcaaatctgatatttaaatatacaatatggaatagttttaattttcatacatatagataatgtgatatcctgagcaccgcggtaccacacaagggttggggtaagatggagaaaaggctaaacgacttcataatatcatatctacttctcatagcaatggacggtggatgaacatgttacagaaatggtccagagctagagaaacataatagaaaactaattctatgacattcgtgccacgatagtcaatggctcccgtgacatgaagtggatgtggaaatggagccagatctagaacaatacgtccggctcaaatgccaagggttgtccttcctcggcacaaccagcgacggtcgtgccatcgtctttggcaacatcgtgccaccaacatggaccatgggagataccttccaaggcaatggccaattacatattacagtacagccagtacacaattacaaatgtaatcattccaataaatttcatagttgaaaatgtgatcaattatttgtaataactaagatgtaatcactgtctccgcttgcaattctaaaaccgtccattaacttggaccgaattattcaacaaaaatttattaaaacaaaaatgtttcacccaatcgagcattagagctatgatgaatttccctcaagttcgacgaaacaatgcgataaaattttgtgaaatcaggctaaccaaacatggttagcataacattcttctcctccctccagtattcatgattgacaagccaagtgtgccaagatggcttgaaaacatgaccccttgctcacgtggcgcctccatggccgccagaactcggaagaaagagcctaggcaagccaactcaggcacagcttccgccacggtggccatctttgactgccctgacacatagcttcttgatatcagtgagcctcatggtacttcgtcgagctcctcacttagcaactggagagtcacctcaccaagctgcgccttgaggaagaggaacctcctcactatatgggtggtgaagtggtcatctctattggcgctgacacataatagttgttggtgttgtcgacgataacctcgtggcacttgccggtgatggggtggatggcaagcgcgttgactatgcagccggttcgctggggaatgtcttgggcatccttgagcagctgctcatagtcctctttgaatgacttactgctctaaacggtcttatgtgcgcattaaatgtaacagagcactaacaattttactcattattattcttactaatcatgtatgtatgtatgtatgcatctcatgtataacacataatccatcatctaaaaaaatgtatagcacataaattggtacttttattctgattgcgaaaaaatagactaccaattcgattcaccaataactatactagaagggagtgtataacacattatttattatcttaaaaaaatgtatagcacataaagagatactttttattttgattaaaaaggaatgtatgacacataatccactatatttaaaaaaaatgtgtagcacataaagaaatatcttttattctaacaagaaaaaataatagattgccaattcaattcaccaataattatcctcagtatgacaactagagatatagtaggctttcttgttgtagtcatttttttcaagctatttttttctcattgctctgcccgattgcatggaaataatcattgttgaattgattgactaatttggccggtaattaccatgaaccaataataaatagcacggcggtgcgtgcttggccaacgtatttctgaaaatgggtcatgttataactcgttcttcattacttggaataaataagttttagttttaggtattctctaattaatccgaagtatcccctaaaatgctatatatggtcctggatatgaatggtaaatttgcaaacgactttcgaatggtatttagcttggcgatctgactgtcgaatgatttttacacttccgttggctaattaatccgaattatctcacctatgaatggaaatttgctaaacgtttaaattttaaaattgacaatttaaccatgtttatgccattagtgaacataaagatgcacgggctactgatggattaacggaaccaaaggttgtcaactctcatttcctttactagtaacaaaaaggcatgttaatttggattggtgctaatatgtgccatatcaatattttgctagtttcaatagtaatttattggcatttggattgaagccatttttttaccaagctataggtctatagctagtagcaaatctacactcctaggtagtgccaaaacttctgcttttggcactaccaatattttggtgggggcctcaaaccaacaagcccaaatagccaaataattttgctaaaaacataccaccatattttcaatagttgattttagtaaattatgttctttgtcattattgctatcttctcttatatgtatgtaaatatgtttatatctctgatatcttttctttcaaatatgtaatgaattatttttatcctaattctcccttgcatagtgtgtattggaatatgtagtgcgcattgcaaatgtttgctatatatttacattgtaaaagaaatataacagctttgtaatgcaaaatgcaacgtagctacaaatatagttagtccccaagctacctcaacaacaacaaaaagggatttccacgcttgaatatacttatatactaaaacgttgaactgggctttaaataatttgggtgaaactacttatgcatcccaccctcttcaaactgcagcgcaggacaacgatatacatagaccgagttgaaacaaaacaggttgaacacttagtaaatttgcagaagaagtggaatttgttttgaaacaaaacaggttgaacgctttgtaaatttgcacaagaagtggaattcgttttttctgcagcagagctagctttgcatgcataatggaacgtactgtaggcgcaatgcaatcatggattagctctttgtgtgtcttcgtcgaattttggccgaagcttgtagtacagttttaaggctcccactaataaggtctgatcctggacatagttaaatttatagactgtaaattttaaaattgacataaatatttgagaaagattatttttttagaactacacagtgctttttttttcaattgcggtagaccatgctaaaattttccaatatatattatcgaacgttgtcgttcactacagacctacaagagaatatataagggccaattccctatatgcccatgtaatttcacccaatcccttctacgcccctgaaatttgtttgatctcttatatacccctgagtttttatttggatcccttacatacccattccgttagttgaccattagtttgaccgttagttattgtagaaattactttattgtccttgttatattgttaaaagctagaaatgttttatgtgtaaattatttgagttgtgaaaaccaataaggaataaattactaaatatttgtgatgaatttttgaaaataaaacattatttcattaaaataaaaaaagatttattgtaaaaaaaagttctgcataagatttgaaaattacttttcaacaaatatttagtgaaaaaagattcgttgtgaaaaaacaaaggggatataattagtttatcacaaattagaaaacaaatttaaaatttttaaataaatttcagatcaaatttgatgaatttcgtatatcttcccaaaaatttaaacctaaataacatttagtttttgctcttaattttctagtgaaactaatgtatggatttaatcataatttttaaaaaataaaaaataataagttttattttttaagttgggcattaaatgattatattgcttgtattttgtataagtttatttttcatatgaaaatttattgggtaggtaccacacatatgtataggatgggtaatatagtcattttaaaatatttaacggtcaactaatggtcaactaacggagatgggtatagaggagatcaaaatgaaaactcaggggtatataagggataatgtcaaattcaggggtattgaagggattgagtaaattttcaggggtatatagggaattttctcaatatataatgggccaacgaaatcgagggctctagtttcctctgacaaataggacgcgtacttagctaaactaggaaggtagcccgcgcagttgcgcgtgcactttatttgatattgcttgaacttttattacgtactttttataattgattgtttaagggttctacttttttctttaaaaaaatctccaaagccaatattgtttaataaacatgctctatttgcacaataaagctagtgccctctaattggttaggcttttgttgcatacttatcgcagtgtaatcatctaagaactcaaaaatgatgcaatgctcttatgctaatggttgttgtagtttaagtgaaagataagaacctatttcttctatgaattttataaggtttttatataattagttctctttactccctattaagttttgtattttctattttattttatataatattattttcagctcaaattttgtgagatgataggatagtgacagagcatgataccttatatgtcaacctattttaaaaatatgaatcaacttttgtgtaaacatctaatactaaaataggttatcgtagtttatttattcatggattgaggggatccaaaactatgttaaatacatattcttgtagagtccaattctattgtgcagtgttggagacaacccatatgggataatttcatgcaagtgtgcgaggctagcgagaacacaattggatggcaaaatataacaacgaacatatcattatttttggaatgccattttttatgattgttcccatgatttcattttttataaaatttatagttaaatattaggaattatgtaataaaaagtaactaacccacaaatattatgttttgctagcctgcattgggcatgaattaagtacaattagattttataatcgtttatctgaaacctataatgtctatccacttgtcataattatcacatattctataaagttgtaaaagaccctagaaaatatgtgtttaaagatcagataaattatttgaaagctttttgcatttctagcatggaatttgtttggttactatacaattcacttgcaccttctaccgaatatgccatatgatgacaaaaagtaaggcctagctggacttaataggactcctcttatccttttttgatgcattattcttatctcattaagactggtctatcactctctccatggttggctttctctctaattatagtccgcgcaagaaaatttttgggttccaaagtctaaacaaatacagtgtaaaattcgtctatgtctagtagacgacaattgtttggtgataatggttttcttgcacctccaagtcatcatgttacatggttgtaaaacttgtatagatgttgagacatggaggttgccatatgatccattgcagtggtgtttacagtttcgatcaagtttagttaatctttcttttcatgtctcggtgtatcgtaacatataaatggattccaaacttaattcttcaagttaatatatgaacagcgacatgtttatagcaagttaatgtccatatatagggatgacaagatatttttaatggtttgtgcacagagaaaacatacatttgttttcttacccggaaggtatggaatagaagcacatagccaccggccgtatatctatgtaccatatactaaaagaccgttaaataccttctaataaagtcatttaaatggtaccatagaatatattatagagcacttacgtggaagatcgtttggcactcttagattatttattatttgagcacattttagaaaattcacgaagtaattggattgtttcctctaactgttagcgcttcatttttcaatcaatcacaaataaagagatagaattataattgttgtggtagctagagccaaaagctgacctaacccaaatatatcattctggatatgtattggcagtgaaaacataaattaaaccaaatatgttattctggatatgtattggtagtgaaaacatatattaaacaacgattgtgccaatataaagcccaaggactattgaatgtatgtacatacgtacaccatcgccaaaccatccaccccctccgccctcattcacgccctccccctcctattgtctctcatgttttcatcatcttttagttaggagcaataattttattataatcgtttaaaataaatagctattttttatcgccttatgtcgttggacccacattaacaatatttcaacttctaaaataaatatgttattttaggtttatattcttgtcgacatttgatgtcgcaattctggtatttgcatagtatgaggatcgtcggtgctaggatatacgtgagactgaggtaaaagagatggggacgaggatttttatacaggttcgggcccctaaattatcaggtaataaccctacatcctgttggccggagccgaagttgcttttattcaccataatcacaccagtacaatatgtggggtagcctatctaactgttgtcgatatggcggtctgacgatctgactcgtagtcgacaacagggtagccttcctcctcgagctcgcacccgacgaaattagagacagtgctagatccctgcggccggcctctgaaggtaccggatagggtcgatccaggcgtatctctgatgtcaatatccggcggcttgtcttgtcgtatgtaggcttctatgttgattgtgttgggagttgattgtctcgtggtgggtgtgtgtccccctgtccttctaggggagcttgtatttatacccataggtgtccccttgtccaagtagaactagggaaaccaatatggatacaatccgagtagttcttgtcgtttccatgtagaactctggttgtctttccttatccggaactccctcctatatccgtaggttgtttccgtataggacatggtatgtggtgggtcctgccgagatttagtcaactactattaggtatgtggtatccataaccctgacaattctgacttttttcatatcatgtaaacaattattaaaaaatgtgaaaaaaaaaccaatgatatatattttactggttgaaaatatttttggtgaattttcttcccacctatgtataatgtaggctttattactattgaaataccaaccaaatagcttcaaaaaattccaaaatgatttgagaatgttaatctcacacgaattaaaataaattggatctacttttaaaaaacacaactaaattacgtggtttgaatttttacatagttcaaattacctttgttaattgttaagtaatatttgataacataaagtatacagactgatgtgattatttttgaaaaattgttatggaattaattaatgcatgtcgtttgataacataaagtatatagactgagaaagtatatagactgaggtgattatttttgaaaaattgttatgaaattaattaatgcatgtcgatgtcatctgccacaatgtattttgtgctaaaatatagccaacataattacgtatttttattagtaagatgaataaagtcaatagcaaaaaatattaatataaaaatactgtaggggtatcctaggtaaagaaaataaaagtgaataggaagtgaaaaggggggtggggtacgtactacctacctacacacgtacgtgtgtgagggagggaggagtaggtacgtgtacctaggaagggaggagtatgtacgtgcagggagaggagaggaattataaacggttgttttcaatctaatctagtggtgtaaaataatggacccaccagtgtaaatgaaaatcgagggttggatgtttcccgtctattaaaaggacacgtggcggtttaagaacgtttgtaagggtgccacgtggcagtttaaaagcgtttgtaagggtgccacgtggcggcttaagaatgtttgtaggaagtttaatggacttttaatttataatagatagatagatagattgatagatagattaggccgtgccatcacagcaaaacagatggattttcgcacttgaatacaatgcaaaaactctgacctgttttgtgctttaacgaaagaaaaaaaaactgtacgtgcaattcaatgtatagccaagcccaacaaaacaaagttcccgtgaataataacatggagaaaattagcagcacttgtactacgttcgtggcagagagtattcatgcgtgcttcatgccaagctagctgctgcatccaactaacctatgtatatatctctcctcttatatatgtcgaatcagttcaggtaatgtttcaggaaataatctgctagtctcaaatcatcaatcgccgtctggctgaaagtagggtagaactattatactggtaaatcgtgaaggaaaatgcagctaagccaatctgcgaaggtgagtgagatttttggagaaaaacaaactaattatgccgtgcagggacggcctagtggatgttggtggcgcttcacggtggaggttccgcgacaaccctaatgccaggatctcgacgaccctaatgccagggtctgagaaaccgtcaatgtaatatagtaattgattagattagattagattagagtgtttcttgtccaatttctgctgacgctatagcctttccttatcgaacatctcctcgtgatgacaatatgctcactagtgaaaattcgcatgctttactagtgcgccttgaacattcgcatgctttattagtgcgcatttgtcctcaacatagattaactaacaaagtgtattaactaattggtgcgctacgagcatggtatcaccaacataccaaaatggtgtgagctaatgtatttattaattaattggattgataaaccatgtgataaattgtcctatgttttgatactgagggtaaatttcaaacattttaaattgacaaaaatttctctattttttctgaggactcagttacaaaaacaacggtaactacaccgactgggcttgccgatagtacgaaacagccaaggcaatccactctcgactaatctttactgtcgaaccaacttcagttgtcaccgaccaatcttctgatccttatgattgatagtcaccacccgcgtagcatagcagccatcatctaatcgccaatggctaagaccaaaagcaaaacaaaagagctagcatccatagttggtgaagcactaatcacatctattcgacagatcgacgctggagttttaatttgacaggaacattagaagagacttgaatttgttttgttagagagtttgcatgcatgaaaagataccgaacatgcagtgttgtgtgctagtactactagctaatatctatatagtggactggaaactatgtatgcagccatgccatgcccagcaaaaacaaagttcccgtgaataataacatggagaaagcaacactcgtactgtacatgatcagaagtattctcatgcaaatgcaattgcaaatttgaaatgcatcaatctgcatgaaactaattagcctatatatatcttctcgtatcttatcttctcttctctaatcgatcttctgtcgaatcagttcaggtcaggtcttgaaatctaccatctcacggcccgcatcccgctcgccgtctggctgaaatagattagcactgttaggtctgctgaagaaaccgagtgagatttttgaaagaaaatgagtgagattttttaagggccgcaaaatggttaggcaacgtggtcagtgtgctcattgaaagaaaatgatttttggagatgaacgaaccacttacaagcataaacttcttttatcgaccatctccttgactacggcgtcagtgtgctaattggtgaagactcgcatactgtgttagtataactttgtttggaactccacgaacgtggcattgccaacactctaaaatggtgttagctaatgtatttattaattaattggattaaaacattgttctttctcgctcgctaaataatttcgtatgtaacatgcatatatttacaaatagctaggtcttgatatagagtataaatttgaaacaatttaaaattggcaactatttgagcaaaatttatcggtttttctaaggactccatttaccaataaaccggcactaaaccgggctccaaacgtaacatatttcctgaatacacactgttgttcacaaccttaactagggaatccacactgttggatttgatgaatgaggaatgtaacatgtaagactgtgttggtgaactcaatacaaaccacatatgtactggaaactaccgttaaatccaaaaatgaacatctaagatttgttcacgtcacccagagtaaaattttacttctggtaaaagttttactaatggttgaacctgagagtttttttttttttactctgcatgacatggatccaacaatatgtgatttgcattccagattttcattccatatgtaatttgcactgtatattttccccccttaactaggccactagagtataatgggccgggatactgcacgaaggacttgctattgatgggctaacgtaatcgatagctctcttgtttcctccgacaaactagccaaatatttcatgccaatacagtaggggattgtctatatatttatcgataaattttcttctaaaagtttgtcagatgtaaatatagtataattacattgtatcttacatataattataatgtaattggtatgtaactttcgtgtaatttttaaactgttagatttactttcatgtaatttcatgcaaaaggggaagaaaaaagtcacaactcacacaaaagtgaggggatttggtctcgtgacctccgcttcatgaaaatagcatcttatcgtaagatttttcaaagttacatataagttgtattatagttacatgcaagttacgatgtaattacactacgattacactatatttatatctgtcaaatttatttttgagaaaaaatttgtcgacaaatgtatagcaaaactggcacagtagaaggattaattttcacacttgagtatactaaatcgctgatcactatgtcttaaagaattttggtgaaattcacgcgagcgtcaaccctgttcaacgtggtgcagtgcaggaagatgtacatatataggctgagatgtaacggaataggttgatgctagagttaatttgacaggaacagtagaagagactagaatttgttttgtttctattctatgcgacagagtttgcaagcataaaagagacgtgcctagtggaaactatgtatgcggccatgccatgcccaacaaaacaaagttctcgtgaataacatggagagagcaacactcgtaccatagcagaagtattctcatgcaaatgcaatgcatcgatctgcatacaactaattagctagcctagctatatatatcttctctgctcgatcttttatctaatcagttgagatctcacgaaatctacgatccaaggcaggccgcccaattgtagtttggctgaaatagtgtagtgttgttagttactggcttacccgttgggatagtgagtgagatttttggagggaaacgaaatggttaagcagaccggtggcagtgttgatgtgggtgtcatggtgctcggcagtgtaagagcaacccaataactctctgtttggctcttcaaattaaaatttaactaacacagagaaaaagggagttccaacagcctctccatccgaatgaccgagccatccggatggccaaattgtttctccggttggccaaatgtagccagcctcctccactggccaaaggtgtgtcccaccaccactcccatccccatccactctctttgccggtgacgaaccgaaccgagggcacgccggccacgagcgcctgttaagattaagaattgactacaaaacggcatcggcagtcgctcaaatcggctacggtgatatcgactactgcatatctgttgagcgctggcctactgcatatctgctgagcgctggccatctcgaggaaggtggaccctcaatcgtcgccgggtcagattaaggccttcatagctattgccacataaggattggagttcggcaattgtacctattaattagggcattttctaatttccttagagatatattagagatatattggtaaaggcccacctgaaagggtcattcgtattttaagttatgttaagagataagagtcgtgtccagcaaggatataccatgtacttcgggtataaatatggcccgaccccatgtaatcaaacaacgtcagtttaatacacctcggcgcatcgccacccttttacttctcattgttctcgacgagtttttcttttgagttgggctgcatcaggttcgatctccgacgaaatggtaaatcttgtcatggcggcttgcgctctcgggattagcgcttacatctttatgacactctaatcctgtcttcgcaagcctccgagttatcatatgtatcgcataatctagatcgatctcgtcatctgagcttcatcgtctagcctctaccatctcgaatgagctttcaacggtttgactagatctcttgcctctcttcacgcttaatgctgcattggttaggttcgatctattaagtattgtcctgaggcttttcatctaatcttttctttgacggctaatagagatagtatctgggtttcagccgatcttaccagatttagtcgttttacattcctttttggttataaatcatctagatctgccccttatatcaagatcccatcctcttgaagtagatcaagctcttgttgatgcgaaaaacatacactggcctggaagatctgcttaacttcagtgcaggtccaaaatcttgcttttaggttcgtgagcgtgccagttgatttgatcctgcaatcaacaagaaataaagacaggaaaacagcggttaaatctataaacgatagccgatcggccagtcgccgatgacgtaacatttatctttgagccgatgtcatatttaagtcgatcggcagtcataaataaataagaaagaactaaatctattcgatcggctgcaggtattaacggtatataatctttatgtcgatatatatttaaatcaagtgattgggatagatcggtcgtcatgccaagacagtataaaccacttagattgaaatatatattaacgagaggattataaacattcataacatagacaatcagatagatctagcatttaccgactaatactctgataccactctatattaagatattaaagcaggcaaaatatatcaaacaggaagcctaacatacctagatgcaacaagatcttaatataaagggtagatctagcatgtcaattaagcatataagatataaggctaaattaggtaagattggctgaaaccctgatactaccctaatcggcaaccaaagacaggctagagattaagattctaatcacgacttataaggtcaaacttaactgatgcagctataagtatgaaaagaagaacaatatctagataataaagtcgttggatgtttcatagggtagtggatatcctatataatctaaatcaacgttgatatttaacctaatcagttgccttccaacgatagatgttagccgattgaaggttaagcagcaatattgtcgaagattatataagatatatggtaactcgacgaattacataaacaagattagagtatcataaagatggaagcactaatcccgagaacgcaagccgtcataacaagttttacctctgattgaagatcgaaaccgatgcagctcaacccgaaagcaagaactcgtcgaaagtaaatgaaaataaaagggtggcgatgcgccgagattgtattgaacgtgtgttgtttgattacatgggttcgggccatatttatacccgagatacaaaatatgtccttgtcggacacgactcttatctctaacaaactctaagataccaaaagtctttgtggtagacttttgcccaaacgtatctctaaggaaattacataaaatatcctaattaatagatacaattgccttttcaggactcaatccgtgcgtggcaatccaattgaagcacattaatgcaacccaacaacgtgtaccgagtcacattatcgggatcggcttaatcggctaaccttgtccgactcgaactctgccaatcctggtcgcagctgattcggactttagccgattcttgcactgtttccggaacgatctctatcttggattccgcttcggctttatctctatctccaatacttgaattaccaaatttggttgttaacagctccctagtctctagattatattgggccaggattcctatatttcatctgtgcttatctcggtataaggtggtatcggagtattagccgatacaggttgggttcgctccatcggctatgctgtgagcgtgcataatcccttcgttggagcatgtttagatatggagcgatttatactgtctcgatgccaccaccgatctatctcagtcgctcgatctaagcatgtcccgtctaatggattacgtgtcgctgatatctacagccgattgagtacaccgaacaatctacaagtttttacttgcccccgccgatgcgatccgacttgagttgcatcggcgtggcccccaacgatatgtcatcggcaattatgccgatcggctatcgttgacagatttaactctttgttgtttccagtcttgttggttgcaggatcaaaccatctggcacgctcagaacctgaaggcaagtttcctggacctgcactggagttaagcatatctcctagggcgctgcgtgttgatttttcgagtcaacagcgccccaccaatgtcgtcgtctaggccaccgtctgccgtcgcagtcatcgttgtcgccgtcgcgccacggtcacgcacgagctgttgccgccgcggggagccgtcaccatctgcatcgccactgccgcgcggggagccaccgctaccgtcgcctccgccgctgtcgccgcccgcctcgcgcgctggagccaccgccaccaccgctagatcgatgggccaatgcggccatgcgggagaaaagaaagggcaagagaaagagaaagaagaggaagaagaagggaatggagatgggaggatgacatgtggatccctttgtgattttggagatgtaaatagagagactgttggagtgcacacctagtttgacttcccaaatcagttggagagttggttaaataggtattcggagagtttaatttggagatgctctaagctaactaagctatgactcaacttacctgtggattgaaccagaaaacgagcctaactacatgtgcttcttaaattatcgcgcatatgcatcttagctactcatcatctctttgacgtgctatttatgtgattttttatggtgcagagttagtttgtaatggagatgcctcttgctatacagagccctttatgtgattttttttgggcagagttagtttctaatgaggatgacctcttgccatagagagctagtcaaaccaagaattgctaaatagtattgtatagggttaattcaaaaacgaaaagtccatgttttaattcgttttttatactcaatgtaatttactccagccatattttctattcaatatgagatgttcccattgataaggctatgctatagctcctgcacattgttaaattaacaaaccgtgtaaattttaaaattgacataaatatttgaatgtttgagaaagattgttttctccattttttggagaactcagtgctaatttaaaacctacaaaatccgtccccatcgaaagctgttgttctgtaacagacttgcaaatataaagaatataatgggctgatattagcttggtattgggctaacgaaatcaaagtgctatcttaattatgaatatacgaaaacgcgcttaaattatgaagacaaagtccgagacctaatgttacaggtttgacacttagtttgacaggaaccgcagaaacatagtagaatttgttattgtgcggcggaacttgcactatgtcttgatattgctccgataaaaaaaaaaacagtgcactgatattaactactgagggagccaatatatctggttttaccggtaagggaaacaaattagattcggtgtataattcaaggagccaaaatggactttttgcatggactggctgctacagaatataatgggccagaattgacttgttattgggctaccaatgaaacaaaatcaaggtagtcctctgacaaatactagctaataattatatagttatagtactcctagctaaataaccaaataggccgtgccatcacagcaaaacagatggatttttcacacttgaatactacctccgtcccaaaataagtgcagccatgagtttacgcgctcaactttgatcgtccatcttatttgaaattttttataattagcatttttgttgttatgagatgataaaatatgaatagtactttactcgtgacttatgtttttaatttttttcaaaaaaatttaaataagacgaatggtcaaagttgggcgcggaaaaccatagctacacttcttttgtgacagagggtgtactatatacgaaaacggtggaccacatcaactaaagtgatttaacgaaagaagaatttgggtgaaactcatgcgtacgtccagtccaaatttaactcctaaaatcatgcacagtttggtttgcccccttgtacctgcatctgcatgcactacactacaggagatcgagggtagacaaaggccgacatggaaaggaacagctagttgacatgacttaatttgacaggaaccaacagaaagagagtggaatttgtttttgttcgacagaagagagagctctcacgcattgcataaaagagaggccgtacgtactgtatgtatacgtgtagtagtgtagtgtactcccttagtagtatttcctccgtttcacaatacaagtcgttctaacattttctatatttatattaatgttaataaatctatatagatatatgtctagattcattaacattaatatgaacgtgaaaaatgttagaatgatttacattatgaaacgagggagtactactgtatgcttttggcatggcatgtgcaacaaagctaagttcccgtgagtggcatgcatggaatggatgcagtggcacggtcacatcatcacttcacgccaaccatgcatctgctagccgctggctgctgcatgaaatgcaactaacctttgaatcatcagttggggtcaggtctcacaaaagctaccccttggctcgccgcccaaacgcctcgccggccggcttagctaaaatagtacctactcctgctggaatgtacactaaccatatatcctaagggtgagttttcctaagggtgagtttgagaggagaggaaaagagaaaattgaaaagatacgtaaaacaaggtgagccattagtacatgattaattaagtataaactattttaaatttcaaaaatagattgatatgattttttaaagcaactttcatatagaaaatttttgcaaaaaatacaccgtttaatagttcgggaagcgtgcgcgcagaaaacgaaacaaactaactcacaaacttctcccgccgaacgctccctaatactataaatataaacaaaagacttagggatttggttcatggttacactttatcacactactcttttacctaccacaatgttttcttaggtatgtgtttgttttattgtcacagtagtggcttattaccatgtttttttcaataatatgtttgtcacgtcatagttttaattttctcgtcaactttgttacaccctgtggctcgtaatttataacttatctattcttagttgtgatttataatactacgatatactatcaaattctatattagattagtagtcctgtactaatggtaaaacaaatggtggaggcacatggagctgagtgacctcgtggtgctggcagcagagcagctgcatgcatctgctggtggtggtgcagaaagtgagagattttttaatttgggagggaaacaaaatggttaggtttgaccggacagaccggccggcagatcaaggttggagcgtgcctgggtgttggagccaacaaattaagcagaaaatggagtccccaacaacggaatcaatcggaatcccaacgcaagtgatggagcaacagtggcagtgtgcattgtctgtctctgctgcaggctgcacgatgacaccaatgccatcaagcgatatccaatccacgattttgtgtgatttaatatcgtgccaacacagagggaccagcttactgtggagtagttttctttttctttttaagccagcaaatacaactctactcgtattcttatagttgtcacgtgtactctctccgtcgcaaaaaaaataatttaagtgagaatttgacgcaatctaaaacaacgttagacaggttgtcttttttcagacagatggaatacttcatccgtactaaaataaaaataaattagtaatttatctaagaatagaaataatcaaaaccaggatatgagtgtgttttgattgaaattttgcaggcgtaatgagctgtagatggtgactagagtttatattactggttgaccactaaatttcgaatcccatcagtatcacggttttcaataaatttcgaccaaatctactgtttaagtgtctgtttggtacagctccaactcctaaatttagctccagtagttgagtttaaagtggagttgtggagctgtctaaacccagctcacaactctagtacattttgtgagagagctccatccaactccactccgagttttagtggagctgaaactgtttggctgagctccagctgaaactttagctgtgacaaatagtctctaacttttaaaattccaatcgaacaaaacttcgaaatttcgcagaatttgaccggttcaccggaatcgtgaaccctgaggagagtagtagtactccgatagcggtgaatacagtgggatgattgaggtggttggattggacgagacaatgacaatgagacggacggccacgtcagacgcgtgatcgagtctggctgcaaccacaatgccaagttggcggcagtcaggcggtcggctaccgtacgtcgtcgtcgtcgtcgatccccgcgccgccatcaatcttttgcctcgtttgccgcgtcgccaacgcatgctattgctacggagtactccctccctccgtagtaaaaaaataaataaataaactctagtttccgtttccaacgtttgaccgtccgttttatttggaaaaaatatgaaaaaaaaattaaaaagacaagtcacgcataaaatattaatcatgttttatcatctaacaacaataaaaatataaattataaaaagttttcatataagacggacagtcaaagttggacacataaacccagagtttgtcttttattggaacggagggaggagtagtagagtaattgagtttaattttttcgcgaatacgcaaaagaattgtcacgagtacgtttaattaagtgatcactactgtattatcgagcatatatgcaccagctggtgagtcaactgtcaacgtgtagggggccaaataaagcagtctctccctttttgcatgctttgtttgtttcagctagcctaatgacaatggataggagacatactaggatttggattgattagtttttgttggattactccctactctgtagcgagagtgtgagtggagtactagtgtactccctccatatgacacactatccgtatgacacccacttttctttgctcaaaactggactggagcaagttccccacatgatcgatctactgcatcatccatatccatatccatcattaaactcccagccggccccatcgtatcattaaccacgctagctgtagtacaaatgccacgtgagtcgctgcaaaacatgcgacactacccacagccgtccggccgggccaccactggtctggccacacactctgcatcgatcgatcgcccatgcttgatgcttcaattcccagctaagttacccagatacggggatacgcgatacatcggtacagagatacggtattttcctaaaaacaaggatacagggatacgcttatatatatatatattaaaaacacacaaaaaattaaggaaattgtatttatatatattaaaaatacaaaaaaatcaaggaacttttgtaaagaaatagcgatataatactagtattagtgtagccgattccatatcaatattctgcaattttctcttctataagcaattcaaattaagaagcgattaagatccccaaaaccaaagattaatagtatatttcttgatgactttgcatcaacattagcagccgcactaaccagtaaccactaggattgctagatgcactaccacttgtatctaacaaaaacggtagtactttgtcctaaggaaaacaagaaaggcacagcagattcaagcatgaaacttttgaagagaatggattacccagccaggcggtcaagcgaagaaagaaaaagttttgccgtcgaggttggcggcgaaagaggtgcgccgccgcccagcagtggcggctctgccgtctcgcggaggggacgttgtggccccacgcgcggctgcagccggcgtccggcggcaacgccgggcacgcacgagagacatcagccatcaggttgggccggatctcgtgcggcggcgcatcccagatgtgagcgaagacggaggaaggtcgtgggtgtatcgctggcgtatctcgatttatttatttttttggaaatcgcaaaaatatggggatacgtatgggatacgtatcagagcgtatccgatacgtatccgtaaccgttgccgtatccgatacggatacgcaactatgcaggcgtatcagggtaacccagattcccagtggcatatgcatgtgctgatatgaccataataatatccatctcctgtccttttttctctcttcaagcgggcgggacgtacatatcaccaccaaacattgctacgcgctactcttttcatatgaaaagaaatcgaaaataagatttaacgttattatctaatacaataaatctggataaatccatataactgaataactgcatatagtacggtagctgccccaccatctccattcgcctcaaccagtacagtcccatcgatcgtccatccgatgttttctcttgctacggaagatcgatcggctgcgatatatatactcctactagg

SEQ ID NO: 27038 - DNA, 1332 bp, Oryza sativa
cctgcagcccaagttggaggcgctggataaaaaggcagagactgttctcctgtctcaagaggaagttgatattagatggtttttcaggagtaggttatctgtcattctaagggaagaagaaattaaatggtatcagcgggctaagactaaggatattttagagggtgactctaatacaaagtattttcatttagtggcaaatggaaaacataggaaaactagaatttatcaattacaggagggtgatcatttaataagtggtgatgccaatttaaagtcgcatattaccacttgttataaaggtctttttggccctcctgatgagtctgaccttcagtttgatgagaattatgttgctgacattcctcaagtttcatatttagagaatgaagccttaactaaggaattttctgaaaatgaggttaaggatgctattttccaaatggaacataacaaagctccgggcccagatggatttcctgctgagttttaccaagttttctggaatgtcattaaatttgaccttttagagctatttaaggactttcattctgggagtttgcctttatattcgcttaactttggtactatcattcttttgcctaagtgtgctgaggctttaaagattcaacagtatagacctatatgcctacttaatgttagctttaagatttttaccaaagttgctacaaatagaataatggatgtcgctcaaaaggtaattagtcctactcaaactgcgtttattcctgggagaaatattatggaaggggtggttattttacatgagactttacatgaattacatcgcaaagataaaagtggtgtaatttttaagattgattttgagaaagcttatgataaagttaaatggccttttgtacaacaaactttgagaatgaaaggcttttctcctagatggtgtgaatggatagcttcttttgttcaaggtggtcatgttggtataaaagttaacgatcaaattggtaattgttttcaaacttacaaaggacttaggcaaggggatcctttatcccctattctttttaatatagtagctgacatgcttactctattgattaagagggctaaagaggcgggactcttgaatggggttattcctcatcttgttgatgatggtgtgtctatcttgcaatacgcagatgatactattatctttttggagcatgacttgcaacagacaaagaatttgaaactgattttatcggtatttgaaaagttatctggcctaaaaataaattttcacaagagtgaattattttgctttggtcaggcaaaggaatgttatgaacactattctgatatttttgg

SEQ ID NO: 27039 - DNA, 8452 bp, Oryza sativa
caccacacaaaatttttttaaaaaaataaaaagttagaaaaatttatgtatagaaatactatatataaaaaatttgattcaaattcaaatttgaatcgggtatgtaaactttttgacttataaactttgggtatataaactttagatgtatagaaatactatatatagaaaatatttgaattcaaattcaaatttgaatcagatataattcaaattcaaatttgaatcgggtatgtaaacttttgactaataaactttgggtctataaactttaggtgtataaactttaggtgcatagaaatactatatatagaaaatatttgaattcaaattcaaatttgaaacaggtatataaacttttgacttataaactttaggtctataaactaactttaggtgtataaactttagatgtatagaaatactatacataaaaaatatttgaattcaaattcaaatttgaatcggatatataaacttttgacttataaactttgggtctctaaactttagatgtgtaaacttgaggtgtttaaactttaggtgtataaatttactaaaataggaaagtaatgcggcgcccaacagacaggcacgggacgggcggcgggaagggcggcggcggcatgtggttgtagacggagccgaggaagacggcgtcgacgtctcccccagcctcagccaccggggaaggagctgggcacgggtggcaaccgtcgagggcgtcatggcttcggtcctcgagcgctgtcatggcgtcgcagtcgtcgccgcgttcctcccgccttgccgccaccgccaagccgacgccgatgcgttccacctacctcgtcgccaccgcccagccgacgagctcgccggccgcgcgtgtggctccaactcggccgccgcggtcgctgtaacgtcccgcctctcccaggctgggtccgcttacatctggcagctttcataggtcatagactgtcctcacagaccaacacaagtcttttctgcacactttgtcctcactcgtgcgcacccgggaagaatttcccaattggtcacccatcctaaaattactctaggccaagcacgcttaaccctggagttctttggagatcggcttccggaaaagaagttgcaacttgttggaacgtcccctctcggccacgtccgtgtgtccacccatcccaaaattactctaggccaagcacgcttaaccctggagttctttggagatcggcttccggaaaagaagttgcaacttgttggaacatcccctctcggccacgtccgtgtgtccagtgccagcgcatggccacccccggtccacaccagccatgcgcaccatgcctgcgcaactgcgacacacgcgcccgtgaaaccgcgagagtcggctctgataccattttgtaacgtcccacctctcccaggccgggcccgcttacatctggcagctttcataggtcatagactgccctcacagaccaacacaagtcttttctgtacactttgtcctcactcgtgcgcacccgggaagaatttcccaatcggtcacccatccctaaattactttggagatcggctttcggaaaagaagttacaacttgttgatatgagtattctattaatcctattaagccctaggctaggatgtcacagtcggccgccgctcctcctcgtcggcgagcacggagaggaagcagatgccgctgccttgctcccctcaccgccgccaccgccgccttgctcccttgagccaacaccaacgcattcctccaacctgacgccgacgctggtctccccgtgcctccacgccgtcgtcaccgcgttcctcccgccttgccgccggatttggacttgggaggagctcaccggcctccccgcgcctccgccgattctgcctccgccggccgcgcgtgtggctctagctccgccgctgctcctcctctccgccgcttcttcctcgtcggccgcgccgaccctctttcccaccgcgtcggtgacgccgccgccgcatcggccctcctctccgcgtcaattatgatggccacagccgcgcgccgccatcgccgaccgcacgagggggacggggaggccaacgagctcgcaccgccctgagcccgcgcgccgccacccaggagctgccgtcgctggcagcaccaccctttggccacgcgcgccgccgcttgtgcgagagtagagagcgagaggaaggagagaaatagagaaagagagagagggtgctgacgtggcttactgacatgtggggctcacgtgggtcccacgctgagtcagccgccacatgggacaaaatcagggtgaaaactgccgagggatctattgtgaccggttttgtaagttgggggacgccggatgtctggttttgcggttgagggacgattttgtatctggctaacaagttgagggaccttgcgtgtacttttcccttaggaaattacctatttcctgaaacacggcccaataacacagttacacgcattgttttgtccaacaaggcaatcggataaagttcattgatcatagtccagctaaattgctaactagtcaattgggaggttaattggtcaaaaaaattccttttttaaatgaaaatattagaaaacccatatttctgagttttgacccttccaatattccatccctgctgccgcggttttgtaaaattatagtatgcattcagcaacaattaactgctgcaacttgatacttcccctacatttcaacaggaacatgcacatatgctactgcatttttttgaccggcacatatatatattatacatgtgctacatttgaatacaggctacagctagttttgctttattactacgcttaattaattaattatcacaaacatgtgcgttagtttcaatttatttgcagtactatatcatctccaaatttgtctgctagctcacgtgcggttgcttcgctagctagtttaattggttcagacttaatttaattatattagctcgatgaccgaccggctaagtgccttgtcagagatattgaaaatacaacatacatgcagaataatccaccaatcgatatgatcaacgactctcccgcgatcgtgtatcggccggtgagagagagaaaaatggatcccgttttatgttaatctcagctggtcgtgatctgattcgtagacctaattagttgacgagaagatatatattgtgcaagtaatcatgcatatccctttaatttggatattttagcttagcatgcatacataaagtaggttggccgttttcttctaattgtaaggcagcattgcaattgacttctggccgggataagagattagctgtatgtgactggccaaattaagccgtttgtccatatatataacaatttggtaataatgtttagaaaacaattactccctacatttcatattatataagatattctagcgctgcccatatttatatatatatgctaatactgtttagattcattaacatctatataaatataaacaatgctaaaaagtcttataatataaaacggaggaagtagcaattaagtctccgtccgaattggaagagaaacctgcaagctggtggatatacggtgatagcttcatctttgaacaatcgatagatgacaaaagttcaaatagtatactgctacatcgatccatttaaaaataactttatttttcactcatcccatgtatacatataataaaaaaaatacaagaatatatatcctccagtttatcaaatcctaatatagtcgatctccactttaattatctgatcctaatataataattgttttttttcgccttagtagactgtgttttattttatgtttgttctttttcccgtaaaagactttgttgcgttcgtttgggcttggttaccaagctgggtaatgaaagttgactgttgtaaaaaaaaatctttaaagataaagttatttagagataaataagatggcataaaaatgaagttattttaggaacatggatagtactttgtactccctccgtcccaacaaaagacaaaccatgagtttctgtgtccaactttgactgtccgtcttatatgaaatttttttataattcgtatttttattgttgttagatgataaaacatgattaatattttatgtgtgacttgtctttttaatttttttcataatttttttaaataagacggacggtcaaacgttgggcacggaaaccagtgtttgtcttttttttgggacggagggagtaagaggcaacatgaaagtcttgaaaggtaaacgcgcgtatatgacaagtaattcggactaactgccggcggctagttagttctcaagttattcttttctttttctgcgagagagaatatagcttcgaatgtttcctatatgttatttttaaggtaatacagtatgtttatagaagatgaagctctacgcttgctgattgttcggtctatagaaatttagatgataaattaggttccacacacggctaggcctcatgtatttcctttcactataaaaaatgaccgtgcgttgcaacgggtgaagtctattttaatcttattattattacatggtttagttaagatgaaattcactgtgggagtttgcttggatatatatatttttagaaaatcatgagctgcaattagaagttcgatcgtctcaagttagcatgcgagtttttttaaacagatttcttatatgattccttctgtattaccatgggtgaacgatcttaaaaacgactcaaatacggatatgtatttctaaaagcaaacgaacttaaaaaaccgactcatacatgaatgacgtaccaaaatatttaatatcgtcaaaaatatcttcaatgtttataataagtagagaagagatatagattacaaccaaaacataaaattaaaactgactcaaacacggatgatgaaccacggaaacatcttcaatttttataaccgactcaagcacggataacgaatcacgaaaacatcttcaatttttattttatatatatatatatatatatatatatatatatatatatatatatatatatatatatatatatatatataatagtagagatagagatttgtacaaatttgctgcacccctctataaaggcaaaacgtacgtaatgtgttgttcaaagttaccaattaatccttcatgatggatgatgtccctattagtataatttaataagctttccgggtagatcatttttgttgttttagaaaatatacgtgtaacattatttattaaaatccacgcaacaagacacgtccctttgtcacgtattattttggaagtttttttatccattagtgtatttttatgaattaatgtcaataaactctgcatatatgtatgtgatggtttatgcttaacgatgcttctttttagcctacttggttaggacttagtaccttcttctgggaatatgaaggaatctacacactagtagctatcaccatctgggcgacctaccccaattaagacgagtttatgatttgatattatatttttctagtgtaaaatttggcatgttttatcttgcgtatatgatgtgacaatattttgactagaaattttaatttcttctggtactttaaaaaacagtaaaattttgcacgcatattcaattctaattcagataacttagctactgtatgcatatatgacgcgtaggaataaaaaactgaacttaatcattcgtgagatctatctttatatatgcggcgacgttgtgatatacttttcttgagaaagacttgaccaaatgcagaagccattgtccaacgcgattagattgaaattagagatatctatctatctatctatctatctatctatctatctatctatctatctatctatatatatatatatatatatatatatatatatatatatatatatatatatatatatatatatatatatatatatatatcgtttcacagtatagtaattaaccagtacagtatctcacaagatagtaactaaccagtacagtattttagggcctgtttagggagcttctaactgctacagcttctcccataatcagaagctcccttaaacagtctatcttttggtacagattccgagaaactgttattttagaatctataaaatgaactgaaaccagaaactgtgaaaccaaattttttcagattctcataaactggttaccaaccagctgcttcttagaatcttaacctggaattgagaccaagtacgtagtggacacggccggcctggctaaataattatcaaaattaacttgatttgacacaagctactgaaaccgccgtgtttctattaaagaaagttcgtactgtctagcttaattagatgctttcagaatcgctacgttacaatgaaaagaaagccacattcacgtgatcaaattgaatatatcctgacatcgctacatatcgttttccagctcgttgcgtataaacatctgaattaattttgctccaagacagtaatgtatgtctacagatgaacttgactatttagcaatagtagctaccagtagtaattaattttgtggcccggaaaaatggactaggcaataaagagcgaataggtaatcgtcattattatgttttttcattaggtcattaattgtcttatgttgaccaatagtatattatgccggctgagtgatatatcctctctctctctctctctctctctctctctctctctctctctctctctctataaaaatactagtaacttgaattatgcagaatatatatatatatatatatatatatatatatatatatatatatatatatatatatatatgagatactctagggctatttggggagcttctaattgctgcagcttctccagaattagaatctcccccaaacagtacagcttttaatccagattctaagaagctgtagttgtagaatccaggaaataaactagaagccagaagctgggaaacccagcttttctagattctgaggagctggctaccaatcagctgtttcttacaatcttaagctcccctaaataagaaagacaagagagaaaaaaaagatcattaatatttcagcaatcaagatccaactatccagccatacgtgcatgcataaatattactacatctgtcccaaaatataacaacctttcaacaaatgtttagattcgtattattatgatgtgtcccatccgtttaaaggttattatattttgagacggatgaagtaactgatatagtcctcattaagttgcaattttatcttggttagtagacgatgcattaaaacctttttgggtgtatttgtaaatttgccaccggttttttcaattttgtaaggatgccatttgaatgacagttccagtggtatttttgtaattttatagtaacagttttgcaataacgattcaaagtagtggtaaatttgcaattgcctaacctttttcaatagaaagttgctccaactaatatcaaataaatttattttttaagtatataataattaaaactcaattactcgtgtgctaacgattttcttgttctgtgtgttcttactacatcttcattcgccgttatgttgaacgggaccatatatatagtgtcgacacataattaatatatatagtattctttttaatccagactgaaatgtagtctcttgcatacacacacttagcttgcaatcgtgtgcgtgtggtaccaatatatacacgtcatcgatcgagaaatgagaacgagatggatacctccaaattaaatgtcatcatcacattcacatccatagacagatagattattacagtaattaatttgcttctggtgcaactattgatcagtttggtcagttggctgaaaatcttagtagatgactttctctgatcagaagataagaacgcgcgcatacacgcgcagtcatcatccgatgtaggagtagtatataggagtaaatctgaggcgcctctactaactatagtactataattttatggttcaagattagaaccgcatgtccatgagacctggccaaagtcttccataacaattaattacatacaaatgaatgtttaggaaaatgtacatagcgagtaaattaacctagtggaattaatactaggaaggtacgtattaaacttaagttacgaggcagctgacagacaatagtgatctttgaacattgactatgatcactataaagggtactctccctttgtgtcaaaataacttcatttttaccatatattgtttatctaaaaataaattaatattttagaaatcattatattataatttgataaagtgaagagtactctttttttaagacaaaagtgaagagtattctagtctttttcttttgtattggtatgtgtgaaatggatgatgaacattaaaataaatttattttaggattgaggtagtaattcttagtttaagatgtaattatctatca

SEQ ID NO: 27040 - DNA, 27613 bp, Oryza sativa
aaatatagattttttaaaaaaactaattgcacgattagggaggaaatcgcgagacgaatattttgagtctaattagtccataattagccataagtgctacagtaacccacatgtactaatgacggattaattaggctcaaaaaattcgtctcgcggtttctaggtgagttatgaaattagttttttttattcgtgtccgaaaaccctttccgatatccggtcaaacgttcgatgtgacactcaaaaaatattttttcgtgaactaaacaggccctaagttggcgaaattggcccatacgacgaatacagtaacgcatgtttttttatgaagttcaattcggcgatacgtctacgcccaagagttggatcaataccgaaagtcgttgctcaatttcttacgtgcttacaataaatctagctaaacaaatactcaattataatgcggccggggagaagttatgatgctgaattataaagctgatcatgccacatcgtagcagggtcgatttgtctaccctagttggtaggaaaaaagtgtatcttagttgacagcaatgcaaattttatagtcgagataatatcatgcccatgccttagctactcgctggcaataaagaccttagctactcgctagctagcaatcgttttcgcgctcgaataatgcgtttgaacatcgcaattaagatccagttaatctcatttagttactgatgacgccctgttgttcgagatctgttcaaagctctgaaacctcgacctggcgaaaaagttcagaaacatctctagtcaatccaaaccgtgacgaccttagagacagaaaaggggaaaaattagcatacgtacaactgggttagctcaacattatgctagcttagccttgccattcaaacctgattttgacagtacacaaacacaattcaaaacgggccgtgtcttctattgaaaaagaagttgaaaataaatgcatatcgatcgattgatctgtacgtgcgctttcaggttaatttgttcaacgacacatgcagtatacgcacgtcatttcgatggaatatgtggggttgaatttgttttgaaatttccgcatagatgttgagccacattttgacacagcgccgtgaaaactactaattattattaaataattcgcatgtgcatgtcataaattccacttgatcgcacaagaaaattgtggtgctaaggatcgagcaagtcgcgccatggctgatccacgacctaactagctaagctatagcttaatttgatttctatttaagaccttgacattaacgcatggaggtgtgcccaatacaattgtgaccgatcgatcgaggaagaagacgacgaccatgaggacgatgcttcctctcctcgttatcctcgtcgtcgggctccggctcgccggcgcgagccctccgccgcagccggtggcctgcaccaagggcaccaccgactgcacggtgaccaacgtgtacggctccttccccgaccgcaccatctgccgcgccgctgacgcgtcgttcccgcgcacggaggcggagctcgtggcgcccgtgacggcggcggcggcggcggggcggaagccgaaggcggcgacgaggcactcccacagcttccccaagctggcgtgccccggcggccgcgacggcaccatcatcagcacccggttcctcaaccgcacggtggccgtcgacgcggcggcgcggcggatcaccgtcgagagcggcgtcgtgctgcgggacctcatcagggccgccgccgccgccggcctcgcgctgccgcactcgccctactggtacggcctcaccgtcggcggcctcctcgccaccggcgcccatggcagctcgctctggggcaagggtagcgccgtgcacgagtacgtcgtcgggctacgcatcgtcaccccggccccggcgagccaggggttcgccgtcgtcagggagctcgtcgccggcgaccccgacctcgacgccgccaaggtctccctcggcgtcctcggcgtcatctctcaggtaagtacacaaaccacacgtgttctacttcttcgttaattatttcatcatgcatgtgatctgatccgtacgtatataccatggtgcatgcatgcattgcatgcaattacacgtaattgcatatgggggttaattttgtccttgattgtccttcttgctttggatcttatcatgaaatgaatgaatattactactactaactgcttgttgcatcgatccatggagattgattaattactttatccttccttcaagtgaaagatagccctaatcaatcaaccaaccatatttatgaatgaataaaagcatctagaacatgatcaatttgacatgaaattcatttgatgtgattttgcaggtgacattcgagttgcagccgcagttcaagaggtcggtgaggttcgtgacgcgggacgactcggacttcgcggagaaggtggcggtgtggggcggcgcgcacgagttcggcgacatggcgtggctgccgcggcaggggaaggtgatctaccgggaggacgaccgcgtcgacgtggccacgccggggaacggcctcaacgactacctcggcttccgcgcgcagccgacgctgggcctcatcaccgccagggccgccgaggagcggctggagaggaacggcaccgacatcgcccgctgcctcgcggcgcggctgccgccgtcgctgttcgagctccaggcctacggcttcaccaacgacggcgtcttcttcaccggctggccggtggtcgggttccagcaccggatccaggcgtcggggacgtgcatcagctcgccggaggacggcctcctctcctcctgcacctgggacccacggatccgggggcccttcttgtacaactccggcttcagcatcgcgctgcccagggcggcggcgttcgtcgccgacatgatgcggctgcgcgacctcaacccgcgggccttctgcgacatcgacgccaagctcggcatcctcatgcgctacgtcaaggcgagctccgcctacctcggcaagccggaggactgcgtcgacttcgacgtcacctactaccggagctacgacgacggcgagccgcgcccgcactccgacgtgttcgacgagctggagcagatggcgctgcgcaagtacggcgccgtcccgcactgggggaagaaccgtaacttcgccttcgacggcgccgccgccaagtaccccaactccggcgagttcatcaaggtgaaggagagatacgaccccgacggcatcttctccagcgagtggagcgaccaggtgctgggcatcagcgggagccccaacatcgtcgacaagcgctgcgccattgaaggcctctgcgtctgctccgacgactcccactgcgcgccggagctcggctacttctgccgcccggggaagcttttcaaggaggccagggtctgctccaaagacaaatccgccgccgccggtgatgatgatctcctcgatgaattgtgatttattattatttgatcgaatttcgttcaagtcaaataatacatgcatggctagctagctctgcatgaaatgaaatgcaaatttatatttaattaatcaagaaaaagataagcacgtacgaaataatccacctgctacattgggatggcgtatgtggtaggtagtgatactgtaaattggttggcgtgatttgattttgagatgtaatgatgctttaatgtggacagtgtcagtggtttggaaaattgtactccctctatctctaaatatttgacgccattaactttttaaaatatgtttgaccatttgtcttattcaaaactttttatgaaatatgtaacatttatatatacataaaaatatatttaacaatgaatcaaatgataggaaaagaattaataattacttaaatttttttaataagacgaacggttaaatatgttttaaaaaatcaacggcatcaaatatttagagatggagggaatatattaatttaatttgagttggaagaacaagttcaactgtttggaaggagcgcgcgatctgagtcttaatcagctgttgctttcgtctttcaatatgtgactataaacgtgtctctctatgtttttcgtcgttttattcgttgaataggcagagctcctaccgttgaaaaggtaagtgttaaactttggtttttgttggtgttctctctacgtttaatacttctaatttttagtcccatccaaacaccgtttatttgtttcttgcatttttctacacgtaactataattaaacctctttgtgcatttctctgcgtattctttttaactgaatcggcacagctcctgccttgtttctcttttacggttttgtcaaaggtaggaagttaaagattaaggttaatcctattattactatgaagctacatagtttcttaattatgatggtgggttgttttttttttagcaagagcagagagcccccatttccattactagaaatgaatagcaagctacagagtgagagcgagagatggtggccgggttgtaatgattatcatcatgcatgacattatctatcaaaaaaatctattcatggcaacatgtgcggcagcttattgagggttgagagtgagactgtgtcatcttgtcggtcatggcgtcgaatggctacggtcaaggaaattattttgttttgagtagttgaatggaggtctcaatcatttatgaatggggtatgctatgtttaatgcaactcctttttcggtgactaacgcaatgtcttttaaaatgaccactcctaaatactactatattcttatagaaacagggcataaactaaattgggagaatgactaattaatttggccttggccggcctatacttttttttatggttttgtatgaaatggaggtggttttcatatttatattattattgtgtgtatttagctgatgtcacttaattaggtccaccactttaaaacttgcctcatttaagtttgtgttgtaacagaaaatttatcatttgcgtttaggggtgtgtgaatacaatcaaaccatgcatattccatcaaaccaccatgaaatatggtttagggtgtgttatattatgtgtttgattttcaaagtttaaagtgaaaacaaccggttttatattttaggttgaaaaataaattaacttcgagcaattcatagactttacagtacttatatttggtgtcattagtatccatagttccttataggctagatcgatgtagatttaatttgctacggctacagctgtggtgcatttacagtatcgataacaacagattttgatctgcagaaaagctgaactgatcaggcttctgcagttgcatcgatctgttggtgataaccaaagcaagagttgatgacattctaactgcagtttaattaacgaagtgcataacattgaggtcatgcggtgatcacaaattaaactggcccagtacgaccaagccttccatttacagcccagtgcgacaaaatttcagccttaattgtcaagcgagcccattatcagacgaacgtgaaaaatattggcccacctatagcccactaagtgaaatcccagcccagtaatggcctattaaagcaaaattacagcccacgtaatctagtaaaagtaccgtaccactaatggcccagtaatacaaaatcaaggcccgtttatattacagtatgcattacagcccaatgatgatacagtaagtcaaatacggcctattaagaagacagtacggcccagtaaaggcccattaataggaaatcccagcccactaaagtccatttatagacattacttggtacaaagaatacattaaaaaaaagcatggtacaaaaatacattgaaaaggcgtggtacataaaagtaaatgagttagctatcaatttgcatggtacaaaaaatacattaaaaaacaggtgcatattatagaacgcatggaaaattatacatctgaaaccatttcatatggtaatggaggttatatttgaaaattttgttctaaattttggatgtgctgaggatatatattggtattagtggataaaagatgccgataatggaggttatatttgaaaattttggatgtgcggaggatatatattggtattagtggataaaagatgccgataatggaggttatatttgaaaattttgttctaaattttggatgcgctgaggatatatattggtattagtcgataaaagatgtcgatattttctttttagagaagggtatttttacccgatctctatacccaaccggatatatgcagccttttaaattgagaatttagcccctcaaacaactactcaggtcactgcaaccatcagtctacgtgactcaaacttatcagttcattgagacttttgaggctgacatggttatttttacaataggagattcaatgcattcttaataaaagagatggctttctagtggtgtaattatcagtgccattagcccaattatcatgcatcctgagatggaactataggttcaagatttggcatacattactggcacttaaaatccatggatatctctactggcacttaaaatcgacgagaaaattcgaaacccatctatcagattgctagtagtttgttgtggacaaacccgtgtacccgtgattgatatattgcttgagtaacaactatcacatactacagctgtacagcaagcaaatgatagcatttcctaccattttgaaacttgcaatgaaaaattaagcagcaaaatttgagtcactgaagcgcatttcaaactaactacaagtcaaccacacaaatgtcatgcatccttttacattctaaacctaattagaactactgagcatgatgcgtgaatggtttacatttctgaaatggtttcagccacatcagaaaccatttctcgattgattcgccggcggcgaggtggagagagagagtctcgagccgagccacgtttcgtaggggggaagcgagccgagccgagccgagtcaacaagtacaccgtacacggatcccgtatagagacgagacaagcgtacattcgtacgtactccgtgcaaatactgtttgttgcgtcgaatacacgacaaagtcaacgaacgatacagcgtggcgggggagctcatctcactggcctcgcgctcccacactgccacgtcactcacactctcactaatggctacttggtggttccggcgaagtaggcgagcgcgccgacgagcggcgcgttgatgtaggtggccggctccgactgcgcgaagttgccgcggtcgtcggcaaaggcgtcgcggctgtccggcccgccgacgacggcgccgacgagcacgttcgggttgggctcgccggagtggaggtagccgaagccggcgtcgcaggagatccgccccgggtgggcgcgcaccgacggcatggacgcgccgcggtggtgcgcccgcctcgggtacctgcacccgaaccccaccatgtacgacatccccgccgggttcttccccaggatgtagtccacctgccgcttcgccaccgccaccagctccgccgccgacacctcccccctcgctccgccgccgccgtcgccgcacgacgcggtggcgccgctcgaccggaggtacttggcgtacgccagcatcaggaacgtcgccgtcgtcacgtactgcatgttgctggagccttccctgtacaggaggccgccgggggtgtaccgcgactggaagctcgccgtgccgggcaccagcgagcagatgtagctgtcggagtgcgccttgtagagctcgaggccatggaggcggttgcggaggaagcccttggcgaggagcaccttggtgcccacccgcttgtcgtcccagctgaaggagtagtcgtcgtccccggcgccgagctgcatcccgttcgcctccacgtacgacatgaacgacgcgttcctcgacgcgcggtgcagccacgacgccccccacaggagctcgtcgtggtagcccgagtaggagcagtagaacgggcacaccgacgacgccagcgagtcgctgtacgacccgcggtgccggtcggcgaagtcgaacacctgcgtcgcggcgtggaggaggcgcgcggagtaggccgggtcggcgcggcggaacaccatggacgacgcggcgagcgcggcggccgtctcgccggcgacgtcggaacccggcttgtcggcggtgacgcggtagacgctgcggggtgtgtccatgtcctcggggcgctcccagcagcggtggtcctggttggggtcggcgacctggacgtagagcgcgccgggcgtggcggtggcggccttgaggaggtagtcggcgccccagcgcacggcggcgcgggcgttgggcagctcggcgcccatgaacttgccgaagtcgagcacgctccacgccagcatcgtcgtcgagaacgccatgggcaggccgaacttgacgttgtcgccggcgtcgtagtacccgcccaccaaatccacctgaaacacaaacacgccggaatcacaaactcctcctcgccggagacaaggaagaaagggaaagagagagaggcggcgtacgtacattgtactgggcgccgtcggtgaggccggagtcggcgcgccacggcatgcggttgccgggcgggagcttgccggagcgctggccctcgaagaagatgatggacttggcgagcgcgtcggcgtagttgaacgccatggccgagctcggaactaagagcagcaggtggagcacgaccagcagccgcagccgaatgccggcgccgccgcagctgctgctctttggctccattgctgcctgcctcaccggcgaagtgagagtgtggctcgagagtgaccaactgcacattaatatagtgtgaaaagcagtggccgttaagttagttaatttggccggtgctggagtagtatatcaatttgctgcgagaaaccgggaagttggggggacaatttgcaggagttgagaggaaaagaaatcgaaattccaatttccaagtgagcatttcttttttcctttttgactgacaatgtctcatggctttgggatttgtataccaaaaagaatgaatgaaatataccagtagcacttgctaactggaattcaacagagtttgcagaagctatcaatgtgacaagcacacaacaatttgtggttggggctgtttttagctcagcgcaaagtttatatttgggtagaaattaaagatatgggattgaaaagttatgtgtatgacaggttgatgtgatggaaaatgactgaagtttgaatccaaactttagatctaaacatagccaggtatatttctaaaaccaaaattatcgtatttgttcatctgaagatgaacaaaaaaaaaacagctgccttgtgacaatcctgttcctttgagattcacaggagaaaataatttgatgcacacacacacacaaacagtatcatctgaattctcagcaatgaacaccgtgtttagttctattttttttttcaaacttctaatttttttatcacattaaaactttttacacatataaatttttaacttttccgtcatattatttcaatttcaatttcaaccatacttccaatttcggtgtgaactgaacacacccgaaactggaaagccaaagcgtccggtatgttagctactaggccggtgcagagcagaacgtaggctggggaattcggcgactggtcggctttttgcaaagccaaagcaaaagcatgcagcgacatggacgaccgtctctgctcaccttcagctactgctactggtactcctctgcctgtctttctctctttttcctttttctttctttaaaatcttcaagccagccatccatttctccatctattccgatggccttcctttctccattctcatctcatgcgtgtgttcaaccaaggccacactgcaatgatgcctccagttgcatgaatattcatatcaagcctgtgtttagttccaattaaaaatttgaagaaattggaacgatgtgtcggaaaagttagaagtttatatgtgtaggaaagtttgatgtgacagaaaagttagaagtttgaagaaaaaaattaaaaactaaataaggcccaattgcattttgatctccactgatggtatattattaaggatctgtttggatcatttagtccctagactaaaattagtccacgattaaaaagtttagttccctactgtttagatctagggaaggcacgtgaaccgagggacaaaggagagagactgttattttagggcagtcccaacccataacactagacatggtttccataaactccacatcatcaagaaactactaatagacactactcttccaatgcaaacaccactattccatacttcaatttaatgctacttatctcacatgatgtcttggatgttgtgtagaaaccatgtctcatgcaatacatggtttccctctctttcttcatttattcacttgccacatcattttttttttcttaggtggcaacttatttaatgctatggatactatcctagttattgggttgggaatgcccttagtccctacaagtatctccaagagggactaatatattttagtcctaatatgcacttttagtttttttagtcaccctgtttgaattcttaggaactaaaaagtacaaaaatagagggactaatggattattccgatgaaccaaatatggcataagctatgctacttactaattacctgcagtagaatggcattaagaagagcatgcttaactagtggaatgaatgaacgctccactccaagtgcaattggcaatgatgatgttctctccagtctccaccccataatactgaaggactactcctataatctgaagttaattgcagagctcgaggatggcagatgcatttgttgtgttccatccatgggggcaacaagacccctctgcttgatacaagcacatgtgtagctttccttttgtcttactccaatctcaagtgcaatcctactatcacttcagaaaaaaaaaatcatcaaagtaaagcatagataatgtactagtactactactattccaccatcaaggaagaaattactctaccataactgcttttccttctgtcctactgcaatctcaacttctcaagtgcagtcctactacttcagataagatactccattccaaagtgcagtagggacaatgtactagtaccatcaagtaaatttatcaccactaaatttaacagaagctgtagtaaatttgattgttgggcttgacaattgccatgctttgataagactggttaaactcctgaagctgtgaccactgatgtttaccgaactgttcacatgcagcgtgcagaggcctgagaagcaggtgaagaactgtaaaaataaaataaaaaggctggtcaagtctggagagtggtcaaaactgacaaacatgcgttgcgttgcagctaaaagtaagggcttggctttgcatggcaggcactggccttcatcacagagaatcctattcctagggtactgtactatacgtgctatgaccagaacagtttcatcagtgaacaaagttgacagttgaaatacacacagggggacctcgtcctgattctgaatctgctttcgctggggattatgcagtcatgctgcctgaaaaaagtttaagcaaatctagtgggtttaatgcaaagaaggaagtaattcgtgtttatctgttcctttttcaactcccgttcagaaccgagggcaagtggtagtaaatgggagatgttattttgtgcattctaaaattcagaaatgcagctggggggctttttttataaagctggatatttatagatggaaaaattgcaaaaaccaccctagatattatcccgagtttgagacttcctccatgagacaattcgttggaaatacctcttctaattcacattagtttaatattcctcttcaattaccattgttcagtgtttcttactttctttcctcttccctaattattgttactcgtccattctcatggcgcaaagcatcagaattgcatcgagctcatatttcttatcttgaatctgccagagcccaaagaaaccaggcaccggtaaaccctatgtgacaaacgcaacaactcatcttcgacgacccccgcatccaagagcaaagactcgtgatcactatcacccaacgatgtgctgcccgataggtcgccatgagtggggatgccacggtcgtgtcattgggtctagccaacatgagtgacgaccatgtctcctcgcctattagtgtttgtataagcgtgtatgtagttaatagaacgaatattaataattggggaagaaggaaaaaaaacacgtgaacaatgataatggagggaaaataccaaagtattgtagacagattcagcagaaatagctgaagaatatacgtgcttttattcctttgagaaattagctatagcacctgttggttcttcagagttgttggtactgaattctcagtcagtcacagtgtgaagaacgcagtccgctaagttcttcctcatgggttgccaactcacctccctcattttctgcgtgtatgtttttcaaaccactaaacggtacatattttgtaaaaaatttatattagaaagttacttaaaaaatcatattaatccattttttaattttttttatagctaatacttaattaatcacgtgttaatctatcgtcccgttttccgtgcggaggggaggggttcccaacctctccaaaagaacacacacttgtgattcagatcagagttcacacaaaatactacacaatacgggcagttttgctcatgatcgactcggactattggtcaatcaaacagcagcaaattcagaaccatttgcaccaatcaggactatttttacccaattacaactagcatttcaaacgaaatgcatttgtattgagaccaggacctaaccggggaaaaaatcgcaaattatagcaaagcaactccaagggaaacaagaggcgtctcggcctcacctcagacggcgattcaacaagaggtcgaacagcctcgcgccaccgtcgcctcaccccgtcgccgccaccgccgccggcgacgacgatcgccgggctccacctcggtgaacggcccaccatcgcacactattcatgatcgtgggccgtcggatgacgaaaacgggccagtctttttttgtagactttaagggttcgatgacgaaatctctgaacccacttctctgatcgtttaaccgctgaatcactgtaaaaatatttagtcgcgcgtaaccattaaggatttctaattcttatatgccaaataatctcaaactcaatgcaatacctgaaaacggtcaggatttgaactccagcagcagcatgcagcatgctctctctccgtctgaattttgggacaatttggcactgaggccgtcgacatgaggactgaaaaaagcataaacatcgagcaacatgtatctggaacaaaagtgcattgatcttgtatcgagtggatctttgcttcggttactgtacatgaccttttagctcctgaattgtaccaatgcttagtcagtaatcaaacaagcttcattcagcccatcaaaacaaaacaggttttgaagccatcaaagaacattatcatgcagcctgtcaaaacaagactgttttgaagcaaatttaggtaggaaaaaattaaaacatttaaaatcaggaaaaaaaataaagcattcaaatttgatttggatggggtgcaccagccaaggctgtagtgcaacgcctaggcgacacatgagggccctagtggcaagccactatggtggactctcccccacgaaaaataaatttaatatcaaagtagacacatggcccacatatcagatattaaactgataagaacagatactacacttgatcttagccaaaaggccgagaaaggtatgagttgctatcacgttcacctcctgcttttgtagcctctccgtacatctcctcgtcttgatcgcgcgatgtggtactaaactgtgacaatgaacgaacaaacgggagggggatacaatacatcatgcgatgcgggcttgcgtgggccgctggctcggcgaaaccctcaaatgggccggccttttgaaaagtctgtagttaagggggttcggagtcaaaatctccgacctccctttctgactgtttcaccccatcatatcgcagtaaaactatttgagaggcattgatatagattgatcatatctagctgttatatcaactatatgaggagaaatttgaagataaatacgagcttgccttgcattttttttcttttctttctcaattctcatgatttatttttcctagaatcctgtcatgttcatcctgatgttaagcttcaaagacgcagaaattgttttttcgcgaagaaagacgcagaaattgtaagaagctgcagtaaagacgatcaagatatgaactccagatcgacctccaacaacgtgctctttcctttaagtctgtagtttgggacaaattgctgtggagagcgtccccagtcgacctgaacaaacactagcttcaattggctcttttagttgttttactctacttagttctgaattttcagtctgacaaacacagaattacgaacggtcgaacgcatgcatctgtagcgtgaattgacaattacataaacatttgttatttgcactacactatagaccatagtgaatctttacttacatgtgctgggcataaaaataataatttcagtacacaacaactgtactttttacattctgaacaagggttcttagatgcaaccttccactgtactttgcaagaagaattctcaagctcaaggcaaggccttaattaacccagagaagggaatcattgatgatttgtttatcgccatgtacaaacacaaatgataaaacagagaactatcaggattggaactgttgctttgtgctctatctatatgatctgaagtttggcacaaattctcactgaggcatctaacaagagacctgaaagaaaattaacagagattgagcaacatggtatgtgggaacagccgtgctttcatctaatatattcaaacaaaaaaaagatttgtcagtatgtattttgaagaacagatttgtgctcctttgttcagaattgtcagtctgaatatattcaaacaaaaaaagatttgccagtatgtatcttgaaaaacagatttgtgctcctgacaataccagtagatgtgcaaatgctattcagcaatcaaagagaccatcaaaagtgactcagaagtttaaaggcaaatttcatgccctgaaacaaagagcttggataaattggatttaacaaattcaattggatttggttggggtgcgccagccaaggctgtagtgcaacgcctaggcgacacacgaaggccctagtggcaagccactatggtggaccctcccccacaaaaaataaatttaatatcaaagtgggcacatggccacatatcagatattaaactgataagaacagatactacacttgatcttagccaaaaggccgagaaaggtatgagttgcattgttggctacaccctgcttttctagcctcttcctggtactactctccttgatcctgcgatgtggtacaaaacgaagacagcattggcgtttgctgtgcctgtgtgggccgctgactcgtcgaggccttctcaaatgggccggcctttttttttgcaagcctgtgttactggggttcgtgtttacttgggggttcggagaaaaaaatattcagacccccttctctgatcaaaatctactcactgaaagcgatcaagatctcaactccagacctctgctctttattgaagtctaaagtttggaacaaattggtgtggagagcatcaatgaattgacctgaattaaaacatttagagagacatgtatctgggaccaaagtgtgctttgatcttgtatctattcgctctttgattttgttactgtacttagttctgaaatttcagtctgaagatcacaaaaaaccggaactctttttttttttgcagaaaacagaaacaattgtgctccagtaattgtatccctgctttggatctattatgagcacacacctaataaaattatgaacgtccgaacgcatgcagcgcgaattaacaattacataaacatttgccattttcactacattatagaccatggtgagactttacatgtgctgggcataaaacaataatttcagtacacaactgtactttttacattctgaacaagggttcttagatgcaactgtccacttcactttgcaagaagaattctcaagctcaagtcaaggccttaattaacccagagaaggaaatcattgatgatttgtttatcgccatgtacaaacacaaatgataaaacagaaaatgattaggattggaactgttgctttgtgctctatctatatgattggcataaattctcactgaggcatctaacaaaagacctgaaagaaaaataacagagatcgagcaacatggtatgtgaaaacagccgctttcatctaattgtcttgtatctattggctccttgatttagttagatactgtactttgttctgaattgccaatctgaatatatctatctatcttctattatatactaaaagtccattaaacgtcctacaaacactctcaagacgacacgtggcattcttataaacgctcataaaccgtcacgtggcactatttaatctcaccgtcgattttcatttaaattggtggacccgttattttagaccattagattatatctatatctataccgttgattttcacttaaattgatggatccgttatttagatcattagatatatatctctaatactaatactttccacctatacatacgagagagaataggttcgccaaaaaaaaaaagtaagtacgtaagattgaaaaggaacaataaaacctacatacgtacggtaaaagaataaagccatcatgtcaaaaaaagatagaaccaaaaaaaacatacgtatatagtatcatacaaaaaaaataaaaaaactcccatatactcccacacattagttattattaataaatttgaaaaaaataaatatattcttcgaattagtaaaggtgtctcatgtgattatcaacaataagtattgaaaataaaccaagcgctaaactatagatgtttgtcaaaatataaatgtttaacaccataaacacacatggtgtctactctataccaggaatctactcaaaacttaaaaaaaaaattcttttgatcacctccatcttctcttttagtaccgtcgaattacaacttcgctcattttcaaattgcataatgtttaacaccataaacacgtggtgtctactctataccatgaatctactctcaaaacataaaaaaacattcttttgatcacctccatcttctcttttttcttttatgaagggcataagcatgaataacatagtttgctacgttgctataagtataacagggacgtacatatgggagttaaggcggtcccagtggagaccacagtcaccaatagtgctcaacttactacttaccgatgcacaactcgataagggtgtgatagtaaattaggcattaaaattgtgttccaggttagtctggaggtgcacaactacatcgatatgggacccatgtttcaaggaaatagacaaagaaagtctcgccactacaatcggcttcacgcattagagaagcatttatatataacttgatgttattctattaatttgtacaagtggtatttttacaatatttatatatagttttgaaaattggtgaggcacgaaacacttacgtgtagtggatatttcaatgtattaatgatgtattaggcttattttattgatacattacgtagttcatctatgaataggtacttggcttttaaacagtgataataggttgaagtgacaacaagaaaatttatatgtaaccagaggcaaagtgattttatttaatctaggagataaccttattacttaaatatattaaagtatgcaatatatttctcggcttataaatggtgagatataacctttttaaaaaattgtcttcataaaactgctcgcgcatctgcgcgggctttcttcctagttcaaacaaaaagacaatatattcaaacaaaaagagatatgtcattgttttagttagatactgtactttgttctgaattgtcagtctgaatatattcaaacaaaaagagatatgtcagtatgtattttgaagaacagatttgtgctcctgacaataccagtggatgtgccaatgctattcagcaaaatcaaatagaccaccaaaagagactaaaaaagtttaaaggcaaatttcatcccctaaaacaaagagcttgaataaattggatttaataagttcaattggatttggttggggtgcgcctgccagggctatagtgcaacgtctaggcaacacacgagggccctagtggcaagccactatggtggaccctcccccacaaaaaataaatttaatatcaaagtgggcacaagacccacgtatcagatattaaactgataagaacagatactacacttgatcttagccaaaaggccgagaaaggtatgagttgcaacattggctaccccctgcttttgtagcctcttcctggtactactctccttgatcctgcgatgtggtactaaacgaggacaacgttggcatttgctgtgtctgtgtgggccgctggctcgtcgaggccttctcaaatgggccggccttttcttttgcaagcctgtttactcgctgcaagctcgaactagaaattgctttgttcaacaagtgacatgattctttggctgattatgaagattgcaggtgtgcgtacatcaaaggattgatggaacatgcactgcagtttggtttaacggttacatcgaatcgaagcaagaacaattacatgaatatttgaagtattgcatttgtactatattaataccatgatggatctttaattacaggtagtgggcacaagaatttctgtatacaagcactgcatttttttacatgaggaataaataagggattattgcggaaactatctaactagtaaaatatttatgtggaaatttctcgagctcaaaggcaaagccttaattttcccaggcaaggagatcactgacggttttctgtgatctgtctatctatataccaaatgataaagagtggtacaacgtatgaactgtcgattggcctgcaggcaagtgaacaaagtaaaagaaactaataattagtcatacgcagcaagaacaagatcgtaccacacaattggttaaccgattcttacgtagctactatgggctatgagctgtggtgcgagcgttttcataagaaactgaaaacgtccaacatctgaattcagcattgatgtgatgtgctctaagtctgaagtttgggacaaattggcgctgagggtgttgagatggaacctgaaaacaaaaaaaaaaaaaatcaagaccaaccataataagtctgcgatatgctctgctgctatttcaaactggcagtgctagctagatttggtcagattcttcaatctgagatgttggcaatttgggtgaaactcacatagattggcatagcagggctgttttgatgctgggtcttcttccaagggtgggggcacttggccgtaaatcatttcacagctcatatcttcaaaatctgcggtgattcataaattcagtacttcagggtacataatcagctaggacagtgtaaaaattgagaagaaaaaggatggacaacatgcatgtcaaatggtagtatgtcattgtcaaaagaacaggaagaggaaactgcagagtttggcattgagtagcacaagaacgatgtctgtcttacttggattcatggtgagagggagtccgaactcgttggtgaagaagttttgcgtcggaattttgcacatgttgacgcacattccgacgcagccgctgttctccaggtacctgaaacggagatgaatgttttctgaattttttactgaatctcgcttgaaatccaagacgaacacagttgaatcgtccgtcttacctgcatttctttatcagcactccactcttctgcttcaccccattgacctcaacctccacaacctgaaagatcaaggaattgatgcaatgagttcatgacgatgaactagctgtgtctctgaattatactcctacctctgatgggccgacgagccagtggaagaaggggacggtgagggcagcgttgaactcgcaggcccacctcgtcggcgggaagagcttcttgaactgctcgggggcgccgggggggagcatggagaggagcacctcgcggacggcctcctgctgctgcgcccgcgtccgccccaccatcacccgccgcgacacgtccacgaagctctcgtagtcccactcccacaccgacctcgagctcttctccttcttcttctccttccccttcccgccggagctggagacgacggcgtacttctccatcttgcgcgcgaacagccccatgaaggcgcgctccaccggcccgtcccggtactccgtcttctcccccatcggcgccggcgcagtcgccgcgcaccgaaccctcctccctgcagacggtacacgcgaccatggcgccgccactggcgccaacagcaacgccgccgccgccatagtcgtcgtcgtcgtacgtcgtcctggctcagctcagcctctgcgtactcttggcgcgtctccaggtttcatgggcggtggtggtggttcttggcattggcgttgcgtcgtcaggcgaacctgaggctgccggcgtgacacggtggcggcgagcggggggccatcgccgtggatgcttggcactgggtgcacgacggccacaataatttggtggattatatggtgatggtgatgatgtttgtggcgattcgattggctcgtggcgcccacgattttttgtgtggaggcccaaaggatggcaagtccaatgggctaaaattttcaccttggaataagttcactttgggtccctctatttgtcactcagtccgattttcgtccctcgaccgcaaaaccgggtacgacccgtcccccaacttacgaaaaccgggcaaacgaggtccctcagcggttttgaaggcggttttggatgacgtggcatctacgtggcttgtttgactaggtctccgtcccacgtggaattaacgtagcgcttacgtggcaattttcaacccgaaaaataaataaacctcgcgggacccacatgtcagtttcacatagaaattataaaaaaggtggggcccacgtgagccccacatgtcattctctcccccccccctttcctccaccgccctgttccaccgcatcctcgcagcccgcgcccgccggcactcaccgacgaggcgacgacatgaccccagccgctgccgcagcccggcgaccggcggcaccacccacctccctaacccgccgtggccgctcggggtaagacggttcccttgttgctgctcccgccgtcctccgccactcccgctcccgccgtgacgacgcaagagtggaccacgcccggccgggcgtaggtcgacggtggcgaccagctgtggagcggagcaaaggccggtgacgagcgccgtcctcggtgccccagcgaacagcatgaggcgaggccccatcgaccaggctcggaggggatccggccacccggcaacggcttggagtagaggatagaggagatccagcgaccggcaacggcgtaggcggaggagctcgggggtcggcaagtggagagacgggcggcggcgaggggcccatcccccggcggatggggacgtcctgtggccacggagcccggcggatgtcgacgccccatcggtggaggaagtcggccggctgcagtagccaccgcaccagcggctccgcttgccttggcagcgctaccgcggacaacgacgccgcggccgctccccccgccgccgggtcgacgctcctctgcgcgctcgccgacgctctgtgggctcaacggctgcggcagctagagccacctcccgccgccccttcctctcccgccggccgccgcacgccgagcgccgctgcctctccaccgcgagagaggagaggggagagagagagttgaagagagggagatacgtgtggggcccatgtgggccccactatatttattatctgacttgtgggcccatgtgggccccgctattttaaaattattttttgtgtgcatctgacaggtggtcccatgtttttttattaatttttcaagatataatgccacgtaagcgccacgtcaatgccacgtaggacggagaactagtcaaacaagccacgtaggcgccatgtcagccaaaagcgccctcaaaactgtcgagggacctcgtttgcccggttttcataagttgagggacgggttgtacccggttttgcgttcaagggacgaaaatcagactaggccacaaatagagggaccctaagtgaacttattcctttcaccttccgccctcggcctgatggacctaggcctatgtctacatgggctgaattcacatttcacaactgacgtaggctgagttcgtttcttttacttccccaactcacctctctctcttttccgcaggcacgtttttaaattattaaacggttttttaaatatatatatatatgaaagttttttttaaaaaaaatcatattaatccattttcaaaatatagctaatatttaattaattatatattaatgaggagtatttcgttttgcgtgcgtgggatctcaaccatagaactcagccgtagtgtacttattggctactttattgctatacacgtaatgtcatcgcttatacacttcatcccataaaaacgactttttgaaatgtgtcgtctataggttctactcatccacgcacgtaaaacaaaatgtcgcattagcgcacgattaattactttcttattttcatatcttatagtttcacaactacattttacacctcaatgcataaccacacaatgttattggacgtagatcttctgcagcactgttgctgcaatagcaatggttttcatgtgaacccgaattcacacgtcagtgtctaccattgcactagcaatactgtacataatctcaccatcggatgtcatttagttggaattaaacccggaatacatataattttcatctcttattcctccctacgccattcgtatacgcaagtacaatcgattaatcatcgcaaagagaaaagaaagaaagaaagaaagaaaaatctatactctcgatcaccaggctacatcagtgtgccagtaaagatgctgaaattcatctcgaaacaagatcatatattccacttgatatatctcacgattctttacgtaagttgctgtttaccactagttataacttgatactagtacatcagcatgtcgatatattgcaatcaatacgatgggaagtactattagctagtacagatcaaaaagtaattaatccattgcaacatgagaaaagttcacatcaaacctatcctatcagcgtccatccagtagagaaaagattagaggaaaaaaggagcaagagagctatgtacgggcgtaaaattacgggacagggctgaaattcgttggaatcctaagaacgtgtgacggcttctctgatacaagttgattaattaattaagctgagctttctgtgtcccatttcgtcaattaattagctaccctctcacacaaacacatttaccatttaggccgagtttagttctaaactttttattcaaactttcaacttttccatcacatctaattttttatatacataaacttccaacttgtccgtcacatcgtttcaatttcaaccaaacttataattttggcgtgaactaaacacacccttacccacactcgaaaaaataaacgccagaatgcagttgtataagctatacggttgaacaaatactgattataaaccgtacagcttatcggcaatgaaataatactaccaatttacaggtaaaacttttatatatgtttcttcagtgatttaaattccaatgctaaaaaaaactttgatgaaatatctcaaagtcaactctaaaattaaattttaatgtttaattaaattagatggctgcatgtaaacaatagttatactgaagttcaaatttggcatctttttcttaaccttctgcggggtcattggattgtcaaaagctagcttgcaacttgctctgaaatatttcatgaagattagataagtcaaaagcctgaattaattgtccttgttgtcgggacaatgggacataagcgggatatggtattttgtactacctccgtcataatatgtaggatgaggttaaattatactagaattacgaatccatgaatatgatgtgtttaatcccatcgtaggttgctacttgctactcccaataaaagagagagtatatgttttatcgttacaaacatccttgtacgtactttagattgtcctagcattagattataatttgaagcaaaatttaactttgaaaattacaagcacctaggacggagggagtagattggaagcaggtttcttcaatctctatggcctgcctcgatcgaatgccctcttttaaaaaattttctcggtgaaggtacatatgggccggacagatcctaattagccagcaccaggcagatgcatcccgggatatgatgggattccacaaaataccagatataaatccagatggagaccataattctaattaactaaactgcatgcatgagatctggagctgtttaatttcatcattagctagagcaagccagtttagcatacatgattttcacattaatttatgcatactatagttatttcacacaaactcgatcactgtcgaaccgtcggtttcattaagtttgatccgccgtgcttaactgaaacatagaaaaacaataaattgaaatacgaatagaaacaaaacatgcccatgctcatcgaaatgaactgatcgatgactagctatagcttctcctttatttaattaattcggtaaaagtacagcaattctcatcatgcactgagctctactacatgtgatctgtacataattacacacgcacataatccatagaaagaaaagcagaaaaagatgagatcgatgaactccaagaactaaagaattaattattacatgcacgatcactatcaatatatattgtccgtgtaccgtaagttgctgctagctagctagctagctacttgtcgattaccaccatggacaatggcggcggcggcggcgggtggccggcggcgtgagatcctttgtgatcacttacagtagacggcggttgcaaggagagggcgaggtagacgatggccggagtgcaggcgaggacgaggccgacgggcaccatccacagccggctgttggacgggtggaacgccacggcccaccacgccagcagcgacgcccccgccatggccgccgccaccaggcacgcgtccacggcgacggcacccgctgccacctcgccgccgatggcgcccgccgccgccgccggcggcttctcgtcgtcgtccatgccgtatatactttggaatggtgacaggaagaaagaggaatgaattgaaggtggtcaatggcggcttattagctctgcttcctgtatggctgtatatagtctcgtactactggtgttggtgtgatgtggtggtttacgttattggaattggaagctgcacccaaccattcactgcctataacttactctttccttcctggtcttgcaccactcggtgtaggtgtgttctgggcatgacaacaacttaacatcgagagaccaaatagattgatcgatcgcccagttcgattatttattttattattgtataaaaataccttttttccttcacagaatttaaacttatttctactgtattgcttattattacacttatttgttcaaagctactgttagttaggagtaccgtttcttaaaataatttactgtataattagagaaaatccaagaaataccattaataaacactcaaaatacaagaaatatcatcgataagtgtgagttccataaaatgatgtcgtacaagtgattttatcccagaaatgctatcatcgttagggttccgtccattccgcgccgttaaatgcatgttcattctatagcatttaatggagtgatattaatgtaaccctgatggtgatggcacttcggggataaaatcacttgtacaatgacatttcatgcaacttgtacttgtcaatgatatttttttggaattgaacgcttgtaaataatatttcttggattttctcatataattaagtagctagataatccgtgacaacattgcatgggacgaggaccaaatcaaaccagccatgtaggcaccatatcagctaaaaccatcatccaaatagcattactgtatctggttttacaaaccgattgaggggcgtgatttgaactcgacgcttattgaaggacctaaagtgaactttttactttctaaaccggagtcaggaaagcccatcaattatatccattctttaagcccaattatcaaaagcccatttcagttccttccctgtctcggcccaaacctccccactcggcgacgcgaccaccaccactctcttcttcttccccattgccgtcgtcgatctcgccggcgacaccgccgccaccgcgcctccgcctccctcccttccgcggatcgtggcgggctagggcgtggactctcctcctcggtcctccacggatcgagcccgccgccgatgggggtggtgatcgagcgggaggagtgggcgctcacgccgctcgcctacccgctcctctccgccgcctccctcgccgcggtgctcctcctcccctacttctccccaccgttgcacgccaccgccgccgcgtccccgtcgtcgcactcccccttcgacgtgggcaccaccccgttcctccgattccgccgcggcttcctcttcgtgttctcgctcgcgtccggtaagcgctctcctccattcaccattctgccttgctcgagccagcgtgcgggggggctctgatgggtctcagttgttgtgtagtggcggaggggatccattccgtgttcggggaggatgagttcgcgcggtgtgggcttggaagggagcagatggccgcgcgccttgccgccgccgcagcagccgtgctcttcctcggtgggctttccggcgtcgtctcagataaactgtgagtagttgtgacttttggggagcaaactatttatccttttcgcagctctgtcagtagagattttcattcagactatgaattgctgctggatggtcgaattacttgtaaattcatcaaattcctcacgcttatgtgatctcccattgcatttcgaaacaatgttgatggtattcaatgtttaaatagagggactactgcttcctagtaatcaggcaagctatgtttggtgcctgattctggaacttttgttgactgttttgtttaaaatctagtcatgatgtttactagttggtggttaagatcaataagagtttttcattcatgttgaccctgctggtagaacatttttttatccttcacttgtttattaccaattctataccaagacataccccttcaccac

SEQ ID NO: 27041 - DNA, 950 bp, Oryza sativa
cataaacaccggttgacatagtcaaccacctcagtgaagctctgtcgtaaattaacctcattcaccatggatggatcaaggacccaacctgattaccatggcgacgactctcgatccaacacaaccttaaaatatttacgtattagaactaatttaattaggagatatagtccagtcatatcacaagtatagaaggtatgcacttacaaggagtagcattttagaagaccagtgtccaacttccggatcctgaaaaggtcgaagaggtcatcaaaacctatagttatataggcaggcgacgataggaacggctggtggtcgtgatgtccaactatggatgactccctcattttccgcttggcattgcttagctccatgtattgcttatgtagctctcggcaagcaatacccatcacagctaacacattgtcctccaccaatggcatgcctagctcaaattgggctggcgccctcacgaccttccccgatttgctcaccggcaccgacgtcgcagccttgcccctttttggctccggcgccaactccccgaccttccccttgccgcgttcacgcttctggcccttgacaagtggtggggagctatcggcctttcttgtggtctttattggagccaagctttgagctatatctgccaagtccatatcagctccaccgggagaatgaggtactgacaatgccggtccacggggagcctcaattgatagcttagacttgggaggtgtaagctccgtcggtcgacttggacgaggagtcatcttcacaactatgtcttctttgggccattgtatgaacgtcttgcgcgcatcgcccaaagtcatgatttcatcatttgggggcacgggcagcggatagcctgaccaagtgtcctttactgtatcgatggacaccttggcatacccagctagcaggtctgcgccgtggaccttgtc

SEQ ID NO: 27042 - DNA, 2593 bp, Oryza sativa
tcagggatggctgaaaacggggcagggacattcgctgctgcagcggctgcatcttcttgtgcccatattgcctccttgccgatgtaccctgcggtgcccagccgatgcgggtgctcattccgctgttgcagtaggcgatgtgcctcgcttgattccctaaactcttgggtggtcttgagagagcagaattcctcccacaccgcttcggttatttgagggtattcatcgaacggcgtatgattgccgggcgggttgacaaactcggtgaagagcttcgacttccaattcttccaagctttgcccatcttttggaatgccttccgcttgagcctatcctttgcttcggctggaaatgtgaaccatttctccattgccgtccaagctcgctctttctcggcttctgtgaccttcccgatatctttatggaggatcccgaagttctcacgtgccgctagcccgcagcagttagaccatcttccaatgacagtcctgggcgccgtgggcctaccactagcgtcaacctctcttataacttgcactgtggtcggccatatattttgtgaccgcggatttctactagacctacttgcacttgtcccgcccgacatcgacgtatgttgttcctgcggcaattctgcagcacaaacagaaggcaatatttgctaaggggtgctagctaaaatttatgtggtcatgtggtgaaaatttatcctatagattaccatgaatttcgggttgttggaccgccgttgtcgcgggatgaccttcggcaactgcctctgtggctgggtttgcttcttcctggatcctcgcaggtgttggggagggcgggtttgcgccgggcgttgacatggtttaactttcgcgaaaaagattataaatttcctaccattagactaaatagcattagatccaatgtaatacggggtatactatgaaagatatggcctcagttttgctgagaaatatgcataaattacaatcatttgcatgaagggataaaaagaggaaatcagctactaggaggaaaaagcaacccaaagaaaatagaacaagtgtagttcatctgttcttatccataaaatagaacaagtgtagttcatctgttcttatccataaagaaaagagcaagtccaggaaattagagcagtagcaacagcatggccatataatagcagcaataagagcagtagcagggccatataacagcagtaggggtatatatgccacaggggcagcaacagcagggggcgattcacataaacagcaacagcagggtggaaattcacataaacagcaacagcagagggaaattcacatagacagcaagggtatataaatcaacaagtgtagataatctgttcttatccataaagaaaagaacaggtatagatagaatgttattaagcaattcatccttggccatttaacaagaagtacaggggcaacaacagcagtggtatataaatcatgcatatattattgtagataaaaaaatgaacaagtgcagaaaatctgttcttatgcataaaaagagagcaagtgcacaaaatctgttcttatgcataaaaaaagaacaagtgtagaggtatataaccactctacactggccatttaataaggaacaagtgaacaagtggtggggcaaaaaaatgaacaagtgtagataatctgttcttattgagcaattcatcactggccatttaacaaggaacacattgggcagcagaagcaggggcaaagatactccacaggggcagcaacaacataaaacaaggaacaggtgtattaacaagtagcccacaataacagcagtagcaggggtgtagataaaaaaggagacagtactactaacttcatgtaaacagcaattcatccattcaattcaagcaagtctagataataaacagcccacaatcattgtggcagcagcagcaagggtatataaatcatgtatataaacaacaattcatacaattgacctattcatagacaacaagggtatataaatcaacaagtgtagataatctgttcttatgcagaaaaaaagaacaagtgtagataatctgttcttatgcattaaaaaaagatcaagtttagaggtatttctgttcttgagcattcatcacagcccaccattaatttatcaagcagaggcaagtgtagataataaaacagcccacaataatttatgtggcagcagcagcaagggtatataaatcatgtatataaacaacaattcatgcaattcacctattcatagacagcaagggtatataaatcatgtatataaacaacaattcatgcaattcacctattcatagacaacaagggtatataaatcaacaagtgtaggtaatctgcggccaatctatcaattctttcatttgaactaaatttcaaaccctaaacctaataaagttccttaattatcaaagaatgacagaaaacaaaatgcatggagaattttggtgtctaggtccggtccgtccatggactacactgaccaatccaccaaaaattccccatgcattttgtattctgtgatggtttgataacctcagaactaccttaaatctacagccaatctatc

SEQ ID NO: 27043 - DNA, 2187 bp, Oryza sativa
  unsure (1)..(2187): unsure at all n locations
tcacaggtaagaccacctgtgacgggcccaacgctgggggccgtcacaggtgaggtcacctgtgncggccctacagatagagcccgtcacaggtgagtttgcctagagcaattttattttattttatttcacttagttcttttattttccttaacatattttcacatacactacatatttttttatacttaattattttatttgactatttcataagcaatatactattgatcattgcgtacatattagagtcatacagataacagacatgtagacataaactacgtacataaattacaaaaataatccttcctcatggtcgacacgtgcatattgaacttcatcttcttcttcctcctcttctagaggtatttcttgacctatgccgtggacgtgctggttgtaatcatcctcgtctgcaatgttctccactccaacaattctccttttcccttcacgaacaacatgtagtttcttgttacatgggtcaactatgtagaacacttgaacaacttgtttggcgagaacgaacggttcatccttgtacgcgttgttagccaagttgacagtggtgaaaccttcattgtcaacttttacattgcaaagatcgacccatcgacaatgaaacaacgggactttgaacttcaagtaatctagctccaatatttgctcaactttaccatagtattgatcacgacgaccaccgtcactagcagcctcgatgcgtaacccactgttctgcactgtgcatttgctgtcttgctttactgtgtgaaaggtgtatccatttatgtcatatccttgccaggtggtggcactccattcaggaccctgtgacaaccactgaagtgtttcactagacaagttctgcaacctggtaattcggttcttcagccactcgttgaaagaagacatgtgcttattcctgacccaactctctgatcggcctaggttctcttgtcggataactacaaggtgttcatcaacgtacggcaccacctcagtcatatgctgtagtaccgtgaaatgagctttatcgtacaccttccgatccaacctaatagtctttcttccaacagtaccaacaccgtcaagcctcccttcatgatgagatcgtggtaatccaattgaagatgtttcagacatgtagtccacacaaaattcgatggcctcttcggtggtgtaactctcgatgatactcccctcggggtgtgaacggttccgtacataacccttaaggatccccaggtacctttcgcaaggatacatctgcgtcatgaatgctggaccacagcactttgtttgcctcacaaggtgcaccggaagatgttccattatgtcaaagaaagttggaggaaagtacatctcaagatgacatagggttctcacaagttctgcctgtagttcatctagtccctcgggatcaatgatcttctgcccgattgcatggaagaaggaacacaaccgctggatcgtgtgtcgcaccttaggaggcaaaatattccttattgcaacgggcaacagctgtgtgataagaacgtggcaatcatgcgacttcattccaaccaacttaagatcttgcagtgaaacgagcctactgattcttgatgagtaaccagatggaacctttataccactcaaacatgttagcaaatcaatcttctcttctttcgagagagtgtagcaggctggaggaaggtaaaccctgccggattccgtggttatgggatgtagctccgaccgaacacccatatcttccagatctcgtcgggtgttgagaccatcctttgtagtacctgggttaagcagtattcccattaaactctcgcatacattcttctcgacatgcatcaaatctatgcagtggcgaacttcaagatccttccagtatggtagtctccaaaatattgacttttttttccacatgctcctctcttttgtcttttgtttttccacatgctcctctgttttttccttcgatgtgctcttctcttttcgctttccaactttcctcttttttccaaactcgttggttattcccatcactaagttgtgcacctctgtccctgttagctctgtcgggggtccggctgtattctgtgtccattgaaattctttctcatattcctatacgggtgacaccttgggagaaatctcctgtgacccatgtagaccgtcttgtgtgaa

SEQ ID NO: 27044 - DNA, 9665 bp, Oryza sativa
gcttgactacatgtacacatccacatccttaccatattcagtggttaaacgattccggaagagcaaaggtaacacaggtttgtagggtttcgttttccattggctcatatgcagattctgttgattgcgatgtggttcctatgcaagcttgttcacttttgctggggcgtctttgggaacatgataatgatgctacacatcatggtaggagtaataaatacacttttatgcataatgggaagaaaattactttgctacctttgacccctgctgaaattgtagaagctgataaagaacgagctgctagtttgaaagttgatgaatctgaaaatcagcaagtggctaaatctgtttttccacctaaaaaggataagctttcacctagttttaaggttgagggaattaagttgaagggtggtgttatgcttgcaacgaaatgtgacattggtgatatttcaaatgatgatatgtgctatttcttgatatgcaaaccagccttggtttctttagatgatattgctagttcgatacctcctgttgttactaaccttttgcaggagtatgaggatgtctttccagctgagatacccccaggattgccacccatgagagggatagagcatcaaattgatttgattccaggagcatcattgccaaaccgtgctgcttatcgaaccaacccagatgagactaaggaaattcagtggcaagttcaagacctttaggaccgcgggtatgtacgtcaaagccttagtccctgtccagttcctgtaattttggttcctaagaaagatggttcttggcgaatgtgtgttgattgtagagccattaataatattactatccgatattgtcatcctattcctaggttagacgacatgcttgatgagttgtgtggctatattattttcacaaagattgacttgcgtagtggctatcaccaaattagaatgaaacttggagatgaatggaaaacagcttttaaaactaaatttggtttgtatgagtggttagtaatgccttttggtttgactaatgcacctagtactttcatgagcttaatgaatgaggttttaaggccttttatggacgatttgtggtagtgactttgatgacatattgatttacagcaagtctttggatgaacacatggatcatttacgtgctgtttttaatgctctacgcgatgcacgtttgtttgctaaccttgaaaagtgcatcttttgcatggaacgagtctcttttcttggatatgttgttactccacagggaattgaggtggatgagtcgaaaattgaagccatcaggagttggtcggttccccaaaccatcacacaggtgaggagctttcttggtcttgcaggattctaccaccgtttcgtcaaagattttagtacttttgctgcaccattgaacgagttgacgaagaaaggcgtggtcttccattggggaaagacacaggagaagtcctttgacattttgaaggagaagcttacgcatgcacctttgctacaacttccaaactttggtaagacttttgagttagaatgtgatgctactggagttggcattggaggtgtgttgatgcaagatggtaagcctgttgcatactttagcgagaagttgcatggtcctattttgaattattccacatatgataaggaattgtatgctcttgtacgttccttagaaacgtggcgtcattatttttggcctaaagaatttgttattcactccgatcacgaatcgcttcaatatcttcgctctcaaaataatttgaatcgtaaacatgcaaaatgggttgaatttattgaatcttttccttatgttatcaaacacaagaaagggaaagataatgtgattgcagatgctttgtctaggcgctatactttcttatcccaacttgaatgtcggatttttggacttgaatcaattaaagaacaatatgcacttgatcctgattttaatgaagtgatgataaattgtaaagagggacgtacttggaacaaatttgtgatcaatggtgggtttgtttatagagctaaccgtctatgcattccagttggttccgttcgtcttttgttgatacaggaagcgcatggaggagagttgatgggacattttggagctaagaagacggaagatgttttggccatgtatttgtcacatcctgatttttgtttcaggatttataaattatttaatgaattattattagaatttatattaaatgttcattaatttacaagtgaagttaaatgtgggaaataaaattttctaaatataaagcatggatggatttaattttttattaaattctccatggttaattatactctctggaatattctcggatttttcggagctcaattcctaatttttaatcttacaaagagcatttcagtaattacccacatattaaattgatcattaaatggtctaattataattttgttaagtactttgagtgtccaagtattttcaggatttttcttgaaattatttgagcattggaagtatttttaacgattcaaagatcatttcattgattaatttaattggaaaagtaataataatcctcctcctcagcttgggccattttcggcccattccttcctttccttcctctctctttcgccggcccaacctgagccgcctcctctcctctcagccaagccggaaaagtctacttttcctccctgagctactgttcatcttccagctcaggcagatcccgagctagccgtgccgtgcacagtgccgccgtctcttccttctaaatctcgcctccccgttgctcctttttccaatttagttgaggggaaatattcctcttatcctcctctatctttaccctcaaaaatcggagctaaccgttgagtatcttatccgaatcgaactcgttttcgagtttatctccaaaaccgagtttttgatttcccggatcgatttcttgcgggaggagtccgatctcttcaatccaaggctataaataggaccccctagtcctcctctttcgtttgcccctctcccgtgcctcgtagcgccgccgccacgtgctccaccccgccgtcgtcgccggccgagctccatccgcgtcgtgccgtcgcctccgtcgtcgccgccagtcgccgtcaccgccgtaaggtgcgccgaggtgtggagaagcccggccgccggagccccgaagccgccgatcgccggagccccgaagccgtcgaccgaagccgcgccgccgctagacctcgtcgccggccgtcatcgttcgtcgtttggttcgagggtgagtaccgttgggttcgtctcgtcgtcctctacgtgtaaatgtcctccaaagtcgcagccgaccatccaatctccggcgaggtcgtcatcttggttcggccgccattgatgaggtcatcatgacgtcatcatcgtttttctttttcctgtttttctaatagattaaatcttcagaaattcataactaaatcatcgtaactcggttttgagtggttcaagttgctaaattcatctaaaattatgatctacatgtttgtttactttttatgtattgtttatttggtttttattagtctttttcttcgttttgcgtgaaagttagtcgtttccgtcgttgcgaaggttcgcgagtacgccggaagtattcaagaagattaattgaagaccgattattgcaaggcaagtcacacagatcccaaacaaccctttgagcatgttgaacccgtttaaagctattattttatttcaactatgcattatttttgaatgtcatcgggtggtgaacctttccccgttaattaatggccgaagatgatcttattttcctatgggttataattcgattagcatgaaccttatatattggattggttcagctaaatgctatatgtaagtttgcttagctatgcttagaaacattagctaactaaaggggttaattataaactatattatattatattattattatggttatatttaatggtcgctcacgatggttaatcgtgtgatgttaattaattgataattaaaatctggttaaggtgggttgtgagcatatggttttgatggttgtgctcatgacaattaaggaccggttcgcgagctactgttgtgaaacatttaccgtgccaaccacaagccagcatgggcaacggctttaccttttgtatagcatggttcattatagtgtgccagactgtgaagcggcgagaagtccgtgggggtcgctggggagtccattgcctctggttttgagggggagattatgatccaggaacggtgcactgttttgagttgtgttgtgcaaagggtattgtcacgatttccccctttgcaatgccgtggtggtatttcggggcatggcaacatgtgtggaatcgtgtcttgtgggtacagtggtacacctctggccagagtaaaactattcgaatagccgtgcccgcggttatgggcgagttgagcaatgtttttcgtgattagtctcacacctctcacaataattatggatgttataactggtaataatttgcttagctcctggtttggagttagatctgtacagccgggtatggttgttcaggatggttgggcctgtgcagcatgggtgtgctgttcagtgttgattaaaatttctgattaactactccactgttttacttctcttaaaagttttgctaaatgctgcttttgcaaatgagcctatattatgccatcctttggtatccttgtgcacttgcatatttgctatgtggcttgttgagtatgtcatatgctcaccttgcaataatcaatcaacctcagttgaagaaaaaggatccagaaggagaagacgtttggcttatacccgagttgagctgcctgtgggagtggagccggagattcgctagattttattttccgctgcagttttcttcatggtgaggactaagtgcctcttaagtaagtatttagcgttttagttaatttgatgaatctgtatattaaattgtcagtttgtgtacctcggctgatttctggacgaggattttatgcacaaataagttcggaaattactagtgaatttctgggcgtgacatatttcttttggccaaggatgagaaaggatgttgacaggttcatggcacgttgcaccacttgtcagaaagctaagtctcatttgaatccacatggtttgtatatgcctcttcctgtaccttctattccttgggcagatatttctatggactttgttttgggattgtctagaactaagagggggagggatagtatttttgtagtggtggatcatttttctaagatggcacatttcataccatgtcataaaagtgatgatgctgttcatattgctgatctatttttccatgagattgttcgcttgcatggtatgccttctattgtttcagatcgtgatgcaaaattcttaagtcatttctggcgcacgctatggaacaagttgggtacaaagctattgttttctacaacatgtcacccacaaacagatggacaaacggaggtagtcaaccgcactttaggtaccatgttgagggctattttgaagaaaaatttgaagatgtgggaagaatgtttgcctcatatggagtttgcatacaatcgggcaacacattctactaccaaggtaagttcttttcaggtagtgtatggtttcaaccctcgtgctccaattgatatgttgcctttacctactagtgagagggttcataatgatgctaaggcacgcgctgaatttattttgaaaatgcatgagtcaaccaagttcaacattgaaaagatgactgaaaagtatagaattgctggtagtaaaagtaggcaagaggttaagcttgaaccgggtgatttagtttggttgcacttgagaaatgatagatttccggaattgagaaagtctaagttgatgcctcgtgctgatggcccttttaaaattgttgagaagattaatgataatgcatataaacttgagttgcctcccgagtttggggttagtcccacgtttaacatttcagatttgaagccatacttgggagaagagtatgagcttgagtcgaggacgacatcaattcaagagggggaggatgatgcggacatcactacctcggatacacacaacaatcctccaatggtcattcaaggaccgataacaagagctcgtgcgcgacaattaaatttagaggtgagttcgttcctatgttcttctttgtatgaattcgagaatagattgcaacctaatgattatattgtgcttaggaacaatggaggggacaaagagacacttggagaaggacttagagtcatggaggaccatcggggacgtccaagtcaaggtggaggcccaaaccaagtcgacgtcgggtgcaattcggagtccaggaccagtctgcactaaaacgggcgcccaggtcgcatacgtgctcagattggggcgttctttatatggatggaaagctaagaaggtaacctttcaaatggttttgctcccacatccaaattctttccgagtcaacaggaattgaccgaacaatttgacgtccaaaatctgtcccagtgctgcgtcaccgtatttgggcctttggcccgtgtatcgtgttggaacccattagggttgcatcgagaggggtttgcacgaccctaaactctatatatcagtacccgccatcatgtttaggtttttgggttttgcttagattaatctgtcgagaacagtttcgccgctagttcggtttgtaagaccccaactcgtgagcttaatcattcatctgcaattttggttgtttttctatctcgttcttctttgtgttcttcgattggcaaacagggattagccttctcggtgtggtcattcgcgtttcgacacgggtgataaccagaggagacgtggtgctgcaattgcggggctcaagagcgtgcgcgttcaagaagccggatcgatttgtgtggcgactccgcccaaatcgttgtttatcagaaccttttggaagatcgggaaccctagtgcacatcatatacttactccagaactaacgagtatatatatatactgattatgtctttttattggtacgcgcagtatatactactgcaacgagcgaatgagtatatactgttctttcacggaatgagtatatactgattttttttttggaacgagtatatatactgacttttctcggagtggtatatacttatttcttctccaatcggtatgaacagctactcggagtggtatatacttatttcttctacaatcggtatgaactgctctttggtcagtgtatatatactacattcctcattgaaggagtatatactgcttcttttttttatcagtatatgcatttgttattatttgagtatatattgtatgcactacttgttctgtcagtatactgcatgtactaattgtcatgtttggtcggtatactgcatcgtcctcgctaaaggaggttatactgccttcttgtttgatcggtatatactatgtatactactttttttcactcagtatataaataagtatgtaccagtatttcttagataagtcgtatatttgctatccatggaagctggatgcatatgcttttcagttgaatagaataattaatatgcttttcacgtgcaaattcagatgtatgcctgaatcactggcaaagtatcggctgttgcattatgaataaacctaaattaatgaaataccctagaagggcactgaattctgaatggacattaccagaccaaagaaaaagatcaacgcagactttcggaaactaagaacaaaacataacgggatcacccctcgatgtggctcatcgaagaatctctgcatccccacagacagatctcggttaacatcgatgggatcacgctgaccgcacgccggagagaggtggacaagaatgtgtcttcctggattaacaccattagctaggaatcacggttcaatgccgacgacaatgctgtcgccgcacggccacacatgctgggctgttctgtcatcagcaccatctacgtccacgatacatgcatctcgcatttgcatgcaccaaacaaattcgatctgcatgcatgcattatcgatttgcaacgtagaaaaagcaaatcaagaaaatcggaagaaggaaggacttgcctgcagtatagtcgatgttccagttccggacgacgctcaacgtcgtcttgatcgtagcatgggcctgcatcgatgccgtcgccgcacggccacactgacttgcccgaagatcaacggcgtcgttgtctggtcatagctcttcggccagccagtcgcctgcggatagtcataccgaaggcattggtaatggaagacgccggcgtagacatcagcagatgccacgaccttcgaatagccgatgggtcgcgccgccgtcgccttcgaatcgctgatcgagatacctgcggatcgatctatcgattctgtttacaaccacccatgagattttaatacgagctattcaaaagggttccggttattacggaataattcagattatgaggatttttttcgtaactaaaaatcaaaacgggctcggtatctggatccgcttgctgacttggtcggtggtgttcgctgatggacggtggatggaaccgggagtacctactcctgggagtatagaatcattatatatatatatatatggggagactattctatacccccggtcgccgtcaagagcccaacccactaccccctctttttattgggctcaaaacccacctgctaccccagtcaaagcatggtcaaaggacggtcaaatcgctgccatgtcggtcaaacccgtgtgctaacttcctcccacatccacctatttgttgtccttgtctcgtacgaacggtgcagtaacatgacgaccactatgcagtaacactgtaccttacttgcagtaatactaataaaatatagttaaaatatagtcatgacggatctagttttgtagagctttttttttaaagcattacggtgcaaacggttcaaaaatataatatgtggtgtgagagatattattgtttaaagatgtgaattcaaaagatatcacttgcatttacattttactagttcaaagtgggtgataggtcctgtacctgtgtttggttgttaccacctcttattgcagtaatgctattaagaaattgcagtaacatgcagtgttactttaaaagttatagttgttactgcacacatacagtaacgccatgatggaatggtagtaacacacaataaaaagtagtaacaataatgatttagtattactacttatggagagataaatttcaaaataccaatcttcgagaagaaatagtagtaacacactcgattactgtaaaagcacataaactgttacaactctacaggacacaaagttccatagttgtaagaagctaattagaagacaaatatatatgttattacaaaactcataacaagttactatgttttagtagtaacattatcgtataagtatagtaacacgtcacgttactgcaaaacatataggatgttactgcacttttgatagtaacatcgtagtgaaattgtagtaaactagaaatcgaaaaaaaaatatatgagttaaaagtctacatgctaaccatatatttgttactgcacaaaagtgtaagtgttactg

SEQ ID NO: 27045 - DNA, 1491 bp, Oryza sativa
actccacctaagacttcttctccaaagcttctcttactgaaggggggaaagactgagcaagaatgagtacaaccacagtactcagcaagccacaccggagatgcataattaatgcaagggagtacaaggggataataatataggggttaagttttgcagtaaacagcatttaaaagtcacttagttgcccaaagccattttataaagacgatcctaaagctacacagtattactaatcaaggccgtgaacccacacgaacctgccttaacccaaggcctacgatgattcagaccgaactggcaacccgaccctcggtcccagctcgtcccaagccaacccatgccaaccattccacattttagttattaagcaggttttaagaatttaaaacactaacttgggtacattgctaggcttgcccataaccgagggcgcggctattcgaatagattatactctgatcagaggtgtacatctttacccacaagacacgtcttcctcacgtgtaaccacgtgccacataccaccacggcatacggacggaagacgcgacatagtttccaacccatcctagccatagacaagagtaccgacccaacccacctacggccggaacccccggacaggcaggcagaattgagcccctagcagcaggacaccagccctgtgccatgacatctcgactaccgggccgcagcccgtgtagccttcatttgtcctagagatgtccatcgacccccgacttcgtccatctccatccgtgtacttttgtttataaccagactgagccacaaactaagccttacccactagacatgtggaagtacggtagtgctttgcaacagaggcccgaagaccggtccttatgtggccgaggtgctactaacaaaaccatgcaccccgagcccagcctaaaaccattttgagggttttgaatagagggggaggtgtgcattcaattccacaataatccaaccattccatagtgtccaagtgatatgaatattcccaaagtctagagttataaaaccacctaatgttgcctaattaatcagcgaagcatctacctaaattcatactagtggaaccatgaatagagtacccactagttggggttttatttattctagggtgaacaaggtaataataacaatagcaataataatgtcataacaaaggtaaataggcatggctaaataaagcagtgaaaacgcgggaatttaaataaagcgataatgcattaatttaaatcaaaataattttataaactgggattcaatatgctcaaggatgatgtgacttgccttgctaagagagaacggccttccgaaccttcggcgacgaccgcgaaccatgcttcgagaaccttcggaacgacagaagctacgcgaagcacacaagcaaagctaaaccctataaagaagcaataacaatacataaaaagaaagcacacggttctttaggttataacaaacattaggagacttgaa

SEQ ID NO: 27046 - DNA, 829 bp, Oryza sativa
caagcatgacttgccttgctctgctgctggaggaacctcggcgactatttcgaagtacgccggagcgtcggaagagccggaatctaacgacatacaaggcaaacaatgcaaacaggctataagtctactgaaacagagaacaaaaccatttttaatggattctacacatttttcttgatttactgagacttgaaggggcttaaacggagctcggatgaattagttatgaatttcagaagattcactgtgtttattactataacaaaaaggccttaaataatttattgggcaataattcccagggctgacgtcatcaaggggggggcggcgccgacaggcgggtcccaccggtcggtggctcgcgagagagggggaagggcgccggcacacgggccccactcggcagtggctcaaggggggcggtccaatgtggaccgggatcacgcgggtggtccaccgccggtccacgggaccgacggcccagatcggccctgagccgatcgggcggtggcggtagaggcggccgccgagctcggctcggcatcaaagccggtcggccagccatggctagtggcgacggcacgcggccgacggcgacggcgaacggcggcacgggaggcggcggcggcggccgaaggcgacggcgcatgacttgaagcggcggcgcggcactaggagggagaggaaggggaaaagaggggagggatgcctcaccgcgagtggccggcgcggagggagacgatggctaacggcgatggcgagccacgggaagacggcggcgacgggcggacgagcttcgggatgccctaaggaagcaagagagagagat

SEQ ID NO: 27047 - DNA, 17544 bp, Oryza sativa
gggcggcctggctgggcctcggcctgcggccggcccagctgggagggggaaaaggagagaatgggccggcggcccattcgaaaagggaaggggaaaaagaaaaagaaaaagaaagaaaaggattttccctggaattaaaatattgcttgctcaattttaattggttaaaattatttctagggctctgaaaattccactaaaaaacttgttagcgaatttagacatgtagaactcaagaaaaattccacatgccagattcgattattatttgtattactttcttagggttttctcatgctttgcaccggcattttcttagggtcatttataaataaaattttaggcttgggaggagaacttcagggtgtgacaattatcacccgggaaaggctaatgtcgtagcagatgcccttagtaggaaaggctattgtaatgctatggaaggatgacagttgccattggaattgtgcaaggaatttgaaagattgaatctgggaattgtcagtagaggctttgttgcagctttagatgcgaagcctactctcattgatcaagtcagatgtcacgcccggaatttctatccaaaattccaaacgcttacatgtgtgttaaaccctcgtccaggaatcagccgaggcacacaataataaattgataatagagtacaaataaataactatttaatattcgcaaataataaattattacagaggtaaatagttcctctcaaagaataacatactacgcagcggaaaataaaactaaagcaaactacgaaacagctatggcaactccactccacaggcatcttaaccaagaacaagcttaatcctccaggacatcaccttcgctgagatactcctcctctgatgattgaatattgcaagaatgagcatatgacatactcaacaagccacacagcaaatatgcaagtgcacaggacaacaaaggatggcataatatagcttatttgcataaacagcatttaataaaaatttaagagaatagtaaaatagttgtataattaatcaatattaaataaacaccatacaacacacccgtgttgcataggcccaaccacatttgaacaacctaccccagttgaacaaattaaacctccaaaccaggaatataccattccaaaccaggagtcacattaattaccaccgttaccatttaatgtgtaatatgagactaatcacgaaaaacattgctcaactcacccataaccgcgggtacggctattcgaatagattaaactttgatcagaggtgtaccactgtacccacaagacacaatcccacaacatgttaccatgcgccttagtaccaccacggtacctcggaaaggaactgtgacattacccctcgcacaacacaactcaccacagtgcaccgttcctggatcataatctccccctcaaaaccaaaggcaatggactcccttgcgacccccacggacttttcgccacttcacagtctggcgcactataatgaatcatgctataccaaagaatatacccgttgcccacgctggcttgtggttggcacggtaaatgtttcacaacagtagctcgcgaaccggtccttaattgtcatgagcacaaccatcaaaaccatatgctcacaacccactttatccaggtttcaattatcaattaattaacatcacacgtttaaccatcgtgagctaccatttaatataaccatcattaataataacaatataatataatatagtatataattaatccctttagttagctaatgtgtctaagcatggctaagcaaacatacatatagcatttggctgaaccaatccaatatataaggttcatgctaatcaaattataacctataggaaaataaagtcatcgtaggccattaattaattgggaaaggttcaccacccgatgacattcgaaaacaatgcatagttgaaataaaataatagctttaaacgggttcaacatgctcaaagggttgtttgagatctgtgtgacttgccttgggcttccacaaacgcttcggaatattcctcaacagaaacgcactcctccggaacgtcggaaactaaagcaattaaacaaaaatcaacacaacagtacaaaaacaagcataaacagtacatgtggatatttttaacatgtagatcttgattttagaaaaatttagcaacttgaaccacttgaaacggatctacggttatttagttatgattttccgaagatttaatctattagaaaatcgggaaaaagaaaaaccgatgatgtcatgatgacatcatcaatggtggccggctcggatggcaagctcgccggagctagagcggccggctgcggatttggaaggcatgcacacgtcgagaacgacgagacgaccgcaacggtgctcaccaacacggctaacgacaaccgacgacggccggcgacgaggtgggtggcggcggcggctcggtcggcggtggcggcggagcaccggcggtcggcggcttcgagggacgggcggccgggcttctcctcgctcccgcgcacctaacagtggtggcggcgaccggcggcgacgacggaggcggcggcgcggcgcggatggagtcgtcggcggcgacggtgagctaaacggcggcggcgcggcggctacgaggcacgggaaagctcgggagatggggcaaacgaaagagggggactagggggtcctatatatagactttgattgaagagatcggactcctcccgcaagaaatcggcccgagaaaacaaaaactcggttttggagataaactcaaaaacgagtttgattcggataaaatactcaacggtttgctccgatttttgggggtaaagatagaggaggatgagaggataaaaacccctaaccaatcagaagaaaaagggccggattgggtgcggatttggagcgggaggcggcgtggcgcgccggcttgggctcggcttgcagccggcctgaggttagggaagggtccgacatgtggggcccacatgtcggtctcccgagtggaggggtggctggcgggctggctgggccggctggtccggcttggccgcgggtgagagagggagagttgggccaaaaacagcccaacaacttaaggaggggtttttggaactttttcaataaaataatttgtgaaatgttgtttcaattattaaaaatacttcccttgctcaaataattcccagaaaattctagaaatagaggaacaagcaaagtatttaataaaattttatctagctcatttttatgttgaaaattttcctagattattagggtttagcttgtaggcttttaatttaatttctaaaaatgacttaaacaatgtatttttaaattaggcgatttttagggcgtgacatcagagaagctcaaatcaatgatcccgatatccatgagatcaaaaagaatatgaaaagaggtaaagctatcggtttcttggaagatgagcaaggaactgtatggttgggtgagagaatctgtgtcccagacaacaaagatttgaaagatgcaattctaaaggaagcccatgatatgttatactccattcaccctggtagtactaagatgtaccaggatctcaaggaaagattttggtgggcaagtatgaagcgtgagatcgcagaatatgtagcggtatgtgacgtttgtcagcgagtcaaggcagaacatcagaaaacccgcaggtttgctgcagcctttgaagataccagaatggaagtgggaggaaatcggtatggatttcatcaccggtctacccagaacatcattgggccatgactctatttgggtgatagtcgacagacttaccaaagtggctcatttcatcccggtaaggaccacctattccggaagtcgtttagcggaattatatatggccaggattgtgtgtttgcatggtgttcctaagaagatcgtgtcagatagaggtagccaatttacttcaaaattctggaagaagctccaggaggagatgggttccaagctgaattttagtaccgcttatcatccgcagacagatgggcagaccgaaagggtaaatcagattttggaagacatgttgagagcttgtgttttagacttcggtggaagttgggataagaatttgccttacgcagaattctcgtacaacaacagttatcaagctagtctccagatggctccttacgaagcactgtatggtcggaagtgccgcactccgcttttgtgggatcaaacaggagaacgtcaggttttcgggacggatatcctgagggaagcagaagaaaaggttaaaatcattcaagaaagattgcgtgtggctcagtctcgtcacaagagttatgccgacaatcgccgcagagatctaagttttgaagaaggagattatgtgtaccttcgtgtcacgcctcttcgaggagttcatcgctttcacaccaaaggaaaattggcaccacgtttcgcgggaccttacaagattgtcagtagaagaggagaggtcgcttatcagttagaattacctcaatccttagcaggtgtccataatgtgtttcatgtgtcacagttgaaaaagtgtttaagggtacctaccgaagaagcaaatcttgaatagattgaagtccaagaggatctaacatatgttgagaaaccaatccgtattttggaaacaaatgagagaagaaccaggaatcgagttatctgtttctgtaaagttcaatggagtaatcactcggaagaagaatcaacttgggaacgagaagatgaattaaagccaactcatccgcatttgttcgccagttcttccgaatctcgaggacgagattccgtttaaggggtgtaggtttgtcacaccctaaaaatctccaaattataaattgttgtttaattggaattattagaatttattttaaaagcctagaagagaagatctaattttaattaataaattccaatataaaatggggccagataaaatttcattaaatactttgcttaattctataattcctagatttttctgggatttatttgagctaaggaagtatttttaataaatggaatttcatttaatgaataatttaaatggaaaaaggtttttaaaattcccttttggttttgggacgaaaccgctctctctctctctcccttggcccaagtcagcccaagccgagcgccgcccgcgcgcgcgcgtgcgaccgccgctgacaggtgggtccctgtcacgcccggaatttctatccaaaattccaaacacttacatgtgtgttaaaccctcgtccaggaatcagccgaggcacacaataacaagttgataatagaatacaaataaataactatttaatattcacaaataataaataattacagaggtggatagttcctctcaaagaataacattctacgcagcggaaattaaaactaaaacaaactacggaacagctatggcgattccactccacaggcatcttaaccaagaacaagcttaatcctccagatcatcaccttcgctgagatactcctcttctgatgattgaatattgcaagaataagcatatcacatactcaacaagccacacagcaaatatgcaagtgcacaggataacaaaggatggcataatatagctcatttgcataaacagcatttaataaatatttaagagaataataaaacagttggataattaatcaatattaaataaacaccatacaacacacccgtgttgcataggcccaacctcatatgaacaaccaaccccggttgaacaaaccaaacttccaaaccaggaatataccattccaaaccaggagtcaaattaattaacacatttaccattaatgaataatgtgagactattcacgaaaaacattgttcaactcacccataaccgcgggtacggctattcgaatagattaaactctgatcagaggtgtaccactgtacccacaagacacaatcccacaacatgttaccatgcgccttagtaccaccacggtatctcggaaaggaactgtgacaatacccctcgcacaacacaactcaccacaatgcaccgttcctggatcataatctccccctcaaaccagaggcaatggactccccatcgacccccacggacttctcgccgcttcacagtctggcgcactataatgaatcatgctgtacaaaagataaagtcgttgcccacgctggcttgtggttggcacggtaaatgtttcacaacagtagctcgcgaaccggtccttaattgtcatgagcacaaccatcagaaccatatgctcacaacccaccttaaccaggttttaattatcaattaattaatatcacacgattaaccatcgtgagctaccattaaatataaccataattaataataataatataatataatctatatttaacccctttaattagctaatgtttctaagcatggctaagcaaatatacatatagcatttagctgaaccaatccaatatataaggttcatgctaatcaaattataacgcataggaaaataaaatcatcttcggctattaattaattgggaaaggttcaccacccgatgacattcgaaaacaatgcatagttgaaataaaataatagctttaaacgggttcaacatgctcaaagggttgtttgggatctgtgtgacttgccttgagcttccgcaaacgcttcggaaccttcctcgaccgaaacgctctcctccggaacgttagaaactaaagcaaaaatactaaaatcaacaaaacaatacaaaaacaagcataaacagtacatgtggatatttttaacatgtagatcttgattttagaaaaatttagcaacttgaaccacctgaaacggatctatggatatttagatatgattttccgaagatttaatctattagaaaaagggaaaaagaaaaaaaacgatgatgacgtcatgatgacatcatcaatggccggaccaagatggcgacctcgccggagattggatggtcggctgcgaaattggagggcatgtacacgtagaggacgacgcgacgaacccaacggtactcaccctcgtgccaaacgacgaccgacgacggccggcgacgaaggggcgtcggcggcggctcgggatgaccggcgacggtgagctacggcggccggcggcgaagggggaggtgcggccgggcttccccacaccttggcgcaccaagtggcggcggcggcaagcggcggcgacggcggaggcggcggcgcggcgcggatggaggatggccggcgacggtggcggggtggagcacgtggcggcggcgctacgaggcacgggagatcgcgggagagggggcaaacgaaagaggaggactagggggtcctatttatagccttggattgaagagatcagactcctcccgcaagaaatcgctccgggaaaatctaaactcggtttttggggataaatccgaaacgaactcgattcgggcaaaatactcaacgatttgctccgattcttgaggggaaagatagaggaggatgagaggataaaaacccctcaaaaaaccggactaaaagtggagagattgaggcggaatcggagacgggagacggcgcggcgcgcccggctcgggctcggcctgaggtcggccggaggtggaagaccaccccgacaggtgggtcccacctgtcggcggctggggaggggagggcggctcggcgacgggttgggccggttttgggctggcttggccgcggggagagggaaaatgttgggccgaaaatggcccaatgactttaaggagggattttggaactttttaattaaaatattttgtgaaatgttgttccaaatattaaaatacttcccttgctcaaataattcccagaaaaatctagaaaatagaggaacaagcaaagtatttaataaaattttatctagcccatttttatgttgaaaatttacctagataattagagtttaacttgtaggcttttaaaataatttataaaaatgatttaaacaacgcatttttaaattagacgagttttaggcgtgacagtcccacccgtcagtcgtcgtcttcctcttgccgaaaccctagccgagctgcgccgccgccgccattccaaatccggccgcccctttccgtttccggtgaaattgattgaggggaaaggatccccgtgatccactctaccttttcccttttgaaaacatcgtctaaatcgctttggaaatcgccggatttgagttcgattcggatcgatctctctcctccgaaccctaaactttccttcccgtcgccggtcgccgtgggccttcgccgccgctccctagcccctataaattgacccccgagctcccctctacccgtcgccactctcgtcttagcccgccgccgtatgtagcgccgcctccgcgtgagaccttgagccgccgtcgccgccgtcgctccggtcgttgtcaccactcgggaaggccaccgtcgtgatcgccgtctcgttgctgtctccgtccgcaccttctccgtcaccgttgaccgccggaacgccgtcgccgtcgtcaagccgaaggtcgccgccgccttttcctcgtcgccgacgtcgtccgttgctcgtccgccgtcgctttggtcaccggtgagttcgcagcgatgcccgcatcgtttcggtgccctccattcgcgccgccgtgccatcgtttgccggcaagcatgtgtgcccaagccgctgccagtggtgacgtcgtcactgacgtcatcgtcgtcgtccctcgtggtctagccgtggaccgatggatctcggtcgtccattttggatggatcgatctcggccgtccgtttcatgaaccgccgccgtgcacccggtccaccgtaaacccgacccgctgatgcaataattcccttttccttttcaaaaataattaattattgcgtcataattcaattaaaatctacataaatgatttaaatcgatttaatctttgaaaattcataactaattcatcttagctcggatttagttggttcaagtctctaattttttctaaaattgagatctacatgttaaaaatatccacatatactgttcatgcttgtttatgtgctgttttggtgattttgttcttttctctttagattccgacgttccgggagagtccaattttgcaggagaagactttgaggatttccaaggccagcaaggcaagtcacacagatcccaaacaacccttcgagcatgttgatcccattgaaagctattgtttctattcaactattgcatttattttcgaatgtcattgggtggaattaacctattgtttattatggcccttttgttcttgattactttattctttgataccttgggttaatgtaatttgacaagttgagctttatatgatggttcagctagatgttagtcataattgcttagccatgcttagaaacattagcacactactgggataacttatgcttcactattatttaatgatggtttaataatagctcatgatggttaatcatgattggttaattaattaatttgccaactaaaacttgataatggtgggttgtgagcacatggttttgatggtcgtgctcacgacaattaagaaccggttcacgagtttcggttgtgaaacatttaccgtgccaaccacaagccagcgtgggcaacggctttactttctgtatagtacggttcattgtagagcaccagactgtgaagttgcggagataagcccacgggggtcgctggggagtccataccttgtttataagggggtgattatgatccgggaacggtgcactgctttgaattgtattatatagagggtattgtcacaatctcaattcgagtacttgtcaagtatcgcgacgcatggttgacatgatgttgaggttgtgtcttgtgggtacagtggtacacctctggccagagttcaaactattcgaatagccgtgcccgcggttatgggcgggtctaacaatgtctttcgtgattagtctcacacttctcaccatactaaatgatgctgttaataacttgatagctcctggtttggaatggttaattcctggtttggagatagaactgtgcagccgggattggttgttcagaatggttggcctatgcaacggggtatgttgtatagcgttggatcaatattgtttaattattatttaactgttttattaaattctgaaataattgttaaatgctatttaagcaattgagactatactatgccatgctttgttatcctgtgcacatgcataattattgcgtggcttgctgagtatgtcatatactcaccttgcaatctttcatcagaggaggagttctacagtgatgctgatggtgtggatgattaggcgtagccctagtcaagttgcctgtggagaggagtcgcctgcgctgtttcttttattttccgttgcttagaactttattgattgagaggaactatttacctctgtaatgacattttattcgcttattaattagagtaataattgtgctctattatcaatttgttattgtgtgcctcgactgattccaggacgagggtttacacacatgtaagcgtttgaaattttggatagaaattccgggcgtgacaacctatcatgcgtctctaatggcgttctataaagaatgcttatctttttgtcattaatatagtgatgatccttctgtcgtcatacagtctatgacgttcatcttcgtcactatcaagcccagaaattatgataagatgccatgtggcctgttaaggcccatgtagtcagggccggctcgggggggaggagggagcgggatggccgctctaggcccccacccacacaccttgtcaggtgtcacgccctaaaaatcgcctaaattaaaaatgcatattttaaatcatttttagaaattattttaaaagcctacaagttaaactctaataatctaggaaaattttcaacataaaaatgagctagataaaattttattaaatactttacttgttcctctattttctagaattttctagcaattatttgagtaaggtaagtatttttaataattggaacaacatttcacaaattattttaattaaaaagttcaaaaatcccttccctaagtcgttgggccgattccggcccaactcctctccctcccgcgcgcccgggccagcccaaagccgccgagccggcccaacccaacccgccagccgccccctccactcgggagaccgacatgtgggccccacatgtcggacccttccctaacctctagcagtcgcccggccgagcccagccatgccacccgagccgccccctttcccctccaaatccgcatcgaatccggcctccccgagtccgattgtttgtgggattttgatcctctcatcctcctctatctttaccccgaaaaatcggagctaatcgttgagtattttatccgaatcgaactcgttttcgagtttatctctaaaaccgagtttttgatttcccggattgatttcttgcgggaggagtccgatctcttcaatccaaggctataaataggatcccctagtcctcctctttcgtttgccccgtctcccaagccttcccgtgctccgtagctccgccgccaccgccgcctagctcgccaccgccgccggccaactccggtagcgccgcgccgccgccttcgttgtcgccgctgcttgcagccgccgccaataggtgcgccaaggtgaggggaagcccggccgcccgtcccccgtagccgccgaccaccggagcctactcgccaccgccgaccggagccgccgccgccgttcatctcgtcgccggccgtcgtcgttcgtcgtttggctcgagggtaagtaccgttgggttcgtctcgtcgtcctctacgtgtacatgtcctccatgttcgcagccgaccatccaatctccggcgaggtcgccatctcggtccggccaccattgatgatgtcatcatgacatcatcatctttttctttttcccgtttttctaatagattaaatcttcggaaaatcataactaaataaccgtagatccgtttcaggtggttcaagttgctaaatttttctaaaattgagatctacatgttaaaaatattcacatatactgtttattcttgtttctgtaaggttttgttgatttttgtttaattgctttagtttccgacgttccggaggagagtgtttccgttgaggaaggttccgaaacatttgtggaagcccaaggcaagtcacacagatcccaaacaaccctttgagcatgttgaacccgtttaaagctattattttatttcaactatgcattattttcgaatgtcatcgggtggtgaacctttcccaattaattaatggccgaagatgactttattttcttatgggttataacttgattagcatgaaccttatatattggattggttcagctaaatgctatatgtatgtttgcttagccatgcttagaaacattagctaattaaaggggttaaatatagattatattatattatattattaattatggttatattaaatggtagctcacgatggttaatcgtgtgatgttaattaattgataattaaaacctggttaaggtgggttgtgagcatgtggttttgatggtttgtcacatcctgattttcgtcttaggatttataaattatttaataaattattattagaatttatattaaatgttcgttaatttacaagtgaagttaattgtgggaaataaaatttcctaaatgtaaagcatggatggatttaatttttattaaattctccatggttaattatattctctggaattttctcggattttttggagctcaactcttaattttaatcatacaaagagcagttcagcaattatttaaatattaaattaatcattaaatgatctgattttaatattgttaaatactttgagtgtccaagtattttcaagatttttcttgaaatcatttgagcgttggaactatttttaacaattcaaagatcatctcattgattaatttattaaattggaagtcctttgttgctcccttccggcccagcccaaaaagtctaatctacctccctctcgctacagtgtcgtcttccagctccaggcagagcccgagctgccgtcctgtgcctgctgccgtcgcctcctcctccatcaaatccggtgcatccgttgatccccttctaaaattgattgcaaaaacggattcctctctatctcctctacctaatcccgaagaaacccccatcaaattcgttatatatctcacgaattttggccgtttatattcgggtgaactcagataaatcctaacttctttcaccaaatccatccgttcctgagccgatctcttcaatccaagcctataaatagcaccccctagtcgccctctttcgtttgacccatctcccgagctctctcgtcaaccgtagcgccgtcgccggtcaccggagagtcgccgctgccgacgaccgagtcgccaccgccgcacaagctcgccgccggccgtcatccgtcgtcgttcgtcacgttggtgagtatcgttgagatcgcgtcgtcgtcctctacgtgtagatgcccttggttagtccggccgaccaccctagctccggcgaggtcgccacccgtgccgtggctgccgtcgatgacgtcatcatgacgtcatcatctcctctttttcagtttttctttaatagattaaatagattaaaacttcggaaattcataactaaatcatcgtaactccgattcgagtggttcaagttgctaaattcatctaaaatcgagatctacatgttaaaaatatccacatatactgtttatgcttcttttttactgttttgtttattttgttctttcgctttagtttccgacgttccggaggagagcgttttcgttgaggaaggttcgtgagtgcgtcgaaagtgttcaacaagactaattgaagaccgattattgcaaggcaagtcacacagatcctaaacaaccctttgagcatgttgaacccgtttaaagctattattttatttcaactatgcattattttcgaatgtcatcgggtggtgaacctttcccaattatttaatggccgaagatgactttattttcctatgggttataatttgattagcatgaaccttatatattggattggttcagctaaatgctatatgtatgtttgcttagccatgcttagaaacattagctaactaaagggattaattataaattatattattattattaattatggttatgttaaatggtagttcacgatggttaatcgtgtgatgttaattaattgataattaaaacctagttaaggtgggttgtgagcatatggttttgatggttgtgctcatgacaattaaggaccggttcgcgagctactgttgtgaaacatttaccgtaccaaccacaagctagcgtgggcaacggctttaccttttgtatagcatgattcattgcggggcaccagactgtgaagcggcgagaagtccgtgggggtcgctggggagtccattgcctctggttttgagggggagattatgatctaggaatggtgcactgtagtgagttgtgttgtgcaaaaggtattgtcacagcctctattcgggtactttccagtatcgcgacgcatggtagacatgatgttgaggctgtgtcttgtgggtacagtggtacacctcttgccagagtaaaactattcgaatagccgtgcccgcggtcatgggcgagttgagcaatgtttttcgtgattagtctcacactactcgttaatgttaataatgtgataattaatttgactcctggtttggagtggataattcttggtttggaagttagatctgtacgaccggggttggttgttcaggtttggttgggcctgagcagcatgggtgtgctgttcagtgttgattaaaattgatgattaattactttactgttttacttctcttaaatctttgctaaatgctgctttcgcaaatgaaccctatattatgccatcctttggtatccttgtgcacttgcatatttgctgtgtggcttgcggagtatgtcatatgctcaccttgcaataatcaaccaaacctcagttgaagaaaaaggatccagaaggagaagacgtttggcttataccccagttgagctgcctgtgggagtggagctgaagccatcgctagatcgttaatttcgctactgttttcttttcttttgtaagtatgtaacgttaatattatgatggatttgtatattaaattgtcagtttgtgtacctcggctgattcctggacgagggttttatgcacaaataagttcggaaattactagtgaatttctgggcgtgacatggttgtgctcatgacaattaaggaccggttcgcgagctactgttgtgaaacatttaccgtaccaaccacaagccagcgtgggcaacggctttatcttttgtatagcatgattcattatagtgtgccagactgtgaagcggcgagaagttggtgggggtcgctggggagtccattgcctctggttttgagggggagattatgatccaggaacggtgcactatggtgagttgtgttgtgcgaggggtaatgtcacagttcctttccgaggtaccgtggtggtactaaggcgcgtggtgacatgttgtgggattgtgtcttgtgggtacagtggtacacctctgatcagagtaaaactattcgaatagccgtacccgcggttatgggtgagttgagcaatgtttttcgtgattagtcccatattattcattaatggtaattgtgataattaatttgactcctggtttagaatggtatattcctggtatggaggtttgatttgtacaaccggggttggttgttcaaatgaggttgggactatacaacatgggtgtgttgtatggtgttatttagttttgattaattactcaactgttttactattctcttaaatatttgttaaatgctgtttatgcaaatgagctatattatgccatcctttgttatcctgtgcacttgcatatttgctgtgtggcttgttgagtatgtcatatgctcattcttgcaatattcaatcatcagaagaggagtatctcagcgaaggtgatgatctggaggattaagtttgttctagttaagatgtctgtggagtggagtcgccatagctgttccgcagtttgttttagttttatttttccgctgcgtagaaagttattctttgagagaaactatctacctctgtaatgatttattatttgtgaatattaaatagttatttatttgtactctattatcaatttgttattgtgtgcctcggctgattcctggacgagggtttaacacacatgtaagcgttcggaattttggatagaaattccgggcgtgacatcaggtcccaaaattgaagattcggtaactgacatgtttaaactgtatcaagccctggatcagtagattgatacaggttcaacaatctgaatcttcatcgcatacatttgatcaaggctccaaaggtgatttctttacataaaataatagggtatttacaagattgtggctatctattactgtagaagctataggatgagccaactctaatgttttgctatagaattaaaccatctatctaatctataattgggaactaagttggaatgaaactaatttatatgtttaaactcatggttcggcaaaaactccaaattgattctcaaagagagggttaaagcaatggtgagtacaacatactcatcaagctattatatcaagtaatgaatgcatgaaatagtaatctctgagtagggtttaggacttaccctaaaccctatacaaaaaggtccatgggcattaggtgaattgcgtttaggtccataggcccacatggcatacaaagcaattttacaaaaagaaccttacaagatttaaatttctactaatgaaagtccttacgcctaatgaagtggctaaatagccggggcacacatgtcggtgacttggcggctagggaagcagaggcaataggagggcaacggcgaccaatggcgttcgcggcggcgtattggcttgatcatttttgggcgtctttctcctgggacgtaggcgacgtcggtggcgcaatggctcggccggagatggttcgagtcgacgggaatgacgaagtggggcgatggcggcgctatggacaccgggaatgccgacgagcatatcactaactgttcgatctatgccaaaatagaaacaaagaaaatggattgattaggtagagaaggaacttcacgttcccatggttggagtgcggtgaagctcaccagagaatacatgcgatggatgaaactccttcaggtgaaaagagtaagtggaagttcttggagattccgaggtagtttttggtggtttgcatagtggaacactgtgagaaatagatgaggttcacagtggcgagttggctagattaatgactactacagggacccttttagattccgtgcaggcggcaactcgttgcttctgggaaaatcggctcattttcacgtgcggtccttttaaaagga

SEQ ID NO: 27048 - DNA, 3081 bp, Oryza sativa
tccattgtcctctcctctcctcccgatggcggcagcggcggcggcgcgcggcgacagccgcggtgggcgtaggcgcgcgccggcttcctccacgttgtggcggtggagggcgtgggatccggcgggcggcggccgtccctgcacggatccaacggcggcggccatcaacgcaaaaatccagcggtggcggtcgtccccgcacggatacggcggccggccgccctccccccgcgtggcatccagctcccctcccctcctcttccttccctccctagatccggcggaggggaggggcgtcggcggcggtgcggccggaggggagcacagatccgaggcgagcggcgtggaggccgccgctgacgatgatgatgacgacgaggaggcggcagcggcaagcaggagcggcggcgccaccaccagattctagggtttcatttttaaagaaagtttatgttttttcgggtttttgttttcccgtgggggtgcgccacctgcacgcaaaaatcgtcattttcccagacccctaagtgcatgcgggccgtttaccggcacgcaaaaatcattttagccctgacacaaaaatcttggttgtagtagtgaatggtgaaagtgaaggtggaaagtgagagctaggtgtcaacacgaggggtagaaacgatttaaaggagttggcagtgatttgacgctgtgatcccacttgtacttcactcaacctagcatgagtggctgtctagtggccccttgtagatgtttcctatgagaagatgagaggtatggtgaagtttgggtgtaaattggactttaactccctctctctctctctttctttctctctttgaaaatataatttaggatcaaagagatgattcaccaaggttttttgctgtgtttggacgacaaatgggcccatatatagatctttcctagaaggcttggagtggtagagtggcattttgagtggaaattgaatttaaaccgttctctcaccttttgagaaataaaaaaaaattaaatgagagaagagcagatgatgtgttggctatggttgtatgatgagtgggccccacaaggacttggtcccacatttaagagagatgtagaaggagagaactagaagctctaaattttccatgtgttggcattatcacactaaactatattactctctttctctcatacatttaatttagaattaggggggtgggtggggggggggtgggggacagggagacggcaaggtagacaaggatttgatggttcaaggtgccaagttccaaagtttacgtaatttatggctcacatttcatgtggttacattttgaattagactaagccattgcaccagatggtaaagtatgtttaacattctgaccttgagattttgctagaggagttatggtttaattttggtgaaggtgcaaactaggctaattggtatgctgtttccagatttttagctgtgttgaaggatttatttgggttatcaattgatgtgataaattcaaactaaaattgctgggagcttagggtgttgtttagtatttatgagaattttggtgggatttattgttgcttcatttatttttaggaattttctttagacaaagcatgcatatgcaacctatttaaaatcctcttcctaccttttggctgaaaccatggctgaaaccaagccaactcctatccctctccacgcaggcccaaaggccagccgggtaaagtctatctcttttccctcccctccctaaaacgaagccaacaagtctagtttacatcggtctacgaaagagccccagtccacccctgcctctgccgatgtcgttggtgctgatagatgcgatgcccacacctcagggattcgcgcgccgtggtgtgcagccggtgaatcttctgccgcctcctgtccttccgttgtctgacgaggaatggttttaattctcctccgatttcccccattgctacataagttagtgattcattggtagatctgcttgtggttgaatgtacaaggatgcttggtagatctgactgatgttgaatgtgcaagaatgcaagaatgaatggagtgaactaaagcatatgtcctggtatgcatatttcaaagtactgcgcatatgtgtattataccatattgtattatgtacttatgctatgaaattatatgtggaatcctccactgcatattttctcttggttaattagtttaggaaaaattgcaaatatgatcttgtgagaatttgtaaagtacatagaaggccatttgttttgacaatgaagtatggtttgttgtttgttgatttagatctccgtaatactgcctaaatttaaatgtatgtttggtgaactgaaattagatatggttagtgctgtcataattttttaatgactatttgtccttgtgagtaaggttgccattcctcggctgtattgcctttagcgtggctatatgtctcccaagactaagaatacaaggaatgtgatagcagccgagaaattgaccatgtttcctcccccctccctttgctttcctagtaggattcggaatactctttggcatgacaatcttaattatctcccatagtctaaaactcacaaaaacatcagaaatccgctaagaataaattaagtaaagaacatgcacacacaaataataataatcatgttgcattaaattgctaaggtcagagaccaacagatgacacattggatagtgctatggccttattaaaagtagcaagagaaattaaatatgcttgtgagcgcacacatgcacgacgtacaaatagttgggaccaacagatggatcgactatagatcgctccatatggtcaacaatttattggagataaacattaacataacttggccataacttgaagcaaaacaacatattcttatgaaaggcattaagactggtagcaatgcgagtatgttgttttaggcttgtccttccatcttagcaagaactcccatttcgtccatcttagcaacaactgtgaaattaaaatatggaaatcacattagcgcattagttaattaattttgtagtggaagtagagcattaattgtcttcatgttgca

SEQ ID NO: 27049 - DNA, 1605 bp, Oryza sativa
  unsure (1)..(1605): unsure at all n locations
ggagagctaatgcttatgcttattgggtattttggtttgacactgcttcacgcccaaaaagaaggcactacgtctgagctaaacttggatatggaagtcttctttcgtttagggtgaagtaagaccaagctcatgagcttattatcctaagtcggaacaaattagttgatagtgataggatcccctttttgacgtccccatgccccccccccccgtgtggtgtggcggcatggggatgtcaaaaggaaagggatggagtttttctcgcttttggcgtagcaggcctcccaaagggaggcccgcgcgacgggctattagctcagtggtagagcgcgcccctgataattgcgtcgttgtgcctgggctgtgagggctctcagccacatggatagttcaatgtgctcatcagcgcctgacccgaagatgtggatcatccaaggcacattagcatggcgtactcctcctgtttgaatcggagtttgaaaccaaacaaacttctcctcaggaggatagatggggcgattcaggtgagatcccatgtagatctaactttctattcactcgtgggatccgggcggtccggggggggcactacggctcctctcttctcgagaatccatacatcccttatcagtgtatggagagctatctctcgagcacaggttgaggttcgtcctcaatgggaaaatggagcacctaacaacgcatcttcacagaccaagaactacgagatcaccctttcattctggggtgacggagggatcgtaccattcgagcctttttttcatgcttttcccggcggtctggagaaagcagcaatcaataggacttccctaatcctcccttcctgaaaggaagaacgtgaaattctttttcctttccgcagggaccaggaggttggatctagccataagaggaatgcttggtataaataagccacttcttggtcttcgactccctaagtcactacgagcgccctcgatcagtgcaatgggatgtggctatttatctatctcttgactcgaaatgggagcagagcaggtttgaaaaaggatcttagagtgtctagggttgggccaggagggtctcttaacgccttcctttttctgcccatcggagttatttcccaaggacttgccatggtaagggggagaaggggaagaagcacacttgaagagcgcagtacaacggagagttgtatgctgcgttcgggaaggatgaatcgctcccgaaaaggagtctattgattctctcccaattggttggatcgtaggggcgatgatttacttcacgggcgaggtctctggttcaagtccaggatggcccagctgcgccagggaaaagaatagaagaagcatctgactctttcatgcatactccacttggctcgggggnnnnnnnnnnnnnnnnnnnnnntccgctcttgcaattgggtcgttgcgattacgggttggctgtctaattgtccaggcggtaatggtagtatcttgtacctgaaccggtggctcactttttctaagtaatggggaagaggactgaaacatgccactgaaagactctactgagacaaaaagatgggctgtcaaaaaggtagaggaggtagga

SEQ ID NO: 27050 - DNA, 1129 bp, Oryza sativa
  unsure (1)..(1129): unsure at all n locations
attggttggatcgtaggggcgatgatttacttcacgggcgaggtctctggttcaagtccaggatggcccagctgcgccagggaaaagaatagaagaagcatctgactctttcatgcatactccacttggctcgggggnnnnnnnnnnnnnnnnnnnnnntccgctcttgcaattgggtcgttgcgattacgggttggctgtctaattgtccaggcggtaatggtagtatcttgtacctgaaccggtggctcactttttctaagtaatggggaagaggactgaaacatgccactgaaagactctactgagacaaaaagatgggctgtcaaaaaggtagaggaggtaggatgggcagttggtcagatctagtatggatcgtacatggacgatagttggagtcggcggctctcctaggcttccctcatctgggatccctggggaagaggatcaagttggcccttgcgaatagcttgatgcactatctcccttcaaccctttgagcgaaatgtggcaaaaggaaggaaaatccatggaccgaccccattatctccaccccgtaggaactacgagatcaccccaaggacgccttcggcgtccaggggtcacggaccgaccatagaccctgttcaataagtggaacacattagccgtccgctctccggttgggcagtaagggtcggagaagggcaatcactcgttcttaaaaccagcattcttaagtttaagatcaaagagtcgggcggaaaaaggggagagctccccgttcctggttctcctgtagctggattccccggaaccacaagaatccttagaatgggattccaactcagcaccttttgttttgagattttgagaagagttgctctttggagagcacagtacgatgaaagttgtaagctgtgttcgggggggagttattgtctatcgttggccttggttggaaagaaacgaagtatattgatttcttggatttctctctctttattacatggcccttgggggctatttatagccccgttacagattctcacttctagggtctagtttgtatgaggaatttacatagttgcccttatgaaaaggacgtttacagggttacataacgttaaagggggttaaggggccttga

SEQ ID NO: 27051 - DNA, 6382 bp, Oryza sativa
cagggttacataacgtcaagggggttcatgggcccttgatggccatcgggcgatcgccggccctatggcctctaagcttggtgggccgagaaggctacttcggccctcgcgggggcgaaccggtcctggcgaagtcgtccttctctgggctggatgccggggcgaaccggtcctggcgaagtcgtctttcttcggcatgcactcacccgacccttcgcctcgcatcatccttggctcgtggtcttcgccatgggtttcggcagattcggtcgaagggactcatgccatccgccaacagctatgaacccgtgttcaacaattcccacgttgagccgcttaaactcttgctgcaattcctcacacatgccctcgatgcatagagcagtgcagtaacttttcctgcttaatgcgtctgccaccacattggctttccccgggtggtagtgaatgctcatgtcatagtctttgattagttccaaccatcttcgttgtcggagatttagatccggttgggtgaagatgtatttcagactcttatgatccgtatatacttcacagcggttgccaatcagatagtgcctccagatcttcaaagcatgaaccactgctgccaattccagatcatgggttggataattcccttcgtgtggacgcgactatcgcgaggcatacgctaccactctgccttcctgcattagaacacacccaagcccgtggcgagatgcgtcgcaatagacctggaaatctttcatctggtcgggcagaatcagaactggggcggatactaatttctttttgagctcctcaaagctcttatcgcactcagctgtccatttaaacttttcatctttcttaagcaactgagtcatgggtcgagcgatcctggagaagttttcgatgaattggcggtaataacccgccagtctaagaaaacttcgaatctgcgacacggtcttcggtggggtccatttggtaactgactccacgttcgatggatcaactgccatgccctgagctataataacatggcctagaaatttgacttccgtcaaccagaagtctaacatggcccagaaatttgacttccgtcaaccagaagtcacacttgctgaacttggcgtataattggtgctccttcaacttctcgagtaccagacggagatgctgctcatgttcttcttcagactttgaatagataagtatgtcgtcgatgaaaaccaccacaaacttgtcgagaaattccatgaacactttgttcatcagattcatgaagaatgcgggtgcgttggtaagtccgaaagacataaccgtgcactcatgcagcccgtaccgggtggtgaaagccgtctttggaatatcttcttcccgaattcttaactggtgatagcctgatcgcaggtctatcttagagaacaccttagctcccttcagttggtcaaacaagtcatcgattcgtggtaaagggtatttattcttgattgtgacctcgttgagtgcgcgataatcgacgcacatcctcttcgtcttatcctttttctccacaaaaatgaccggagcaccccaaggtgaggtacttggtcgtatgtaccctttctgcagctgctcatcaacctgtttcttgacctcggctagttcattggctgccatcctatacggtctcttgtagattggggcggttcccggggccaaatcaatccggaattcaatctctctcttgggtggcatggtggtgaggtctttgggaaacacttctgggtactcgcagactatgggaatttcttccaatttcctcgaattcatcccctcggtgaccactggggtttccgcctcaatctgattcaaggagaccccttgctttggtgagactagtgatttatacactattgtttctcccttctcgttagtcaaggtgactgtgcgattcgcacaatcaatgactcccttaaacttggtcagccaatccatcccaagaatgacatctaggtctttggaatcaagaagaatgatgttggctagaaatggtgatctttgaatttctattgttatagaagggctgaattgtaccgaagtggagctattccctggggtatgaacccgcattggtgtgctaagttcctctcttattaacccatgcatcctgacaaacttctttgaaatgaacgaatgcgttgcaccagaatcaaaaagtactgttgcagggattgagttaacaggaaacgtacccagtacgacctctggtgctgcttgcgcctcctttgcagacgcgtggttgacacgagcctggacaaactttgacccggcacgcctaggcttcgggcatttgtcggcgaagtggccaagctcaccacagttgaagcaggaccctggctttgctccagtctccttggcttgcgcggacgggcctgactgtgctggtgccactggtgggtgtggagctgcaccgtggttaggctgacctccatggtggttctgactgccactggcgccctggtggaagttgctagacttgaacgtgcggtgctggcggacgatcatggtggtaggtccaccctgctgtccgagagtgaagcgcggtcgctgatggtttccttggttggaccggaactgtgccgcctttctcttcctgtccattttgttgcgctgatcctcctgacggattgccttgtcaaccaacctttcaaagtcggcatagtctccagatatcagctggttggttagctcatcatccaggcctgctaggaatttctcctgcttctcggcgtcggtgcagacatcctccggtgcatatcgcgcgaggcgattgaactcatggaggtactctgtcactgtcctgttgccctgatggagtgcccggaatcccctcttcttttgtgccacgaccccgtctggcacctgcgccttcctgaagctacgacagaactccgcccaagtgacttcagtgcctggcgggcgggtggccacgtgattgtcccaccaagctgacgcaggaccttgaagctggtgtgtggcgaaagcgaccttctcctgatcattgcactgcaggagattcagcttcttctctatggcatggagccagtcattcgcctccatggggttggtggtgctggagaaggtgggtggcctgacgcgtagaaactcgggcagcttggactgaggaggagggggaccaaactgctggtgctgctgttcggcgtgctgcagcatcctctggtgcatctgctggtgctgctgctgcatctgctgcatcatggctgccatcatctgagtctgatgtgccattacttgggccagcgtcagattctcgggaaatggtggcggaccattgccggaatcactgttggggtgcacaccatcagcgcgttcttcgccgttgctgccctcgcttgtcgtgcgggtgccattcctggtgtagaccatctggaggaagagcagacggggaaacggagaaaaacagttactcaggaactaagctttattatagaaatttaaactgcaattgttctgatctgaattaaaacactttaaacagcaagcaaaaatccttattaggacagccatatcataggcacatgatatcgactgtcgactgaccccaagcaagcaacctaaacacacaaactaacaagcagaagctaggcagtcgataagctaatggaaaaccagcctaatgctcggaacggctcctgcggtcggtggagtcgaaggcgtcctcctgctcgtcaccacgtccttctgagcgactcctggagcctggcagataagtctcgccgctgcccggctctgagccactggagctgctgctgctgtggtcgcggttgccactgggagtagctggcaaccaacctccatttccactggcggggcccctgacggctgatgcaggagcgaaggagagagcagatgcaggagctgacatgggaacaggagctggagctggcgctggagctgcaggaactgctggagctgcgggcggaactggaggtgctgcgggaactgctggagctgcgggagctgctgacggaggtgggttcctaggcgcaagctggacgcgcacgggtgccgttgtcgacttgcggggcgtagtgcggatccgaactcctcctggcgcgggaagacccttcaattgagcattctccctcttcagacgcgctatctcgtccttcagagcaatgatcctcacaagcttcccatcattcaaggccttggacgccttgtgcaggtccgagtgcatcctgtccatccccctcatcacagcgcacatgtgaccaaaggtggtgtcgttctcgccggctgtcggacggaaggaactgacatcactgccgctggctcgacgagggtggaaccggtacgccgtgtcgtggaagatgtagttgtggcgctcccgtagtctggccatcatcagatatgctgcctcctgacatgcgtgatctgctgtgcctccagacgcctcaaccaccattttagcgaggcaagtccccatgtagccatggacctccaagcggacacggtgaggaagctcgccactgagcggtggaacagtcgtgtactccggcgcgttggggtagcccaccaccagtgtcatgcgtgccaactctgccacgaaatcacccatgccttctccgcggtggttgggtgggtgctcggccatctagagaagacaaaggggtaggatcaatgcatgctcaaatccaatttaaataaaaataaaggactcaaataagagaatcgaataagagcgaaattttatgcatagattattttgcatgagagcgaataaataagacggacttacatagcgataaaataatggggaaattagatacatacttataataacaagaaaagcataaataccttacaacccatattcctgagctaagacctaatgcatttcgcccatcaaatcccaactaacggtcaaaaacatctcaaataattttactaaaaccctagacctacttgtcttaacaaatctcacttaaacgagcaacaagatttgtcccttgaaccacaagaacagatccccaaattttcccggaacaattccaattgcaaagaacatatgcaatgaaaaggattcagagggcccttaggtttccatttggcttgtcctacggtcaaggtcggctctgataccaacttgtcacgcccagaaattcccgaatagaattccaagcagaatgtgcattaaaacccccgtccaggaccggccggggcacacaaacgacaatgttgacatacagatccacgtcttacaaacattataaaagtcttacataaatgcagcggaaaaagaaagataacaggagctaatccttgactggaactgcagcgagaacaccactccacaggcatccttgacggcacggacgaagcctactcctcggagaacccgccatcagacacatactcacactctggggttgggggaaaataaagcaagactgagtactatccactgtactcagcaagtcataccggaatgggggtatgatgcagggattcaacaagggatagctatacaggttcatttgcataatactggcatttataaatagaagtcgaatgcgaaaatagttgtaataattaaacgatattaatcatccactatccaacgttacaccacgttgcaacaggcccaaccatccacctataccatccaatttcattagactaaactaagatgagtctaatcacggtgagtctggttgaccgcccataaccgcgggcacggctattcgaatagttttactctgatcagaggtgtacaactgtacccacaagacatagccccacgacacgtttccatgcgccgacatgccaccacgacatatcggaaagagactgtgacatgacccttcgcataacccctttctagccaagcacaccacaccccaggtttcacccctgtccccagcgggcgacgggcagtcccctctcgtgcctaggtgaatccggaagcgacagaggccgtcgcagggcccgcccctctccatcacgctcacccttgcctggatgcgtcagctagagaaaagctacactacaagcccagccgttgcccacgctggcttgtggtaagtacgaggagttcttccagggtttcccgcgaaccggtccttaattgccatgggcgcgacaagcaaaaccatgcacccacagcccaccatgtgattcattttaattaaccaacaccagagcggtgggactaatccaacattatcatataaacctacagtctatattttaaatgagttttccccattgtgtgctagttgaactatgcatggctaagcaattcctagtccaaagtctattcatgtcataacccaagctaacaaaggagcaaggtaccaaaatagcatgggtgcaccaataggtaaac

SEQ ID NO: 27052 - DNA, 8927 bp, Oryza sativa
gagtttcttcgcgtgaggccacctgttttctctagcaccactaatcctgtcgaagctagtgattggttgcacgccatagagaagaagttggatctgctccagtgcagagaccaggagaaggtctcttttgcgtcacaccagctgcatggccctgcttcggaatggtgggatcactcctgccttaacaggactactgctgaacctatctcttggcttgagttcaccgctgctttgcgcaagacgcatataccatcgggagtggtgtccctcaagaagaaggagttcaggtcgctcacacagggttctcgcacagtcacggagtatctgcacgagtttaatcatctggctcgttatgctccagaggatgtgcgcaccgatgaggagcgccaggagaagttcttggaaggacttaatgatgagctttcttacccactcatgactggagattatcacgatttccagaagttagtggataaggctattcgtcaggaggacaattataatcgcatggagcagaagaaacaccggattgctcacttcaaggcacagcagggaaatagtcagaggccgcgtattgcttcgggacccctgtccatgccacagggaggttcttcgtctgttgttcgtccgcagcgacaattctttaacaacaacgcgggcaacaacaaccgcaagccagctccatgtccggtggcaactccgtcgcagcaatagcctgccaagagggagcaaggcagcaagcccggtgtgtgcttcaactgtggagacccaggacattatgctgacaagtgtccgaagccctgccgcgcgaaggtcgtccctgcccagaacaactcctccgcaccagcagccaaggctcgtgtcaaccatgttgctgctgcagaagctcaaggtgctccagatgtgattttgggtacgttccctgttaactcagttcctgcaacagtgcttttcgattctggtgctacacattcgtttttatctatgagttttgcggaaaatcatgggatggaggtagaggagcttagacgtcctttgatggttagtactccgagtaaccaagcactctcctcacaacgtagcccctctgtcagaatagagatccgaggtgtacctttcctggccaaccttattctgttagaatctaaagatcttgatgtcatcctagggatggactggctagccagatataaaggtgtgatagattgtgccaatagaaaagtaactctcaccagcaatgatggtcaagttgtaactgttcatgcattgccctctgaacctcgaaggtcaagtctaaaccaaataactttggaagagattcctatagaccgggagtaccctgatgtgttccctgatgatttacctggtatgccgcctaaaagggatatagagttcagaatagatctggtgccaggaacaactccgatccataagcgaccatatagaatggcagccaacgaattggcagaagtcaagaggcaagtagatgatttgcttcagaaaggatacatcagaccgagttcatctccatggggagctcctgttatctttgtagaaaagaaagaccatacccagaggatgtgtgtggactatcgtgcacttaacgatgtgactatcaagaataagtatccactgcctagtattgatgatttgtttgatcaacttaaaggtgccaccgttttctccaagatagatcttcgatcagggtatcaccagttaaggattaaggaggaagatatacctaagacagcttttactactcggtatgggctatttgaatgtacagttatgtcttttggacttaccaatgcccctgctttcttcatgaacttgatgaacaaggtgttcatggaatacctggataagttcgtggttgtctttattgatgacattctcatatattcctaaactaaagaagagcatgaagaacatcttcgtcttgcattagagaagctgcgagaacatcagttgtatgccaagtttagcaaatgtgaattctggttgtctgaagtaaagttccttggtcacgtcatctcagcaggaggagttgccgttgatcctagtaatatggaatctgtaaccaactcgaaacaaccgaagacagttacagagattcgcagtttcctaggtctcgcaggatattaccggaggttcatagagaatttttccaagattgccaagcccatgacacgactgcttcagaaggatgtgaagtacaagcggttagaagaatgtgagcagagttttcaagagttgaaaagtcacttaatatcagctcccattttgattttgcctgatccaaagaagggtttccaagtgtactacgatgcatccaagcttgggctaggttgtgttctgatgcaagatggaaaggtggttgcctatgcatctcgtcagttacgtccgcattagaagaactaccctactcatgatcttgagttagctgcagtggttcatgcgtcgaagatttggcgtcactatcttttcgggactcgaacagaggtgtatacggatcacaaaagtttgaagtatatctttacccagccggatctgaacatgaggcagcggagatggttggaattgattaaggattatgacctgggaattcattattgtcactcccagaaattcccgaatagaattccaagcagaatgtgcattaaaacccccgtccaggaccggccggggtacacaaacgacaatgttgacatacagatccacgtcttacaaacattataaaagtcttacataaatgcagcggaaaaagaaagataacaggagctaatccttgactggaactgcagcgggaacaccactccacaggcatccttgacggcacggacgaagcctactcctcggagaacccgccatcggacacatactcacactctggggttggtggaaaataaagtaagactgagtactatccactgtacttagcaagtcataccggaatgggggtatgatgcagggattcaacaagggatagctatacaggttcatttgcataatactggcatttataaatagaagtcaaatgcgaaaatagttgtaataattaagcaatattaatcatccactgtccaacgttacaccacgttgcaacaggcccaaccatccacctataccatccaatttcattagactaaactaagatgagtctaatcacggtgagtctggttgaccgcccataaccgcgggcacggctattcgaatagttttactctgatcagaggtgtacaactgtacccacaagacatagccccacgacacgtttccatgcgccgacatgccaccacgacatatcggaaagagactgtgacatgacccttcgcataacccctctctagccaagcacaccacaccccaggtttcacccccgtccccagcaggcgacgggcagtcgcctctcgtgcctaggtgaatccggaagcgacagaggccgtcgcagggcccgccccactccatcaagctcacccttgcctggatgcgtcagctagagaaaagctacactacaagcccagccgttgcccacgctggcttgtggtaagtacgaggagttcttccagggtttcccgcgaaccggtccttaattgccatgggcgcgactagcaaaaccatgcaaccatagcccaccatgtgattcattttaattaaccaacaccagagcggtgggattaatccaacattatcatataaacctacagtctatattttaaatgagttttccccattgtgtgctagttgaactaagcatggctaagcaattcctagtccaaagtctattcatgtcataacccaagctaacaaaggagcaaggtaccaaaatagcatggctgtaacaataggtaaacatcccatagtgttattgcaaaacaaatgcactatttgaaggaaaacaatagaacatttgcaatgtaggatcaacatgatcaagtgacaagcatgacttgccttgctctgctgctggaggaacctcggcgactatttcgaagtatgccggagcgtcggaagagccggaatctaacaacatacaaggcaaacaatgcaaacaagctataagtctactgaaacagagaacaaaaccatttttaatggattctacacatttttcttgatttactgagacttgaaggggcttaaacggagctcggatgaattagttatgaattttagaagattcactgtgtttattactataacaaaaagtccttaaataatttattgggcaataattcccagggctgacgtcaccaagggggggcggcgccgacaggtgggtcccaccggtcggtggctcgggagagagggggaagggcgccggcacacgggccccactcggcagtggctcaagggggggcggtccaccgtggaccgggaccacgcgggtggtccaccgccggtccacgggaccgacggcccagatcggccccgagccgatcgggcggtgccggtagaggcggccgccgagctcggctcggcatcaaagccggccggccagccatggctagtggcgacggcacgcggccgacggcgacggcgaacggcggcatgggaggtggcggcggcggccgaaggcgacggcgcatgacttgaagcggcggcacggcactaggtgggagaggaaggggaaaagaggggagggatgcctcaccgcgagtggccggcgcggagggagacgacggcgagctacgggaagacggcggcgacaggcggacgagcttcgggatgccctaaggaaggaagagagagagattagagggagggagttgaaccacggcggccggcatccatggccaaaggcagcggtagaggtagagctcaccggagcgcgaggggatgcggattccggcgacgaatctcgacggggaaggggcggacgaggtggagttcggcctcgcgaacccgacggcgatggcggcgcggtgcggcggcgaccctagcggcggcttgcggcggccggagtagcgggagcggcgacggcgagtggttgcacggcgcgagggcgatggagagctcgggagagaggggcggcaaaaggaaaaacgaggaggagggctcggggatggattttataggggcgggaagatcaggaacggcccgagcacgcccgatttcgccggcgacgtgggaggtgggaggtggagagagagagagagtggcgggattcaaaaaacgaatcccgcccatctcggtagagggcgcgggtgggagagagaggggtgggcgcggggaaggcgggggcacgcgcggcgtggccgaagtggcccggaggaggcggggcggcggtttcggcggcggcggtgacgtggaggggcggccggaggttggggaaggacccgacaggtgggccccacctgtcggcgaccctgggagaggagggaggcggggcggcctggctaggcctcggcctgcggccgacccagctgggaggggggaaaaggagagaatgggccggcggcccattcgaaaagggaaggggataaagaaaaagaaaaaggaagaaaaggattttccctggaattaaaatattgcttgctcaattttaattggttaaaattatttctagggctctgaaaattccactaaaaatcttgttagcgaatttagacatgtagaactcaagaaaaattccacatgccagattcgattattttttgtattacattcttagggttttctcttgctttgcacctgcattttcttagggtcatttataaataaaattttaggcttgggaggagaacttcagggtgtgacaaacctaccccccttaaacagaatctcggccccgagatttggaggagctggcgaagaggtgtggatgggcgacttttaactcgtcttccctttcccaggttgcttcctcctcagaatggtgactccactgaactcggcaaaacctggtgaccttgtttctggttcttctttcgctggtatcaagtatatgaaccggcttttccacatatgtcaggtcctcctggatatcaatatgctccgaatcagcctgttcttcgggtactcttaagcacttttttaattgggacacgtggaacacgtcatggatgccgatcatattggatggaagttctaactgataagcaacttccccccttcgttccaagattttgtagggtcccacgaaacgtggtgctaacttgcctttggtttgaaaacggtgcactccccggagcggagtaacccgaagatacacataatcccctgcttcaaaagtgagctcccttcggcggttatccgcgtagctcttctgtcgagactgggcaattctcaacctttccctgatggttctgactttctcttctgcttccgttaatacctctgtcccgaacaattgccgctcgcctgtctgatcccagaagagaggtgtgcggcacttccggccgtataaagcttcgaacggtgccatctgtagactagcttggtagctgttgttgtacgagaattccgcatatggcaaacttttgtcccaagctccaccaaagtcaagagcgcaagctctgaacatatcttccaaaatttgattgactcgctcagtctgaccatctgtctgcggatggtaggcggtgctgaaatttaaacgggtccccaattcttcctgcagtttctgccaaaattttgaggcgaactgactccctcggtcagattcttgggtaccccatgcaaacacatgatccttgccaggtacaactctgccaatctctttcccgtataggtggtatgcactggtataaagtgagctaccttggtgagtcgattcatgactacccagattgaatcgtgacccgatgatgtccggggcagtcctgttataaagtccattccaattttctcccatttccattccgggatttgaagaggtttatttcttttttttttattttgaatctttctattctgaattcagttaacgacgagatttagtatcctttcttgcactttcataactcgtgaaatgccgagttggtacgaattcccccaatttgcgacctaccataggatttgttatgtaaataggtatatgttcctttccattatgaatcgcgattgtatggccaaccattgcgggtagaatgctagatgcccgggaccacgttactattgtttctttctcctccttcatattgaccttttctatttttgccaataaatgatgagctacaaaaggattcgttttttttcgtgtcacagctgattactcctttttttccattttaaagagtggcattcgatgtccaatatctcgatcgaagtatggaggtcagaataaatagaataatgatgaatggaaaaaagagaaaatcctttagctggataaggggcggatgtagccaagtggatcaaggcagtggattgtgaatccaccatgcgcgggttcaattcccgtcgttcgcccatcccattattgcaaattccaaaaatgcaattttccatattcctagttacgtatttacttacggcgacgaagaataaaactatcactatattttttccttttcctagttcttcttccaagcgcaggataaccccaaggggttgtgggtttttttctaccaatgggggctttcccttcaccgcccccatgggggtggtccacagggttcataactacccctcttactacggggcgtttacctagccaacacttagacccggctctacccaaacttttttggttcaccccaacattacccacttgtccgactgttgctaagcagttttgggataccaaacggacctccccagatggtaatcttaaagtggccgatttaccttcttttgcaatcagtttcgctacagcacctgctgctctagctaattgcccaccccttccacgtgtgatttctatgttatgtatggccgtgcctaagggcatatcggttgaagtagattcttcttttctctcaaaaaaccccttcccaaactgtacaagcttcttccaaagcatacggctttctagatgtatatgacgatctctagacagatggatcttatatgaatcgtatgatgaagtaccacatgagtggatatataggaaaggaatccaaatctgccgaatcgctcatgttatgatcttctacatcctaggtctccgcgttccgtcatctggcttatgttcttcatgtagcattcagatcgaatgactctatgaaattacgtcgatacttctacatattatgggtaacgaggagacatccctattttcccccgggggtcttaattaccactgcttagctttcaattcgcctctgaccatcaaattaaatgtgaataacccgtcctcctctctttgaaacaaggggcgcttccggttctgtgcgtgcttcaaacaattttgtcttctccatattaccatatctctagagtcaataattttctatgaggaactactgaactcaatcacttgctgccgttactcaacagttttctgttgaggtctatcccgtagaggtagtcaaattggatcagtgatcgatttctaggtttcgtcgtaaacctaattggttacttccaattacgtaaatcaatagttcaaaccgcactcaaaggtagggcatttcccattgatataggaacttttgtaccagaaacaatagtatctccaattatagcccctctgggatgtaaaatatatcccttctcaccatccccatagtgtatgagacaaatgtacgcatttcgattagggtcgtattctatggttacgattctaccagatatgtctttttgattccgtcgaaaatcgattttacggtataggcgcttatgacctccccctctatgccttgcggtaatgattcctctggaatacgacctttaccacaacggtgccgtccatggatcaaattatttcgtggattggatttcacttgcctatctatggttcccttgcgtgtgctcgggatagg

SEQ ID NO: 27053 - DNA, 1110 bp, Oryza sativa
aactggtgctccccacggtgaagtactgggtctgatatatccttcctgaagcaaatcatccacctgtctctttacctctgctaactcattagctgccattctgtatggtctcttatggatagggttggttccaggtactaagtctatccagaactctatgtctctcttaggtggcatacctggcaaatcctcagggaacacatctggatagtctcgtactattgggatctcttgcaaagcaacttgatttaatgtcaaaccgtgagatttaggggatgacacaaagaaagacactgtttgcccattgctacttgttaaagtcacattacggttagcacaatctataactcctatgtgatgggttagccagtccatccctaagataacatcaagatcattggattctagaaagataagtgaggatgggaaaggtatttcttctatttctatagtaacggaaggacagtactgcgttgaggatacttgattgcctagggtattaactagtaaaggtctcccaagactaataacttccatcccatgattgcccgcaaaacttttagacaaaaaggaatgtgtagcaccggaatcaaaaaacacagttgcgggtatagagttaataggaaacgtacccaaaaccacatcaggtgcattctgggcttctgcggctgcaacatgattaacacgagccttcggtgctggagcattggagttgttctgaacaggtgcattcttcacacgccgaggcattggacacttatcagcataatgtcctggatcaccacaattgaagcacacccctggcttgcttccctgttccttcctgacaggatgattctgagttggagctgctacatgacgagtgaccatattacgattatcgttgctgtgattactagtgttgttgttgtagaactggcgttgagggcgagcaactgaagaggatcctccctgtgggtatggtgcagcttgaggtcccaaagcaatgcgcggcctctggctactacgctttttctgttccatcctattatacttgtcttcttggcgaatcgccttgtccaccaactactggaaatcccggtaatccatagccatcaatgcaaaagacaa

SEQ ID NO: 27054 - DNA, 9615 bp, Oryza sativa
taagcaagcaaactaacacagcgaactacggcaacggtctaactagacaactactctcgccttgcgtcggaacgaagagatggatcttcctcctctggagtagctggctctctttcttttgggtcttcctcttcttcctcatcacttaagacatggatgacaggttcagcatgatcaggcacagcgtctcccaccacacgagtcttcgaagctaactggagacgaggtggtagactggttctcttccttgcggtgaggcgaagcttgggtgctggcggtggtgcttctcccttaagctcagctagttccttctgcagacggtacaccttgctctccaacttacaaatcctgccacggttccagttttccctatcatgagctgctttctctcgctccacgcctactgcatccatggcgctaagcatatacacggcgtgcatcacagtggcgctaccttcaccttcgggacagttgtaagttctatagtcttgaccatgtggcttgtgtgggtgatactggaaagctgatgactctaactcctcatcaaagcgatgacgtagctctccaatggccaccaaggctgtttcctgacaaacatggctgtacttttttccctcagcttcaaactttatcgacggaaggtcttcacgatcactagtcaacgtcacgcgaacacgacacttctcctcgttggggtcatggggaatctggcgatactcgggggcaacctcgtaacctacttcaaatgccatcattctcagctccctgacgaatcctagcacctcgatcaagtttttcggcggatgggcatctaaagcaacatggaaagaaggaattaatgcatatttttaagttagctgcacaaactagacttaattaaattggacccaaagaaaaagaaaataaaagaaaaggaacaaacatgactcaattttttttctttttggaacataaatcaaccttgaacagagacaaataactttacacaaatgaataaattaaaactaaaatatttaggatctaccaggagcacggtacagtgtcaccattaacagggatgagtagtactgatgccatcttgattgaatcgataccataatagatgtacagtgccgactaaccaatgaaattcagaaaattaaactatttaataccctgaacagtaaagttttttttctttcaaaataaaagaacaaatttctgttttggtaaagtagaatttaataaattttgtacataaccttgcatgtgctgccaacttaattaatttataagagaatagagaagggcagttctattttccaaaataattagaaggcaacttaaggtttaccatttggcttgtcctaaggtcaaggtggctctgataccaacttgtcacgtccggaatttctatccaaaattccaaacgcttacatgtgcgttaaaccctcgtctaggaatcagccgaggcacataataacaaattgataatagagtactatcaaataactaattaatatgcgcaaagtaaattattacagaggtggatagttcctctcaaagaataaagttctacgccgcggaaaaaaagcaaaagactaaacatctatggcgactccacttcacaagcaactcgacctgaacaaagcctaatcctcctgatcatcaccttcactgaagcactcctcctctaaagaatgaatattgcaagaatgagcatatgacatactcaacaagccacacagcaaatatgcaaatgcacaggataacaaaggatggcataattaagctcattcgcataaacaacatttaataaacatttgagagaatagcaaaacagttaagtaattaagcaatattaaataaacactatacaacacacccatgttgcataggcccaaccttatctgaacaaccaacccctggttgtacaaatcaaacctccaaaccaggaatataccattccaaaccaggagtcaatttagttatcatagtattttcatttatggtggtacgaaaaacattgttagacccacccataaccgcgggcacggctattcgaatagttttactctgatcagagatgtaccactgtacccacaagacacaactccacatgtcaccatgcgcctcagtaccaccacggtaccttggaaacgaactgtgacaatacctctcacacaacacaactcaccacagtgcaccgttcctggatcataatctccccctcataaccagaggcaatggactccccagcgacccccacggacttctcgccgcttcacagtctggcaccccataatgaatcatgctatacaaaaggtaaagccgttgcccacgctggcttgtggttggcacggtaaatgtttcacaacagtagctcgtgaaccggtccttaattgttgtaagcacgaccatcaaaaccatatactcacaacccacctttaatcaggtttatgtatcaattaattatcataacacaattaactatcgtgagctaccactaaatataaccataactaatatcgtaatatgattaaccccattaatgagctaatgtttctaagcatggctaagcaattatacctatatagcacttagctggagcaaaccaatatataaggtcaaagctattcaatttattacccataggaaaataaagtcattgtcggccattaattaactgggaaaggctcaccacccgacgacattcgaaaataatgcataagttgaaataaaatattagctttaaacgggttcaacatgctcaaagggttgtttcggatctgtgtgacttgccttgagcttcttcaaacacttctgaaccttcctcaacgtaaacgctctcctccggaacatcggaaactaaagcaaataaacaaaatcaacaaaacagtacaaaaacaagaataaacagtacatgtggatatttttaacatgtagatcttgattttagatgaatttagcaacttgaaccactcgaatacgagttacgatgatttagttatgaatttccgaagtttaatcgattttcaactaataaaaaggatttatgacgtcatcgatgacatcatcgccggccatggcacggctccacgcgaccaccggcgatagagagctcggttgggctatccgaggacacctacgtgaagaggacgacgacgcgaactcaccggtgcaagaaactatgacggacgacgacgtacggcgaccggcgacgaggaccaacggcggcgcggctcagctcgacgacggcggcggcgttccagcggcttgcgacgacggcgaaggggcggccaaggtactcctccaccgtgcgaacccggcggcggcgacggacagcgacggcgacgacgctagcagccgcgcgacgtcactggagagtcgccggcgacggcggcggcttgagctacgcagcggcggcgctacgagcaacggtgagacgcgggacttggggcaaacggaagaggacgactaggggatgctttatataggcttggattagagagatcggactccaaccgagaggaatcgagctgggaaaaactagggttagtttggagagataaactcaaaacgaattcgatttggtttattcgggcaaaattgacctccgaaactctaggggaaagggagaggataaggaggagatgatttccccttaagcaatcagactcggggacgaccggttgaggaggaatcggaggagaggcggcggcgctcgggctcggctcggcccggcccgaggtacgggatgaccccgacatgtgggccccacatgtcgacgactagaggagacgaggggcggctcggcttggattggcacggcgtgggctgcacggccacgtgcgagggagaaggatgttgggctggaaacggccaaacggcctaggggaggattttaaagactttttcaattaaaataattcgtgaaatgatgtttcatttattaaaaatacttcccttgctcaaataattcccagaaaaatctagaaaatagataaacaagcaaagtatttaataaaattttatctagttcaattttatgttgaaatttttcctagattataggagtttagcttgtaggtttttaaaataatttctaaaaatgcattaaaaactgaattattaaattaggcgattttcagggtgtgacattgatatagtttaaacatgtaggttacccaatctttaattttgggacccgacaaggtgtgtgggtgggggcccctgcgatttgggagcctagagcggctgtaccgctccccccccaagcttgccctgaatacatgggccttgaaaggccacatggcatcttatgacgatttctgggcttgatggcgacgaaaatggacgtcatagattagtaacaaaaagataagctttctttatagaatgccattagagatgcatgataggtaacgaatgatattcgtcacacgaatgtcacagagttcacaacatagtgaatcatctatatatgggcctatttgtcgtccaaatacctgcaaacaaccttggtgaatcatctctttgatcctaaattatattttcaaagagacaaagaaacagagagagggagttaaagtccaatttacacccaaacttcaccatacctctcatcttctcctaggaaacatcaacatggggccactagacagccactcatacttggttgagtgaagtacaagtgggatcacaggctcaaaccactgccaactcctttaaatcgtttctacccctcatgttgacaactagctctcactttccacctttactttcaccattcactactacaaccaagatttttgtgtgagggctaaaacgatttttgcgtgcgggtaggcggcctgcacgcacctaggggtctgggaacatgacgatttttgtgtgcgggtggcgcaacccacgggaacacaaaaatccgaaaaaacataattttttttaaaaaaacgaaaccctagaatccggcggtaggctttcgcccgccgcccgcctgccatagtgcagcctgcctcccgccggcctccgcgccacccgccgtcagatccgcactcccctccggccgcacagccgccgacgcccctcccctccgccagatctaggcacgaaaggaaggggaggggaggggagctggatctcgcgcggggacggccgccaccggatccgtgcgtggacggccgccaccgctggattcttgcgttgacggccgccactgctggatctgcgtagggacggccgccgcccgctaggtcccacgccctccaccgccgccacgtggaggaggccggcgcgcgcttactcccaccgccgccgcaccgctgctgtcaccgcgcgctgacggcgctgccgccgttggaaggagaggagaggaggggagagtggagagagaggagaggagatgcgtgagagagagaggactgaggagaagctctacgtggaaattttaaagtggaaaaagggatagaggggaggggagaggagagaaagaggaaaattttaaagttggtgagaggggaaagaggaattagtatttttgcatgcggctctctcaataggtccgcatgggaagatcggctcattttcgcatacagtccatttaagaggaccgcatggaaaaatagatttttccatgccgtcctcttaattgaaccgcacgcgaaaatgagccgattttcctagaagcaacgagttaccgcccgcacgaaatataaaagggtccctgtccaggaaaatcgtttctatattagtgattcgagaagttccttctctacctgatcgatccattttctttgtttccgttttggcatagattgaatacttggtggtgcactcgtcggcgttcccggtgtccagagcaccgccatcgccccacatcgtcgttccaatcgactcaaaccatctccggccgaatcattgagccaccgacgtcgccaaggtcctagcagaaagacacccaaatatgatcatgccaatacgccgccgcaaacgccgtcggtcgccattgcccttttgttgcctctgcttctccagccgttgagtcaccgtaagtgagcccgggtgtttagccacttcattaggcgctaaggactttaattagtagaaatttaaattttgtaaggttctttttttaaaattgctttgtatgccatgtgggcatatggttctaaacgcaattcacctaatacccagtgacctttttgtatatggtttagggtaagccctaaaccctactcagaaattactatttcatggatttattacttgatataatagcttgatgagtatatcgtactcacccttgctttaaccccctctttcagaatcaatttggagtttttgccgaagccaggagtttaatcatataaattggtttcattccaacttagttcccaagtatagattatatagatggtttaattctatagcaaaacattagagttggctcatcctatggcttctacggtaatagttagccacaatcttgtaaataccctattattttatgtaaagaaatctccattggagccttaatcaaatgtatgcgatgaagattcagattgttgaacatgtatcaatctactgatccaggggttcatatagtttaaacatttaggttaccgaatctttaattttgggacccgacaagctgtgtgggtgggggcccctgcgatttgggagcctagtgcggctgtaccgctcccccccccctaagctggccctgactacacgggccgtaaaaggccacatggcatcttatgatgatttctgggcttaatggcgacgaaaatggacgtcatagactctatgacgacagaaggatcgtcactagattagtaacaaaaagataagctttctttatagaatgccattagtgacgcataataggtaacgaatgatattcgtcacacgaatatcacagatttcacaacatgacttgaaattcaatttttatgacgtaaatgagcgtcacctataataagatctattgtagtgatggcttgtttggctattagagagacagtttgagacatacaacacacagagctaattgatcggcgatccacttgggtttctggtgatcatatgcaacatggactaagctacttggatttgttcaaatgatctgcttcttggatgctgtccggccacgtcgacatgcatgcgaattttgtggatgagtcagaggctgcattcacggagctgatttaattaattaacttgttgccagctagtacctaattaattaagcatgtgtgaatttactattaactactttggtagtgttaatttatccttagttttttttattccaaactactagcatgcatgcctttgtcagagagagaaaccgatggaatatgccttgttacaaaagtattgtgcatgctgtgtggattcgtactgtctgcatgagtttttatattttccggggtagagaagataaaagaattcaacttgccaactaggttttttttagagtctggcacatcgtcgaccatgctgcttccctttatcggacctatatacgttaggatcaaatgtgctcaacgtggtctggaccatgctgcttgatgtggtcggatgtaggtgcagtaggaataatccttttcataatagtgaaactaaagaatttcacttgccaactagtttttttagagtctgtacagaaatgaaactttttgaaaagtgctccagatgaccaagttcaattcaccaaccgtaatcgcgtgtcggatttacatgaaaaatacgagactgacaaaaatgatatctttcggttctaaattaatactcccggccatttgagaggagcaatatgtacatatgcatgcatcacacctcagcgttttcgtcttttttttccttgcagttttaagaatgctcataattagggcatgcaagttgatccattagtatattcgcaatatttgatgatttttttcattttaaaaattgttgacgatattagcttaattttggtatggaaaatatcggttaatttattcccaatttttatctcaagcgagaaaatgaaccatgagagttgaggtgctaattaaccacaggcaaatattcattttaatttgttgtgtatatatatatatatatacacgagcatacatgtgaagatggaaatatgtgaaaaatataatagtgctagtagatttgtctaaaacacttccacaatacaatgatcatgacactcgatcaggtctcaaagttaaattttagggattgtgtcaatatcaaaattatcaatgaataattggccagagggccgggattagcaagggtctactactgtcctgccatttcattaattaattagattaagtccccgattccttgcatccctaattggcctacgagaacggacaaaaatcgcaagatgagaggattgtggtaggtaatcttctccaactgtgcctctcaatcggccataacatattagccagaaggataaataaacatcaatctgccttcacagttttgatcatctcatgagacacatatatataaaccacccataagcaagagtctccaaggtgaattaattaactatgttgatacacatatacttaattggtataagagcattagtagcggtagttaattagtataaaagcatcaatcaaatggagactgttagctagctaggagaccgggcaagcaaagcaaagcattgatcttgatgaatcctccagagagattatttgcatattgtccagttccccctgacctattatacacatgcaagtgctctatgtacttgtgcggtgcaacgacgagcaagagtgcgtacatttatagtagaactgagggggtgcgccttatatacaccggacgagcatgagtgtgtacgtttgtagtgatgtctccaattttagtttctgtcgtagtgaaatattcgacgtttgacacctcgaaccatagaaaaactggagctgtgaaatgttttcttcttttttatgcgtggagcactgaaatattgacagttttgttttttctataaaaaaaagaagaagagttgacgacttgatgggcaggctctcctcgatggagggagatgagcttaaaaagtcgcaataaatggacccatgtagtggaaatgcggagtggagtggagcagtaataaaatttaaaacgccacgcgcagggcatctcgaccacgactggactctccttgagatcttcgaacagtgtgtgcttgctagctgaactgcagcagtggaacggtaataaaatttaaaacggatgtgcagtgttcacagaggatgagtgtgctatatatgtgttctctgcttgtgaatagatatggcgatctctgcatgtgaatagatatggcgagtactattactgggtatacatagttaggatagatgttagtttgttctgtttgtttggagatggatttgggagcaaatgtacatggttagggcgcaaatgttagtttgttttgctgtggaggggagtgggttttgatagaagtagacccatgaattttgctattccaaaattcctcaactagctatatgtctagctccacaaatctgtgatgcctatatctcactagtcttgctatgtgctatgtcatgtacccgtgggtaaatagctaatttatgatttttg

SEQ ID NO: 27055 - DNA, 1271 bp, Oryza sativa
caactccctccgtaggtgctgccgccgcccgtccgcccctcctcatcgccgggttgtcgccgccaccttcatcctccgctccggccgccatactcgccggtgaggatcccctctcctccctcttcccctctctcttgtttgcgccgcctctcttcatgcgctcgccgtcgccttcggtcgacgccgccgtcctatacaccgtccgccgtcgcttcccgcgccgccgattgccgtcgccggcgaccgtgcgcgtcgccgccggttgccatggccgccggtcggctttgaagccgagccgagccaggccggcacctccctcccctcccctttgagccaccgcctggtggggtccacccgccgggtaccaccctcggccccgtggacttggtccacggtggaccgacctcccccttgagccgctgacccgtgggtcccgcatgtcggcgccgcccccttttggatgacgtcagtcctgggacttattgcgcaataaatacatcaaggcttctcttttatagtaataaacacagtttatcttctaaaattcataagtaattcatccgagctccgtttaagtccattcaagtctcagtaaatcaagaaaaatgcgaagaatccattaaaaatggtttggtttcctgtttcagtagtcttatagcatgttttgcttgtgtgctttgtttgtcgcgtagattttggccgtttcgtcgatccgcggtttctcgaagacgttgctgaggtctcattagtgcgagagcaaggcaagtcatgcaatacgttgatcatattgtacccaatttaccaatatctcgcatttctattaaatgttgcattcttttacaatatcacgtgggatgggtcctactactcagccatatattgatttccttatgccattggcaacttgggttttaaaatgactagatgttgatttaggaaatgcttacccatgcttagttctactagtacacaaaaggggaatcacattaaagcattgactttgattattggcaatagctttggattggtgccaccgcaatggtgttagttaattaaaatacactgaatggtgggctgtgggtgcacggttttgctggtcgcaccgtggcaattaaggaccggttcacgggaaaccctgggagacttaccgtgcttaccacaagcgggagtgggtaactgcttgatctgaagtatagctcgaccctttcctaggcaccggtggcgagggtgggcgtgatggagttgggtcagccggggtgtccggttgtcca

SEQ ID NO: 27056 - DNA, 4458 bp, Oryza sativa
cgctgctgaagtcaagcttcccggtttagctcgctgttatcttttccgctgatatatacatacaacggaggtagccatttgcaccatatccataatatacaagtaggtagccattcgcaccttatccataccaggacgatccatttgcaccttatccatatcatcacataatgcttctgcctataaatagcagcagcaccttacattcaagaatcacctctcaacacaaaactaagaaacatagcaagataaccagggaaggtagcatcagcaacaggaggcaatggagggaaagaggactaccacttcgatggtgatcatgtgcctggtcatcttgagcctcactgtcgactccgccaccgcggcacagtgcggctgctgcatatcctcttaggcaaaagcatgttgtttcggttgtactgctgctggtggctccgactcagtctacaagaacacttgttgtttcccatgtattctggccgattctggtaaattcactaatgtcactctatttaatgcatttcttacatgtagatacagactttgtagcatatcgtggactaatacatatgtgtggccttccatgcattttcctcaatgtgctttgttgatttcacttccaatctcacgacttcaggcatgtatcttgcaacacgaagacatcttatgctctacttccactacaaaattaactaatgcgctaatgggattttcatattttaatttcatagttgttgctaagatggacgaaatgggagttcttgctaagatggacgaaatgggagttcttgctaagatggaaggacaagcctaaaacaacatgcttgcattgctaccagtcttaatgcctatcataagaatatgttgttttgcttcaagttatggccaagttatgttaatgttatcttcaataaattgttgaccatatggggcgatctatagtggatccatctgttggtctcaactctatgtatgtcgtgcatgtgtgcgctcacaagcatatttaatttctcttgctgcttttaataaggccatagcactgtccattgtgtcatccgatggtctctgaccttagcaatttattacgacatgattaatattatttgtgtatgcatgttctttacttaatttattcttagcggatttctgatgtttttgtgagttttagactatgggacataattaagattgtcatgccaaaaattattgcaaaacctagtaggaaagcaaaagaggcgggggggggggaggaaacatgatcaatttctcggctactatcacattcctcgttttctcaggtttgggagacatatagccacactaaaggcagtaaacctgaggaatgacaaccttactcacaaggacaaatagtcgttaaaaaacaatgacatcactaaccatatctatttcagttcaccaaacatacatttaaatttaggcagtattacggagaactaaattaacaaacaacaaaccatacttcattgtcaaaacaaattgccttctatgtacttcacaaattctcacaagatcatatttgcaatttttcctaaactaattaaccaagagcaaatatgcagtggagcattccacatatatttcacattataagtacataatacagtatggtataatacacatatgcatactaggggcctacggcaaaagaggcaaagatcaatgtgcatgctaacttgtgtataatacacatatgcacagtactttgaaataagcataccaggacatatgcattagttcacaccattcattcttgcattcttgcactttcaacaacaaccagatctaccaagcattcttgcacattaaaccacaagtagatctaccaatgaatcaccaacttaggtagcaatgggggtaatcgggggggaaaaccttacctcgtcagacgacggaaggacaggagatggcggaagattcatcggctgctcaccatggcgcgcggatccctgaggtgtgggcatcacatctatcagcaccaacgacatcggcgggtgggggggggaggaactggggctctttcatagaccgatgtaaactagacttattggcttctatttagggagaggaaggaaaagagatagactttacctggcatggcttgggcctgcacggagagggatagtagttggcttggtttcagccaaaagatatgaagagaattttaaattgttttttcaatttaaataatgaccgaaattatgttagtattattaaaattatttctttagctcggaaaatttcaagaaaatttaagagagcataattaattattgagaagttaataaaactattccaagtcatattttacaaggtaaaattttatttcacatatcaacttgtaacatacaaggaatttcaccatggaaaaattttgtggaaaatttaaaacattttgaattcaaaagtttttggtgaacatagaagcatactagagcatataactccctaaaataaaataaaacacataatttttctggccaaatcaaaactaagtccaaaagtaaaagtttacaaatcttgtggtaaaaaattttgaaacaaaaattttgctttgaccataaactagaaacctaatcttctcggttttgcattttcaacctaactaaaaaaatatatttaagttaaatatcaaacaaattgaaaggtaggtatcaaaatacgcaaacctaaattgagataaaaagaacttgcttgtatctgcatattattcttttaagattgtttttggatattcttggtacatctcataataggttgcatatgcatgctttgtctaaagagaaaattcctaaaaataaatgaggcaacaataaatcccaccaaaattctcataaatactaaacaataccctaagctcccagaaattttagttataataatttatcacatcaattggtaacccaaataaatccttgaactcagctaaaaaatctggaaacagcataccaattagcctactttgcaccttcaccaaaattaaaccataactcatcttgcaaaatctctaggtcaaaatgttaagcatactttactctatcatctggtgcaatggcttagtctaattcgaaatgtaacctcataaaatgagagccataagttaggtaaacagtattctggactgtggtcaatagattaactagtcaactttactaaattaccatggtaaaagcaaaagtaattaaactttggaacttggcaccttgaaccatcaaatccttgtctaccttgctgtctccctgtcaccccccctcccccggccttaattctaaattaaatggatgagagaaagagagtaatatagtttagtgtgatagtgccaacacatggaaaatttagagcttctagttctctccttctacatctctcttaaatgtgggaccaagtccttatggggcccactcatcatacaaccctagccaacacatcatctgctcttctctcatttaaatcttcttttatttctcaaaaggtgagagaagggtttaaattgaatttccacccaaaatgccactctaccactccaagccttctaggaaacatctatatatgggcctatttgttttccaaatacctacaaacaaccttggtgaatcatctctttgatcctaaattatattttcaaagagacaatgaaagagagagagagggagttaaagtccaatttacacccaaacttcaccatacctctcatcttctcctaggaaacatctacatgaggccactagacagccactcatacttggttgagtgaagtacaagtaggatcacagcctcaaaccactgccaactcctttaaatcgtttctacccctcatgttgacaactagctctcactttgcaccttcacttttaccattcactactacaaccaagatttttgtgtgagggctaaaatgatttttgggcgcgggtaggcggcccacacgcacctaggggtctgggaaaatgatgatttttgcgtgcgggtggcgcatccccacgggaaaacaaaaatccgaaataacataattttttttaaaaaaacgaaacccaagaatccggcagtgggcttccgcccgacggccatagtgccgcctgcctcccgccggcctccgcgccacccgccggcagatccgcgcttccctcccgccgcaatgccgccgacgcccctcccctctgccggatctagggagggaaggaaggggagaggaggggagctggatcccgcgtggggagatggcggccggctgccggatccgtgcggggacggccgccaccgctggattcttgcattgacggccaccaccgttggatccgtgtagggactgccgccgcccgccggatccaacgccctccaccgccgccacgtggagcaggcctgcgcgctcctactcccaccgccgtcgcaccgctgctgtcgccacacgccaccaccgctaccgccgtcgggaggagagga

SEQ ID NO: 27057 - DNA, 559 bp, Oryza sativa
ctagccatgccctctgaaacacagatacattacagagatatgctagtcacagatacatcacccccccaattaacatcccagatccatcttaaacatcacagatccccaacaacacatatatgcagttcaaatgccacaattttgcacagcaaattcacaccccttgaaagccacaatttcggtcgttgctcatagaaccgcatatatacttaccaaatggattaaagccataatgtactcgacctccacaacctgtcaataagggaaaaaaaaggagaaaacagatgaatagtacaacataaatcgtagttgatcaaatgtgatgacaatttagtaaagtaccataaatattgcacatatgaaagtaaattacattgcactctataaaaacataattttttacatcgccagaaattataaaaacatcttttttacatcacaataaattatctagccaagttcatgagtctatttggcatgaaaacgtcctttcttgttcattatttctgcaagataaaggcgcacacttcgcctctgatagcggggggggggggggggg

SEQ ID NO: 27058 - DNA, 622 bp, Oryza sativa
gggtacacagagacggtccacgggtcgacggaagcggatcccgtgtgtcaaccgaggcgagtgaccgacaaacggactccactagacaccacacgggttgcacacgtggaaatcacgcggctaccgagcgggcacactaacacggtcaccacacgcacaagcgaacgactaccgacaccggtacacgggtaccggggtcgacaaccgcacaacgggtacggcgcgacaccaaaaggacgaggacggggaagcgagaggacggatccttaccaccacgcgacgaggcgtgggaacgacaacgacgaacgggcgcggcggagacagctcggggatgacggaggcgaacggcgagggaacgacttcggcggcgatccttggacaaggcttgacgacgcggagtcgaggacgaagacgaggacggggctgccgcggcttgcttggcggacgcggacgacggacgagaacggctcgacggagggacgaacgccacgacgaccgggaacgacgagaggacgacgatgatgaccaccggggccggtgaggaggcgacgagggcagccagcagcggctgcacggagaagaggacggcgctgaacacgccgctgcgatgacgatgacggtg

SEQ ID NO: 27059 - DNA, 9467 bp, Oryza sativa
gtgtggttgctccacgtaaaacacagtgttatacacggtatccgtcgcgttactgcacagttttgtgagacgagagctaagaagaggtgggtggtgaggggagttaataggtgggtgtgtctgagctttgatagacgggagggggctttgaccagtgtgtgtctgaggtgggaggtggtttttgggccttaaaaaagagggggaggtgggtgtggcccttcagagagagggggtatagaatagttattctatatatacaatagtcttacgctatatatatttcgcgcatatatatatatggaatacatatatatatatatatatatatatatatatatatatatatatatatatatatatatatatatatatatatatatatatatatatatatgcatatgcatatgtataaatacatatattacacatgtataatttaaagcacttaacattttatgtgcatatatattaccaaaatatatatttacactaaagtaaatgtgtacatctataaacatatacatgcatgtatagacaattcatttgctcactagctagctacgactttgacgccggcattatgtcaaaagaagaaggaccgacgttatgaattgtcgatccgttgtagtagaattcaccctcgggattaaggacttcttcgttgatgaatctcatcagttgttcttgaacagccgtgatataatccttgtgtgggagattgtccctcatgtgaatacactatcattcgaaaaataatgacatatgaatatatgaaattaataaacagcaaatcgatacgcaatgaaattttgaatggtttatatatacgtataccgagctctcgtgtggtgtagatttgggttgataggaagtgggcatactcgcatacgtagtagccgcacaggttagttcccaggtcatgctttgcacactatatgagaaaggacaagagatttaatatacacttatattaactgtaactagtaatcatatataattagcatatgcatgatttaaaattgttaaaaattctaattatcatatgtaaataccacatgcatgatttaaaattgttaaaaattctaataatcatatataactagcatatgcaaaatttaaaattgttaaaaattctaataatcatatgtaaataccacatgcatgatttaaaattgttaaaaattctaataatcatatgtaaataccacatgcatgatttaaaattgttaaaaattctaataatcatatgtaaataccacatgaatgatttaaaattgttaaaaattctaataatcatatataataagcatatgcatgatttaaaacttttaaaaattctaattatcatatataactagcatatacatgatttaaaattttaaaaattctaataatcatacataattaacatatgccgtacaacaattgatttatatggatattcaatacatccaaaatattttacattgtgtacacaacaattacggcaatacatcggcggtgacggttgaccgcacgtacttcctcctcactattgttccttccttgtgttcgctacgtgagtaaagggtgtcttcgtttgataggaggatgctagggtcaaccgtcaccgtgaaagggggttgcccatcaaactgatcataatcctcgtcagtcttgtcctcaactccgatgatttttcttttgctagggagaaccacgtggcacttcggctcatcaggccctttgcccttctttcctttgctagacatgtccttcacataaaaaacttgcattacatcattggcaaggacaaaaggttcgtccgagtatcgaaccttgttaaggtcaaccgttgtcatcccactgtcatcaatcgttacgcctccaccaatcaacctaactcattggcaccggaacagaggaaccttgagaggtccatagacaagttcccatatgtcctcgatagcaccgtaatacgtgcaagttgtaccatcgtgtcccatggcatcgatacgagcagcactgttctggttcgtgctctttatgttttggtctctcgtgtagaatgtgtacccattgatctcatatccttggaatgtcgctatcgagccagatggtcccctcgccaggtaggcaagttgttggctaatcgtctcgttacccatgagatgttgtcgcagccacacgggcaatttatcaatgtgatgccgtgtaatccatgcatcggacttaccgatgtttctggcgggaactagagccaagtgctcctcgatgtaaggagccaccaatgaagattattgcagaaccgtgaaatgggctttacggaataaattgttgtataccgtcattactgcgttccttctgagagtcccctttccccgtagtttcccttcatggcgtgattcaggcaccccgattgggcgaaggtcttcgataaattctacgcagagttcaatgacctcctctgttccataccccttggcgatgcttgcctctagacgagcacggttacgaacatacttcttcaaaacgctcatgtacctctcgaaaggaaacatgttgtgtagttacacaggcccgagaataccgatctttttgacaaggtgacaaagcagatgcgtcattatattgaaaaatgaaggtggaaatatcaactcaaagctgacaagacattgcaccacatcattttgaagggcttccaatctatccggatcgatgaccttctgcgaaattgcgttcatgaaagcacattgctttgttattgttgcccggacattgtctggaaggataccctgaattataactggtagcagttgtgtcatccacacgtgtgacagtcatgagactttaggtttgtgaacttcttctccttcgtgtttattattcgctttatattcgtggaggacgtacaagaattctgaatagggtaactcccaaaatatagagttctttttccacatcaccacgtgaccatgttcgctatcaataggctggctgctaggcccctttccaaacactactttaagagctttcaccatagcaaacactattttctcactgcgatgtttaggcttcgtacggtggtccgccttatgttcaaagtgcttgcctttcttccgtacagggtggtttgcagcaaggaatcgacgatgacccatgtacacaaccttcctacagtgcttaagatatgtactttctgtttcatccatacagtgagtgcaagtcttgtaccccttgttagactgcccggataggttgctaattgtaggccagtcgttgatggttacgaatagcagcgctagtaggttaaactcctcctgtttgtcctcgtcccacacggggacaccttatttcttccacaacagtttcagatcttcgaccagtggtcttaggtacacatcgatgtcattatcaagtggcttggggccttgaataataatcggcatcattctgtacttcctcttcatgcattgccaaaattttggcaggatttcttatgtattaaccagatttggcaacaactaaacgtagatattttttggtaactttggcaaaaaatgatatggttgaaaatggcatcaaagtgaacaggccctaattaacttgttgacagctactccctccattccaaaatataaagtataaccacccttaactcaaagaccaagaaaaaattattatcatcttgtagtttgaatcatcctaataaatataatgcatgcatccaataggattagataacatgagagtaaaggatttaaaaaagtaataacttaatgaagaagatgtcatagttaattgcatgcttgcatgcatgccttatattatggaatagagggagtagtacctaattaagcatgtgtgttaatttattattaactagtaatctgcccgtgctaacgctacggcgacattcagaaatacaaattaagatcgatgaatatagttattatgttgttaattaaattgccacatgcataaaataacatagttattatcctggttcaaatggagtcattagtgacaacaaaccatggtaaaagcaaaagtaattaaactttggaacttggcaccttgaagcatcaaatccttgtctaccttgttgtctccctgtcacccccctcttaattctaaattaaatgaatgagagaaagagattaatatagtttagtgtgatagtgccaacagatggaaaatttagagcttctagttctctccttctacatctctcttaaatgtgggaccaagtccttatggggcccactcatcatacaaccatagccaacacatcatctgctcttctctcatttaaatcttcttttatttttcaaaaggtgagagaaaggtttaaattgaatttccacccaaaatgccactctaccactccaagccttctaggaaacatctatatatgggcctatttgtcgtccaaatacctgcaaacaaccttggtgaatcatctcattatcctaaattatattttcaaagagagaaagaaagagagagagggagctaaagtccaatttacacccaaacttcaccatacctctcatcttctcataggaaacatctacatggggccaatagatagccactcatacttggttgagtgaagtacaagtgggatcacagcctcaaaccactgccaactcctttaattcgtctctacccctcatgttgacaactagctctcactttccacctacttttaccattcactactacaagcaagatttttgtaacgatttttgcgagcgggtaggcggcctgcacgcacctaggggtctgggaaaataatgatttttgcgtgcgggtggcgcacccccacgggaaaacaaaaattcgaaataacatatttttttaaaaaaacgaaaccctagaatccggcggtgggcttccgcccgacggccatagtgccacctgcctcccgccggcctccccgccacccgccatcggatccaagctcccctccggccacaacgccgccgtcgcccctcccctccgccggatctagggagggaaggaaggggagaggaggggagctggatcccacgtggggagaaggaggctggctgccggatccgtgcggggacggctgccaccgcaggattcttgcgttgacggccacagccgctggatccgtgtagggactaccgccgcccgccgaatccacgccctccaccgccgccacatggaggaggccggcgcgctcctactcccaccgccaccgcgccgctgctgtcgccgcgcgccgccgccgctgccaccgtcgggaggagaggagaggagagtggagagaggagaggagaggcgtgagagagaaaggactgagaggagaagctctgcgtggaaattttaaagtggaaaaagggatagaggggaggggagaggagagaaagaggggaaattttaaagtgggttagagaggaaagagggagttagtattttttgcatgcggctctcttaataggtccgcacgggaaaatcggcttattttcgcgtgctgtccatttaagaggaccgcacggaaaaatcgatttttcccagaagaaatgagttaccgcacggaaaaattgatttttccgtgccgtcctctttaatggaccgcacgcgaaaatgagctggttttcccagaagcaacgagataccgcccgcacggaatctaaaaggtccctgtccaggaaaatcgtttctgtagtagtgattcatgaagttccttctctgcttgatcgatccattttctttgtttcttttttggcatagatcgaacacttgctggtgcgctcgtcggtgttcccggtgtccagagtgccaccatcgccccactttgccattccagtcgactcgaatcatctccagctgtaccattgcgccactgacgtcgccttggtcccaggagaacgacgcccacatatgatcaagccaatacgccgccacgaacgctgtcggtcgccgttgctctcctgctgcctctgcttctcttgccgccgagtcaccgacatgtgggcccggctgtttagccacttcattaggtgctaaggactttaattagttgaaattgaaatcttgtaaggttctttttgtaaaattgctttgtttgccatgtgggcttatggacctaaaagcaattcccctaatgcccggggacctttttgtatagggtttagggcttaccctaaaacatgaaattactatttcatgcattcattatgtcgcgaccgagaaaattaccttttcccgaacgctagtgtattaatccccgtcccaggaaaagccggggtacaccaaacaaacatgatacaaaaggcacatctttattatgtcgataatatttacattattacaaaggcacttgaggcctgacaaacaaaaataaacagcagcggactagcgggcctacggctccatcttcacaggcgctcaactggggtataagccaggactccacctaagacttcttctccaaagcttctcctactgaaggggggaaagatagagcaagaatgagtataaccaccgtactcagcaagtcacaccgggagatgcatgattaatgcaagggagtacaaggagataataataggggtttagttttgtagtaaatagcatttaaaagtcatttagttgcccaaagctattttataaagatgatcctagagctacacagtattattaatcaaggccgtggacccacacgaacctgccttaacccaaggcctacgatgattcagaccgaactggcaacccgaccctgggtcccagctcatcccaagccaacccaggccaaccattccacattttagttgttaagcaggttttaagaattaaaaacactaactttggtacattgctaggcttgcccataatcgagggcgcggctattcgaataggttttactctgatcagaggtgtacatctttacccacaagacacgtcttcctcacgtgcaaccacgtgccacatgccaccacggcatatggacggaagacatgacatagtttccaacccatcctagccatagacaagagtaccgacccaaccccacctacggccggaacctccgggacaggtcggtaggactgagcccctagcagcagggcaccaaccctgtgccatgacatctcgactaccgggccacagctcgtgtagccttcatttgtcctagagatgtccatcgagccccgacttcatccatctccatccgtgtacttttgtttataaccagactgagccacaaactaagccttacccactagacatgtggaagtacggtagtgctttgcaacagaggcccgagcttaatccttatattggccggggtgctacttcccacaactggcatgcacccaaaccccaccagaaaacaggttttaggggttttgaaagaggaagagaggggtatgtccaattccaccataagccaaccattccatagtatccaagagatatgaatattcacaaagtctaaagttataaaaaccacctaatgttgtcctattaatcagcgaagcatctacctaaattcatactagtggaaccatgaatagagtacccactagttggggttttgtttattctagggtgaaataggtaataataacaatagcaataataatgtcttaacaaaggtaaatataaatggctaaataaaacagtgataaagcggtaatgcattaatttaaatcaaaataattttataaactgggattcaatatgctcaaggatgatgtgacttgccttgctcagagagaacggccttccgaaccttcggcgacacccgcgaaccacgcttctggaacctccggaacgatagaagctacgcgaagcacacaagcaaagctacaagcctataaagaagaaataacaatacataaaaagaaagcacacggttctttaggttataacaaacattaggagacttgaacgggtcgatttagagttcgtatgaccaagacatggtcatccgaagtttaatgctgttacatggagatttacggattattataattaggctttgcaactataaaacatgtggaagcgctagcctggaaaagacaggaaggctgcgctgttgacatgcggaccccacatgtcaacctaagggaccacagtagaccgagtacacagagacggtccacgggtcgacggaagcggaccccgtgtgccaaccgaggcgagtggccgacaaacggactccactagacaccacgcgggctgcacacgtggaaaccacgcggctaccgagcgggcacacaaacacggtcaccacacgcacccacgaacgattaccgacaccggtacacaggcaccggggtcgacaaccgcacaacgggcacgggcgacaccgaaaggacgaggacggggcagcgaaaggagagagatccttaccaccacgcgacgaggcgtgggaacgacaacgacaaacgggcgcggcggagacagctcggggacgacggaggcgaacggcgagggaacgacttcggcagcgatccttggacgaaggcgagacgcggccggcacaaggcttgacgacgcggagccgaggacgaagacgatgacggggctgctgcacacttgacgaaacgcgggcggcgaacgcgatcggcttgacggagggacgaacgccacgacgaggaggaaggaggaagacgacgaccgacggggaggcgatgagggcagccggcagcagctgcacggaggtgaggacggcgtgggacacgccgcagcgatgcccacgatggtggcagcgcagccagacgacaagccgggcgatcgacgggacgtcgacgacgagaacgaacggagacgacgacgatggaccgaggaggggtttggacaaaggggaggcgaggccgagggcgaccttgccgttgcgatgccggacgtggttgtggcgcagcaagccgacgagccggggaggaggaaggggcggccaaagggacgccggcgacgaagaggatggaaaggccggcgcgggcgacggcggtctccagacgaatcaaagagcaggccggggtggaggtcgacgcggcgacgccgaaggaggagacggcgcggccggcccgcacctgagcggcgcggcaggggcggctggaggtggtacagtggcggcaacggcactggacgacggcgggaacgcgcctccggtggtcaccgcgcgaaacggagggcaggccggtggagaggaggcggctgcgacgctggaggaggcgacggcacggccggacggcgctcgggcgaggagggagaggcggctggaggcggccggcgcgggggaaagagaagggcgacggcggggaggggtgatacgaccacggggaggctcgggatgaggctaaaacgatagaacggaggatggggattccattttataggagaggagagggagccggccacgggggaggtcggaacggaggcgggaatggcgaccggcggccatggaaagcggccggggtagacgcgtccgttcccgacgattgagggcg

SEQ ID NO: 27060 - DNA, 5056 bp, Oryza sativa
tggctcggctcggcctggcttgggcgcggcttgggccgagcggccggcccaggaggagtggagggaggggaggcccgggagagagaggggaggggagggagctgggctgggagggggagagaagaggtgggccgggaggaggaggagaggcctgggagaggagggaaagagagggaggagagggagactttgggctgggcttggcccaaaggaggaaggaggatttatttttagtttttctttttagtaaactttgataattgtttttgttgcttaataattatttccggtgctctgaaaattgaagtaaaatttgagggctctttttagaccacggagaatttaacaaaaattctccggaccacattcgaatttttcttgtacgtattttagtgattgccaatttcttttcgaattttaattaattctattattccttttagaaaatgatttttaatttcgggatgaatttatcaggacgtgacacattacttgatataatagcttgatgattatattgttctcacccttgtttttgccgaagccaggagtttaatcatataaattagtttcattccaacttagttcccaagtgtagattagatagatggtttaattctatagcaaaatattagagttggctcatcctattgcttctacagtaatagttagccaaaatcttgtaaatacccaattattttatgtaaacaaatcttcattggagccttaatcaaatgtatgcgatgaagattcagattgatgaacctgtatcaatctactgattcaggggatgattatcacgcccggaatttctatccaaaattccaaacgcttacatgtgcgttaaaccctcgtccaggaatcagccgaggcacacaataacaaattgataatagagtactatcaaataactaattaatatgcgcagaataaattattacagaggtggatagttcctctcaaagaacaaagttctacgcagcggaaaaaaaaacaaaagactaaaccaggaatataccattccaaaccaggagtcaatttagtcatcacagtattttcattaataatgagtaatgtgagactaatcacgaaaaacattgttagacccacccataaccgcgggcacggctattcgaatagttttactctgattagagatgtaccactgtacccacaagacacaactctacaacatgtcaccatgcacctcagtaccaccacggtaccttggaaaagaactgtgacaatacctctcatacaacacaactcaccacagtgcaccgttcgtggatcataatctccccctcataaccagaggcaacgaactccccagcgacccccacggacttctcgctgcttcacagtctggcaccccgtaatgaatcatgctatacaaaaggtaaagccgttgctcacgctggcttgtggttggcacggtaaatgtttcacaacagtagctcgtcaaccagtccttaattgttatgagcacgaccatcaaaaccatgtactcacaacccacctttcatcaggtttatgtatcaattaattatcataacacgattaaccatcgtaagctaccactaaatataaccataagtaatatcgtaatatgattaaccccattgatgagctaatgtttctaagcatggctaagcaattatacctatatagcacttagctgaaccaaaccaatatataaggtccaagctattcaatttattacccataggaaaataaagtcattgtcggccattaaataactgggaaaggctcaccacccgacgacattcgaaaataatgcataagttgaaataaaacattagctttaaacatgttcaacatgctaaaagcgctgtttgggatctgtgtgacttgccttgagcttcttcaaacacttctgaaccttcctcagcgtaaacgctctcctcgggaatgtcggaaactaaagcaaataaaccaaatcaacaaacagtacaaaaacaagcataaacagtacatgtggatatttttaacatgtagatcttgattttagatgaatttagcaacttgaaccacttgaatttgagttacgatgatttagttatgaatttccgaagtttaatcgatttttaactaatagaaaaaactaataaaaaggatttatgacatcatcgatgacaacatcgctggccatggcacggctccacgcgaccactagcgatagagagctcggttgggctatccaaggacacctacgcgaagaggacgacgacacgaactcaccggtgcaagaaactacgccggacaacgacgtacggcgaccggcgatgaggacaaacggcggcgcggctcgactcgacgacggcggcggcgttccagcggcttgcgacgacggcgaaggggcagccgaggtactcctccaccgtgcaaacccggcggcggcgacggacagcgacggcggcgacgctagcggtggcgcggcgcgactggagagtcgccggcgacggcggcgccgctacgaacaacggcgggactcgggacttggggcaaacggaagaggacgactaggggatgctttatataggcttggattagagagatcggactccaaccgagaggaatcgagccgggaaaaactagggttagttaggagagataaactcaaaacgaattcgatttggtttatctgggcaaaattgatctccgaaactctaggggaaagggagaggataaggaggagatgatttcccctcaagcaaccggactcgggggcgaccggttgaggttgaatcggaggagagacggcggtgctcgggctcggctcggcccggccggaggtaggggatgaccctgacatgtgggccccatatgtcggcggctagaggagaggagggacggctaggcttggattgggccggcgtggctgcacggccgcgcgcgagggacagggatgttgggccggaaacagcctaggggaggattttaaagactttttcaattaaaataattcgtgaaatgatgtttcatttattaaaaatacttcccttgctcaaataattcccagaaaaatctagaaaatagataagcaagcaaagtatttaataaaattttatctagctcaattttgtgttgaaatttttcctagattattagagtttaacttgtaggtttttaaaataatttctaaaaatgcattaaaaattgaattattaaattaggcgattttcagggcgtgacaaacctaccccccttaaacggaatctcgtcctcgagattcagaagaactggcaaaaagatgaggatgagctgacttcaattcatcctcccgctcccaagtggcttcttcttctgaatgattgctccactaaaacttacagaaccgtatgacgcgattctgggtgtttctctcactcacctccaaaattctgactggcttctcaacataagttaaatcttcttgaatctctaaacgctcaggatctgcttcctcggtaggtacactcaaacatttcttcaactgcgacacatgggaaacgatcatgtattccctccattgacagaggcaactctacttgataagctacttcacctctccgactcacaatcttaaaaggtcccacaaaacgcggtgccaatttctctttggtctgaaaacgatgaactccccgcagcggcgtaacccgtaggtatacataatccccttcttcgaaagtcaaatccctacgacgattgtctgcatagctcttttgacgcgactgagcaactcgcaacctttcttggataatcttcactttttcttctgcctctcgcaatacatctgtcccaaaaacttgacgctcaccagtttgatcccaaaggagcggtgtacggcacttacgaccatacaatgctttgtatggagccatttgaagactagcttgataactgttgttatacgagaattcagcatacgacagattcttatcccaacttccaccgacatctagaacacaggctctcaacatgtcttctagaatttaatttactctttttgtctgaccgtcagtttgagggtgataggcagcactgaaattcaaacgagtacccatcccttcttgtaagttctgccaaaacttcgaagtaaactgactacctctgtctaacactattttcttgggaacgccatgtaaacatacaactcttgccatatatagctctgcgagcttatttcccatgtaggttgttttgacgggtatgaaatgagcaactttagtacgcctgtcaaccactacccaaatagaatcatgtcctaccgatgttctgggtagaccggtgataaaatccattcctatttcctcccatttccactctggaatcttcaacggttgcagcagaccggctggcttctgatgctccgccttgactcgctgacacacatcgcatagagccacatattctgctatctctcgtcgcatgctggcccactagaattgttgcttcaggtcttgatacatcttagtgctcccgggatgaatggaatacaaagtttcatgggcttctttcatgatagtatcctttagctccttattatcgggcacgcaatttctttctcctagccacacagttccttgctcatcctctatatagccgatggctttacctcttctcatgttctttttgatttcttggatatcaggatcattcatttgagcctctctaacttgatcaaaaagagtaggctgagcttctaaagcggcaacaaaacctttgttgactattcccaagttcaacttttcaaattcctcacataactcccaaggtaggtgtcgaccttctaacatcttacaagtagcttttcttgttgagagcatctgctacaacatttgctttacctggatgataatccttgatcaactctaacccccgtcgttgacgcatgttcaaatcaggttgagtgaaaatgtacttcaaacttttgtgatccgtatacatctccgtacggttaccaaaaaggtaatgacgccaaatcttcaatgcatgaactcagatgccaactttaggtcatgtgttggatagttattctcgtgggggcgtaact

SEQ ID NO: 27061 - DNA, 626 bp, Oryza sativa
tccatgaatatgatatctatctaatgtgatatcttgaaagtgaatcgtattccatgaatatgatatctatctaatgtgatatatggaatatatgacaaaggtggagtcttggagtatttcgatcgatcggtcatataggcctgagtcagacatcaaatagcttcgatttgcattatccgtaggacaccttatatgtatcaaaatcaaaaagatgtacaatccaatttctcgattcaatagaagcccaaagaggtgcatatggtacccaaataaggataggatagatatgtcaaaagcaggtctgattacacctattcctaatcctaaatagaatgtaaggacgtggggatttctatgtaaacagagtatcctatttccataggctcgaatgaccccttctcataataagaatgtgcacggtctggtccggtatggaatgaacttataatctgatgatcgagtcgattccatgattataagttcattaccctagcgcccattcccattttgggcggaacagatctactaattcttttattccagttagtaagagggatcttgaactaagaaatagacctagcagctaaaagagggtatcctgagcaattgcaagaatggggttcatt

SEQ ID NO: 27062 - DNA, 38422 bp, Oryza sativa
cactgatctaaaagtatgaacaggtataaaaaatatctacaaattacttacatgaagggctcattaaaatggcctccagagtgatgagaaaaacctccgatagaattctgcgtttaatgagagaaaatcattaattaggcacttgaagcagcaacaataatttttcaagtaaatatcaagtaaggatgagagttatactaatgaaaatgtccaacatttttcatgggtgttttgccatcatggtactattgttgcactagtatatataaactataaaaacttatgtgagccacaaagtctaaagcacagtaatgcataagtaaacataaatggtgatatactgatagatgcagaaaatatattgttacagaagatttagatgtccttaccgcccatgtcattaacaggctcactttcgcacggtctttcccagtgttcactagctataataaacacagaaaacaaaaggaaggatggtcatgtaatttcatcaggttgagaagattaagagcatctcttcatgtaaatacatatgaaaacttaatgggaacattcaattcagtagaatattcattaatcagtaactcctcaagtaaacagcatgtcccatgatctaagaacaatcactgtaattaaacatttttctatataactgtattctgaaatgttttgacatatatgttcgcaccaacaatattattttaacagtgaccatgttaaaattctcctgtcgacataaaaaggcagggctctctctaccttatgatccatgtcagaactgttacatgtggaatatcttggctgaagttgccagaacatatttcttaatataaatgttattgaaccagtatcagattcaagcaagaattagagcgagacatggttaatcccctagttccacaaacctaatcccaactgttatcaacaccgatccacatgtatattccatgatattatctaaaggaatatacttatcaggaaatatgaaataaaaaaagatgagggaaatataccagctgaagaacctgccagcctagcataaaactaactttatgagtcacttacagtgtacacaaagacagaagttgggaggctgctatctttgtaatcatgaggaatgaatggtgatatctgacgacatgagattttaaggtctggatccggttcacctgaatacacggaaaaattcataagattcttaagttcaaaacatgtctactgctactaaaaaaagatatccatcaagttcataactccatataatagtattgaaaattaattatgtaatcaacatataagctggcttggcataaagcatatccatctcttggtagaaaagagaagtgtttgtgccatcacaagatgcaagcaatgttccacagctccatgatggcataccatcataaacagtccatgccctaggaaataaagcatgataggtagaatgttgaccgctcaagttccagtcccatgaagaaattccagagtcattacatttcctgaaatcaggtaaggcatcaaacaagtgcactctatatcaaatttgttgagtcataactgaagcgtgattgcaacatatatataggtacaataaactagaattctgttcacattatgcacagcgatgtttgactcttgagtcacaaatgtacaagaaagaatttggtatatatctcacactctctctgctatataatatgcaagtcgatatttgaaataaatttctacgcacagcgccgttggcttttgaatcacaaattaaaattaaaattgaagcgcaagtcacttatataaagtatgcaaagtggatctgcatttcaaaaggccacatactatatgggaaacaaggcacatcagaagaacaaatacaaggtaacaatgtatgcactatacaattggctgtgaataccattcaatcaacaataaagaacttctgcaagttttaacttcagaaaagcaatgcaaaattacaaatctacttgttgaagcttacccttgtgcaagatacaggattgcagaatgacgagctcagaagctcagacttagtaaatttggataaactaaagaaagactgttatttgcaatataaatgaagaaacttactttaaaccttcatggtgtccgggagacaataccgatgagtactttttgttccccccatcgcgagatacaaatatctagaacagcagggtactatgtgtcagttcaagactctcaccttagttgtgagaaaaaaaataaacaagcatagtgactcgggagtactaagtcaaaagattcaagattttataaacagttgctgtcataaatcttgtatggagcccctgatgggcttgattgggtggcccacatccatggaagtttatatacatcgataggaaaaataagtgtgtaatagctggcgaattgacaagaacttgctaactgattacaacactcatcaaaaagtgtcacaagcagcagatggaactcgtccatccacaaacattaaacagtggaaacagtcgtgcctttttatctcaacaaaagtccccaaaaacactccactcaacagttgatttcacacttgagcacagccgcaacaacaaagatagcacttaaaagattctttttgacgcatatttagtgaattgccataatatgagtatgtgagacaccagtgaagggtagatgtcataagactttccccaaaaataatactagtgactagtgaggggctaggagcattttcagcagtcagaagaaaatccttcagataagctagctaatggtccaaaaattcaattatgcatcaccataaaccaagttgattaaccagcaacagcagaaagaagaagaaagcattactgaaaactggttctccatgaccggggaagtctcacataaaccaggaatgatatgccaattcttgaactctcccctgaaacctcttgaaatgctaccactcctgcaaaaccagtgtattggtatcaaaattacagcatccatagtgcaaatagacaagcataaacatgagattattggaggttaaaacatcaattcaggcggacacaccccatcccaccaagcggtacgccctgcgaagcagacggcttacatttctctttggtaaacggatcaattggagctttctgcaagcatagcagaccccattttatcaccacacacaatttatattcatagatgtttggtataattttagataaaaggaaattccattaagtaatgaaatataaatagcataagaacagccgatggtacccttccatgagaagcctcctctcggacatacgaccatagcctcaggccaaggctcatctgaaatttttcacattccaaaaaacaaatgattagcagatagcagcattaaaaaggaaacgacgcaggtgttacagaaatcaaactgcttgaacaacatgcagagaaccaagcgttgtaacataccatcctcattgcttccatgaaggtgacgctgaattccttgagtaagttggcgtggctgttcagacgccgccgccatgcctgctccggaggcgacccgccgtcgaagtccaactgcgaaatccaaagcatccccagcaaaatcaaacacgcgcccacaggaagcacaagcccaaaaggaacaagaaattggactcaccaactgcagggcggttcggccgacgtactcctcggccggccacgagttcctccggcagtggaagaggttgccgctcaccatcccgtctcacccccaatgccaccacgcccccgatccaactcccgccgatcggaggcacgatccacgaacaaatcccctcccgcgccgcgccgcaatcatgcgcgcggatccgatcccccagcgccgcccctcctcctcatcgcgccctcctccgatccgatgccgccctctgctcccctcccctccccacctctcgatcgattcaaccaaaccagatcaaaaccaaaccgaagcgggcagcctctcgcggagaggactctccagtctccacccacccgcgcgcgccgccgcgggaggcagttgctccacgcggagacgagaagaccgcgaggaggtcagcggaggaggaggctggactccgaagcgaagcgaagcgaagcgaggcgaggcgaagccgcgggaagaggaaggaagagggtggagaaaaggaaggtggttgcggttgcggcggtggcggtcggcaagggcggctgtgtgtaggcagaacgcaggcaaagcacggacgcgcgtgggggaagaagaaatcaaacgggcgtgtgcgatttattgcgtggccgtaccaatttccggggagtccgtccgttgcccatgtttcgtcgtcaggtggtaaaattgttggcgataccccggtagttatcctgcacggttctttattactcactctatcccaaaacaatatcaatagttttgagtttttgtctataattaccattcatcttatttaaaaggttatgaaattattatttattttatctgtgatttgttttattatcaaaagtattttaagtataacttatccatttttatatttacactattttttaaataagatgaatggtcaaacgttaccagaaaaaatcaaaactacacctaatttatgatgggttattattattattattattattattattattattattattattattattattattattattattattattacctccacgaatctgtgctgaagggtgaaggttacggatgaagaggattggaatatttgcatcttttctttgcgaggaaatgggagtgggaggggggaataatttcgtgtggatagtattttgtgtcaataaacccgtggtgacaagggttatgtgtggttatacatcaataaagtatgagggaatatgttcatatttgattgatattttaagtttgcgtatgctgcttgatgttagccttagacacacgagcataatgatggtgaaaagggtttcaaaaggatgccttttccttttatttgctctacgcttcgaaaaattaattaatatatttcctagaagaaaaggtagctcattatttacacctcttatctaaaattatgtttatttcttaaaatatttaatttattcatataataggtagaaatccacaccaataatctaaaataaacatgatgttaagtcaccaatgacacaacggcacatattcttaacgttaatatatgttcaacatagtttatttttcaatactaatttttaagttataaggatagatatataaaagttttggtctccaacagctgttttagtacataactagcttatagtcaaccgataggcccttctatcttttgtggacacgtgattccattttatttacgatcaataactaaattaagcgtaactgtgcttggctatatgcctatatccaaaatcattatgcaatcacattgttgcatataatactgtactcattttccaaatttggagaagttcccttcatacaacaaaaaccagagctattggaaaaaacaactgctagggtcgtttgagcattttctcatctataccacttgctatacactgcctattttcaacttcacaagtcactgttctagcatcagtgtgaaaaaaaagggtatttgtgcatgcttgtgcaatctcaagttaaaagtcaattgctaacatctacatatacatataactaaaccaacccacaaatagtcaactgatcatccaaattattatttctagtataggctgtccctaattttatttcccttatatatagagttccttcagaatatgtccctgttgcgaagacacatctactcctatcagaagagaaccagtgcgtgctctttggcttgccctttttccttttcttttctttttttttttggagagaactcactttcggttagtttcatgatcttgacagcgaacttatttatcaaccgacattttatctttttcttactcacatgaatttatcctgtgcttggtagaacgacgcgtccgggttagaaaggattatcccgaaacagtgactgtaaaagcaagtataatagtgagctataagcctattataagcttaggtggaggaaagagatagtgaaaaattaaggatgttggctcttatgtaagagctagcttatcacaagctccaagacaaatgcattaaatgtataagtgagagataaagagatgagaagaaaattgtagccaatcttatagctaatctattatatatgttggctttaagatgggctaatagtagaaattgggctttattattatctaagttgctttgttttcgagcaaagtagccttgatggatacgcatctctgacgttcgataattaaaggatgatatgtactttcttaaagactgaatgatactagtatgtagagtacttaatgggacactgacatgtgaaattgagcccaaatttcatttatctatatggagataaaggctacgtttagttcatacggaaaaacttttcacattatcatattaaatgtttggatatatgtatgaagtattaaatatagaaaaagtttaattacatagattgcgtgtaagataagaggcagatttttttttctaattgctccatgatttgacaatgtggtgctaaagtaaacatttgctaatgacgaattaattatgcttaataaattcgtctcgcagtttacaagtattagtctatgtttgatactttaaatatgtatccgtatatccgatgtgacacgccaaaactttttacccatattacatattcctctgttccaaaatacaagtatttgtaatattaaaaaatttgtatagatcaatctaagtatttctctaatactaatttaaatgcaaagaaatccaaacattttcaagcaatcagaaggttaggaatgaaacataaggcgattcaaaatttgacaaactgtgactaaaaaggaatattcaaacagcctaaaaattagtactgatgtactatattttagattaaaaaaatatatattccattttagacttgaaatttataccagggatttatccagaagtttcaatggtcggaagttgtcccgttcagctggctcgaccgagaccagccaaaaagaaaaaagaaaaagtactactagtggtacgaaaagtacaccaggaaaaggttgggtgaaccggggcgccgtccggtgtccagccatgcagccatccacacccttcccttccgtgcacgtcgccgcgcgtggccgctgccacgccacgcctcgtcacgggcgggtgccgacgcgccgccgccacccgccgcgcatgcgcgccacggcggcggcgtcgtcgccagctcgatcgctcagtactttgccggcaggcaagcgagcaaacggccggattgacccctgtggtgttcactgttcagtaaataatgccggcgttttgcgatcggtggtggccatcaatccctcattttctggattagatatggatctttgtataaagtcgatgagaaatgagtaggagaggggagagctacatactagtactgcttattattcagtcatgtaaagggatttcgatatatatatatatggcaaaacaaaacttgttatttgggttaaacgatcgtacgtagggctgatttacggcttacggggaaggaagaacgcgggcgcacaacgtcggcgttgtcgacgcaagaaaccctggtggtggtggtggtggttggaatagctgaccaagcggtaactagtactctaccaagtcgaccgctaagtccatcggtaattgttttctagaatgaaatcagcagaaaagtactgctactattcaaacgacagcgacacctgggacctctcggatctcccccggccctcttccaaacgtcattttcgagcttttcctcctcaaaacgaccgcgcggctttgcactttccgatcatttttttaccattttatctagggacggtctatacgtcattcaacggagaacatatttaaaaatcttacgaattttatatcacaagattatattaagattcgtgcgagtaagcaaaccttaacaatctcctcattctctcgactccggttcactaataccaacacattctgcgtcgccgtcgccgccgccgcccggccttgccgactagccggaagacatcaacgcgcgccagcgaggccccactgaagagcctcctctcgctcccccctctccttcctcgagccatcagtggcaagatgccctcgccctcgtcgtcttccgcttttccggtggctcttttgttatcggatctgccaccaccgagctctacaagctcgctatgcccccgccaccaacaccggcctcgtggcaccgtcacctcccacgatcatccctctaagtcgacgacctcccattcttccccttccctttccccttctcctcccacctccacttcaaccccctaattcatcggtcctccatcgaaattcgggttattatgtaggcaaaatttgctacatggcatctaaaatttgtgtaattggtcataggagaccgtaaaattgtgtgactgctaaaggacatcaaaaaacggtgtaattggctacaggacgccgaacacattattttataattttcaaggcaaagtagagagagaattttttaaaaagacaagtttacccctgattaccctttctccccatggctatgaggaggcgacggcagcttcaacggtggcgagtggcagtgcaagcaaagcagtgacctgctgcgatgggcggcccgcacaggtggacgtcagccactagagtaacggtccggcgctgggcctgtccctcggcagcggtggaggagaccaacgcgacggcacactgtggtggccgtattgctgcgctggagccatcgctgatcctgagcatgcttgacaaacgcggcagatgcagctgcgacggtgaccgtggccctacgcattgcgtcattatatagctgtccgtcggcgtggcggtgaagtgggagtgtgtggaggagatcaacggtgagatggtgtcgtcggcggacggtcaggcgagccggacggcaacgactatggtagcatccgcaagaagctccagtattgatttgtatttgttcatccacacagcacggccaacctggtacatcacgtatgtccacgcgtttttttacattgtattgattggtatttgatcatcttttgttggttgaatacgtgcggatcactaaaccagcgctttgttttttcgagcagaagcagaaagtccctttttactcgaaaatcaactgatgctcaggccaaggcaggggcaaacttgtatttctttttaatttctctctcccctttttactcgaaaattataaaataatattcctatagccaattacactattttttggtgtctctcggcaatgacacgatcttacggtgtcctccagccaattacataaattttgaatgtcctgtagcaaattttgcctattatgtatgtggaaaaaaaagaaagttgttggagttgaataaaaagtacatgtaacataaatcacgaaatatatttaataaatcaaaatttatatggactttctgttgaaagaagggttaagttaacaactccattttctttttttaatggaaaactccattttcttcgtcacacaactagcacacacaagcacccaattagtggatcccctccgcttgtgggtaaaaaaaacgccgtgagtttccctcgcaccgcgtggccaccccgctcgcccagtgccgaccaggtttcacaccgcgatctctccagagggagagaggaaaaaaaactacccgcacaccgagacgctcgtgagtcgtgtcgtgtcgcgcgacgcgccgtgccgtgacgtctcttcgtcggcgcgccgaccccgcgagcgccgcgccgccggaaaaacgacgtcgtcacgtacgcgcgcgcggagtaccctctcacaaaagcgagtgcttcttttttttttccttttggggggcgtagtggcatctgcgtcgtctcgtccacacagcagatgacgggacgagtggtggtgtggtggcgtccaggtccatcgcgtgcaccgtcgacaacgacgacgacgagtccttttcttctttattactatctccatattttaatatatgtcgcccttaattttttattctatgtttgaccatttatcttattaaaaaaatttatgtaattatcatttattttattatgacttaatttatcatcaaatgttctttaaacatgacataaatattttcatatttgtacaaaaaatttaaataaaacgaatgattaaacgttggtcgtgaatttaaataagtatctcgcacagtagtataattgtagcttttttttggtttatctcctggctgagctctcccggtttttgcgcccctcgtcagcgccagaggacacgggccactacatttcagcgtcttagccctttatttcttttttctctcttttcaatttgttctatattacactgtacttgagtgaagaacatacgtaaaattgcaatccactcagaaatggcacggaggaacggacagaagaagcgacgttgatgtgcggctgtttctctctgtccggggactacaagtgataattgggggcgaggttataatgcattgctcgactgacattgacaagtcccgaaaaagaaacggttacatgttcgttattgcgcacgtccacattcgggaactgatcgatcgatttattatacgtatgtagccacaaatacctcacgactccactcccttccttccttttaacaccatctatcggataaacagggaagagcaagctagaagctaatgatagattttttctttctttcttttcctcccatttggagcggcggccaagagaatacacatactgtaacaacatctttttcgtcgaatactacatatgtagtgtatagagcatcaacgtgggtacaaaaaggaaaggaagcggtgcggcattggaagcaagcaaggatcggaagcatcccgtgatcatgccatcttcctaacctatatattcgctattatatactccctccgttttaaaatgtttgacactgttgactttttagcacatgtttaaccgttcgtcttattcaaacaaaattgtgaaatatgtaaaactatacgtgtacataaaaatatatttaacaatgaatcaaatgatatgaaaagaataaataattatttaaattttttaaataagatgaatggtcaaacacgtacttaaaagtcaattgtgtcaaatattttgaaacggagggagtatattttttattcctaatgagtggatcgctgattaatctataatcgtggctcaattagcctccatgagagatgacagcgtcacggtcgatcgatctccgtatcattcaagcaggcatcgcacgtggaggagtggaagctagtgtggaaccttccctcccctgccgcctgcctgtacacgccggcgcttacagtacaccctacaagcgaaagaaacccaaacaaaccaaaaaaaaaaaaagttgcaggcagcgaatgcccctcagcacccgtgcgcgatcctgccggtgggtctcgcgcccgtgccgtccctgcagccgcgcgtacgtacgcacgccgcgatcgacgaaacacgggcgcagtcgtcgtcgtcgtcgtcgtcccggtggtgtttcaagcgcgtgctgtgcgtgcggcggcggtgacaccgtgcgcccgcgtacgtatccgcgcgggacaagcagcggacgggccgagcaaaatccggtgttgtacgcgggccgggcgcggtgaggccgtccgctcgatgtaggccgttccgttgcggaataagttcaccggaggtccctcaatttaacagcaagattttttgaggtccctcaaggcctcaaccacaaaaccagaaatgttcgcccctaaaatttcacaaaccgttcaccagaggtcccttggcagtataggtgggtggttttgcttacgtggcatcctagtcaacaaaaaaaataaaaaaatttcgtgggacccacatgtcagctgcagtttattttttcttctcttttctctcctcttctctttcctctcctctctctttgccggcggcgggcggtgatgggcaaacgcgcagctggagtaggtggaggggcggcgtcagtgcgctagagcaggcggagcggtggtgtctccaggcgagcgtggctgcggcggcgggcaagcggcggctcgggcggtgcgtggccggagcaggcggaagcggcgacatctccgggcgcgggcggagtaaaggggcgggggacgcggggggcacggcgggcgagcggcggcgaggcgtcgcctctttcgccctctcccgccggcctcatctccccccactccgtccgctcccgccgctgcggcgcgccacctcgctgggctcctccgatgagtgcgacggcggcggcggcggcaaccagcggcgagaacgacgtgctcgttcgctctgtccgctttgcgcgccgctctcgccgccgacaacgacgcgactggcggagtaggccgccacgctcctccttcggccacctccgccgttgcggccccttcctccgcctgccgtgctcgtccgctctgcccgcagcccgccgcgcttgccttctgctcgcccgccgccgtccaacgtcgctacgcgtgccgccgcgccgctcgcctccgttctgcccacagggcgcgctcggtggatagcgggctcaaggacgacctcgtgttcggggaccccaacgcgccgcggtttgtgctgtgggaggggaagctaaggccggtgccgtccaagcccggcgacctgccgttcttcaacctcatgagcatccccggcaagctcagggccggcctcggcgtgctcggcattcgaccaccacccccttctgatccctccgccaccggcggcaacatccccgtcggccgcaaggatcccctcccggagcaggagcccgtcccggaacctgcccccatctcccgccgtggtcgcccgcggtccgccggccatcgccccgcccgtctcggtcgtcgaagaagagagaagagaagaaagggaaaaaaagaagggatgtggggcccgtaccgttttctctcacttacatgtgagccccatatactttatttatttacttttgctgactaggatgccacgtaagcgaaaccacccctataggacctcccgtgaacggtttgtgaaattttaggggcgaacatttctggttttgtggttgaggccttaagggactttaaaaaatctcgctgttaaattgagggacctccgatgaacttattccttccgttgcgtcccgcacggcttatgccggccggcccagggaggcgacacataaaccgttcggcctttttatttatatgtaaataaggtccattttatatggatccatatagggatcgggcgcccgatcttttaataaaaaaatcgggcgcctcttccagtcctcccagcttttttactgccaccacgtagacgcaagccactgcatcaaaagaagccatgcattaatagcactaaacaatagtaggatggttacagtattttttacaaacttcaaactattttttctcttaaattacttatccaattcacgatctgattacaccgttgtattcgttataattaaatctttacaacaagaccacacatgattatatttcgacaaaaaatattttagcttttttattgatattttttttgaatgttgcatatggtctcttttgatgtttcaatcagtagttttacgttgtttcagctagtgtacttgtgatgtttcactgtgtacggatcaaatgttgcaatagattttgatattatagaagacgcccttgcaacaaatcacgcgcatattatggaaatcttctattaaggaaatccgttttatattttgttccaccaaaaatgtttcacatagtgtactcataatgtttcactatgtatagatctaatgttgcactgaacgaaacattccattgcaacaaaaagcccacatattttggacatctcctattaagggaatttggtttatttttttttgttccaccgaaaaatgtttaacctagtgtactcacaatgtttcactatgtatagatctaatgttgcagtgaactgaaacattctttcgctatttgctgaaacattgtttttatataagttgaaacaacatccaatttaaacgagtgaaatattttcgatctacttagtgaaaccattccgatatatctggtggaacatcgtacaacattttaaaaaaattcaataataaattaatttttttcgtcggaatatatccatgtgtggtcttgttttgaagatttgattgcaacgaatttaatggtgcaattgaatcatgatttggataagtaatttaagagaaaaatcggtttaaagttcgcttaaaaagtttaacatgcatgcatgatgacgtcaccccgattcctagttgcttcctgctcctcagtgacttgcatgtatgtcaggtaggcatgactgaggatgggataacagcctgataacttttcccttccatcgggcgactgacatcaagcattttcaattttatatccctcaactataatccgagttccatttgtccattactaaatttcaacagaactgctcgttggtttgactaaattagcgtaaaactatataaatttaaggtgttgcagttgcataacgaaaactacatatttaacgtgaaatttctcttagaaatatagatttaagatagagtgtcaaaaaataatagaggttaagtagcaatcatcacaaaaaaaaactacaggtccgtaacttacatagctcctacacaatggcggtgctagggatttaaactctacaatccatagttttgtgatagcttcaatattaaatatgtaggagtgaaatacatgggatggtgtcacttaggtccgtgtgaaaattgcacgtttagatccgtgaacttggtttaatataaccctggtccaatggtcctttgaccacgattaaccaccaaggtggcaagcaacacttttgtgctcagccccctccacatatatcttcgcacataatttgccctgaccagtgcatttcaacccaaatccctcaaaatatccctaaatcggctagggtttcgactgtgaggttagcggaaggaggccgagaggtagcggctgtggtggcctcagcggtgagattagcggcaggaggcagcgcggtgtagcggggttagcggtggcatagtgcggccggattagcggcggagacagcgcaatgcggcttgcactctaggcatccccatggattctccaagctcatcctcgccttgaagtcgctagaagaaggtgttgttgatcaagtgtccgctgtgcaaggataaggttattttggagcgcagagcaatgacaattaacgttaatcggaaccatattttctgtacatgtaaggagaagaatgagaggaaagaacgatttgaggattttttttttgggattctggtgtcactatatagcaacaaggagatatatgcgacgtgttgtgatgtggagggggctgagagcaaaagtgatgcctacgtggcatgccacgttggtggtcaaatgtagtcaaaggacgtttggatcgggggtggtacattaaaccaagttcacggatctaagtgacaccaccacataagtttaggggccggccatgtatttcactcaatatgtagttttgtgatacttgttctttaatatgtagtttttttataacttttccactcaatctttagtttgcgatataacatttaaaatttttagttttgcaatagtttggttgacgtatctataggtttgtgaaatttactctttgtccatttaactgcaaaagccgatattgagtgttcctcaacttttaaaaccagtgcaaatcgagtctctaattagttttgtcctacgacctgttgacttggttctaagaggcacatacgtgatgcttacgtgtcactggaaggagaatacatgttagtgtgctctcaacctttcctactacggagtacttcctctgtttcacaacgtaaaactttttagtattgctcacatctatatgtatataggcaatgctagaaagtcttacattctgaaacggattctgaaacggagggagcagggagtaggtgagtgatggcgcggcaagaagcaacggcgagtgacaaaggagcaacattggctgtggtgtgggaataagcaaagggaagtgcatggcagttctctaatcaccctcgctgccaccccctccttccgacaaccgtgtctgaggcatcgccgccatgccaaatccgatcgagtattaattagggacaacagtggtggccaaagtgagagcagtgagggtcatgccatctaggatgaaattggcatccaaatcatcgaggagcttgattcggactagttttgatagttggagaatactcctactttacactcgattatacggttgaaggatacaaatgaaacttgatatccttctggtgagcaaccgggaaccggtctgccggtttcggctgcgttatatactgtgaggaatgtaaagtggactttttcccttccggtgaacacacacgaggagtggttgctggtggcggcccagggcgtcacacaaacgtgtggcctttttatgtttcactcaagttagatgatgtgagcgttgttattatgtataaacacgattaatcagtattattttcattatttatgttggtcaagtatgatgtttgtgatgaccgtggcacggagaagccgtacacaatgagactctacagatgctttccatcggatgtcaactcttgtactttgcaatgctaacaactagtgctagctatagcctatagctccggtagatcatcttattttttttagcgtcttggtcttaatttcctgacaactaccggaatcatgtaatcgtgacgcataatatagcacgtaattgggactacgcatcttgttagctacttaattaatttcgatggaatcaattggttgacagaccttcattttgcaacgcaaaatatatttttctcgcaataagcagttataaaattacctctaccaaacagcacattggtcgttgacaatagctactcccatctctatttaatgtaacgtgctaattaaattaaaaatattaaccacgagatacacctgtatctacgcgtataatacagtcctataccaatccatacccgtaccttcccagtaaaggaatattgcaatacgtatatctctctctgtgttgcagttaattttcttttctttaaatatacttgttaatttgaagatcatttcctaatgtaacctgctcgaaatcttcaaccacaaaatacacctattccagctcagacgcataccttcccattaaagatatattacatacttattctctctgcgtttcagagaacaattccaaatataattgtttctttgaagatcatttcctatctaatctaacctagtagtgaaaaaaaattccagccataaaatatctgtattatacgcatcctcagttctatgcatctcagccacaaaccttcccatcaattgaaaaacaatttttttatatgtaaatgaagtaggaggtctgtcccttttattttatacctagaagggaacaataaagaacaaactattctaagatataccatcacaataccagtagtacatatttatctctgtatttcacggaattatacttccaaatacacacatgttactatcgagttaatttcataatgcgttgcagccttatcctgcgatcaattgattacacgattaatttagacctaaacgcagcatttgtcgcatcgggtcatgagtcatgacgcgaggccagcgacgtaattacattctaaactttgtggtattttcaccaatatattttccgtctgaccttcgcgcggcctgatcccctcacggtcgtcgtcgtcttcttcccaacgaccgatcgatcgatcgatcgatcgtcgcggcgagaaggggagatcgatcgcgatcggagccgatttgatcggcggcgggcggcggccatggccgtggtgctcggcgcgttcgtgccggacaccgcggcgcagtggcgcagcgtggtgaagggggaggtggcgcggcagctgggcgtggaggcggaggcgaggaagctgggggcgaggctggagaaggtgggcgccgcggtgcgcgacgccgaggcgcgggtggcgcgcgggagcgacgccgcggcgcggtggctcgccagggtgcgcgccgcggcgtacgaggccgacgtcgccgtcgaccggtgcagggccacggcgcgccgcctgacgaggggccgggagcagcagctgcagcagcataaccaggtgagatcgctagccttgaattccgacaaaagcaagaacaccttggtgacaatggcgtcgcagagcagctaatttttgcttcgtgttgttctccggcgagaaggcactgccatggctgctgtccacctgctgcgacgtggccgagccgcgccgcgacatcgccgccgacctcaagaacgtcagccagaagctcaagtccatcatcaaggagcagcggcagctgcagctccaggcatccgtcgccgatcacactgacgaccatccacggaagatcctgaggcaccggaaatccgaacccaccgacatcgacatcgtcggcacggcaatggaggacgacgcgcgccgcctcgtgcgccggctgacgcagccagacagcggcggcgtcgtggccatctacggccccgacggcattggcaagaccacactggcgaaggtggtgttcgacagcgagagggtgaagcgaagattcgagacgaggtcatgggttcacgtctccaggggttgcgtcgaggacggcaagcgagaggccgcgctgctctcgcaggtcgtcgaggccgtcgttgacggcggcggcgccacgacgggcgccgagaccgtcgccgagctggagagaatgctggccgccctggtggcgaacaggaggttcttgctcgtgctcgacgaggtgaggaacggcggcgagtgggaggagttggtgaggcggctactcgagcgcggcggccgcggcagcaaggtgctggtcaccgcggtcaccgccggcgtcgctcgggacatgggcgccggccacgtccaccgcgtgaacaggctcggcgaggacgacggctgggcgctgctccgcgtggcggcgtgcgtcgccgacgacggcggcgcggcgctgaggggcgtcggccggaggatcgtcggcaagtgcggcggcgtccctctggcgatcagggcggtcgccggcgttctgaggacgcgggaggcgatcgccgaggagtgggcggtggtggacgcgagcccggcgtggaaggtgaaggggctccccgacgacgccatgaagccgctgtacctctgttacgacgacatgccgtgccacctgaagcagtgcttcctctactgctcgctgttcctctcggacttcgccgtcgacaggagatcgctggtgcagcagtggatcgccgagggcttcgtgcagatcaggggagacgccggcgtcgaggaggtggccgaggagtactacgacgagctcatcggaaggaacctcctccagccggcggaggccgaccggcacggctgcgtcgagcggtgcacgatgcacgacacgctgcggtccatggcgcaggtgctctcccatggcgagaacctcaccggcgatgcgcaggcgcagcggctgcccagcgacggcgacgcccccttcgcgccacggcacgtctcgtttccgaggaaccaccttgctgcaataccagaggaggttctgaagcttgagggtgtaagaacgctgctgctccagagaaatccactgacaattgggagcaacatctttacaaggctgctatacctgaaagtcttggaccttactgaaactgcaatggaggtcattccagagactttggggaatctgttatacctgaggttcttgaacctgtcccagacaaggatcaaggcgcttccagaaaccatttgcaatctgtggagcctcaaattcttgctgctaagagagtgcaaggcattgcatgtgttgccaaaagggatagagcatctgaaggggctcagagaccttgatcttacaggtactgtgatcaaagacgcggcattcagagtaggccatctcagaaacctcacatcattccgatgcttcaccgtgacgagcaaagaggcgcgtaccgtacaggataccgcacaggataggagtgggtggcctctggatgagctcaagaacttgtgtcagctaaggacactccatgttaagaggcttgagaaggccactagtcagtccaaggcagctgaagtagctcttcatgccaagacaggactcagagagcttgaactgtcgtgcagcggcaccgtcaagacattacagataccgacagtggtccgaaatatagaggatatcttccaagagctgaaaccgccacgaggcctcgagtcgctgaagattgcaaactactttgggacaaagttcccgacatggctgtcatcgacctgcctgccaaatctcctccgactgaatataaccggatgcaatttctgccaatcttttcctctattaggtcgtctgccagagttgagatctttgtgcattgccgattcttcagcgctgaaggatatcgatgctcagcttatggacacagacaactcccatcaggtaccatttccaaagctggaagacctgcacctgcaaggtttgcataatctggagacgtggacgagcattgaggcaggggcgttgccatctctgcaggctctgcagcttgaaagctgccccaagctgagatgcttaccagatggcctcaggcatgtgacatccatgactgagctgcgcattgtggacatggagagccttgaggctgttgagaacattgctgcactgagggaactgagtgtttggaacacccccaatctgaagaaaatatgcaacttgccttccctcgaagatcttgacatatgccattgtccgtcgctggagactgtggacaacatcaacaggctgcaagaggtgcacatcttcgatcatgaattgcaggagatgccgagatggatccaggcacatgcatcgaagctctgctcactggaattcatgagcacaactgaactgttgaagaggtgcttgattgatggtcctgactggcccgtgatcaaggacattgcacaagttcatggatactcgaatgactctagttacatatactattccaagagtctcaagatctttgagggcagcgcgagtattcgagaaagccgtgatgcagaaaggagtgtggcagattctgataaagttgacgatgcatcaatagagagcagaaacgttgatcgagatgcagaaatcgatggcttcttcagctcaaaattagtggagacaggaactgccaggagtgaagacaatgtaccggataggaatatggagaggttcatgacaagatccactggccgccgattgcataagctggaagaagtccccgaaggagatgaggatgaggaagaggaaggtgcagatccagtagttctgattcctgatgatacaactaaatctgacaccgtactggagaaacttcatcctgttgttactcatgatcataatgataaagcgggatccaagatgaaaagggatcctcctgcaaaaactgctccaggtacttctgttattcaatctgctgccacaatgtgtcataagttggtccgagaagggtctcaagcaatcagcattactgaaactgatcaagatctgagcctcgattcatttcgaagcaaagaacatgcatctagtaagcagaaagttgacacatctggttctgtcatagaaaaagtaaaggaaggaagatataaatctgcaaatatcaatgaccgtaagcacattgagagagttcatgactctgcaaataagatgtcaactacttctgtggagaaaagcattcccgaaacagtcaaacctatgaaagcaacaaagaataattctaaagcaacagactatcatggaactgagaataagtcacctgatagtttggcttgttccaggcaaacaataagccagatagaaaaggatgtttctgatgctgataaggctgcaaatcatccatccagcgcgatcacagagaatcgtctacacaaagcaaatgagatcgatgcttctgctactgcaataaaaactgaagtatcaaagaaatctgctggtgccaatatttgtaataccttaaaccctgcagattcacaaacagtacatgctactgacactgctcaagatttgccttccagtttactccatgatgacccacatttaccagatgttggcagcagtacttctacttctatcagtgacaattgcattcagacagagagcagcaacacaagtttgtcggccaacttaaataatgaagaacctaaagcgaaaggtgttaccaaaactacttgcgcatcagggccttgcaaactgactgccaccttagactgcaaacaacagactactaatccaagtgacgacacagatgcatccatgaagaagatggcgagcaacatctctgagaaagttgtcaaaacattgaaacgcccacatgctgaaacagtgaatattactcgctcttcatcactgccaattgaccctaaatctcatgtcattgataccactgcagcaacgaagaaactagaagctaccctgaaaaacagatcctcaagaaatgcagcacctggccttgccgatgacaaaaccccagtatacaacgactcccatcaggcaccaaaggtgtataccgccatctgggccgacaccgacacggacaccctgaaagcccggttcctcagcacgatgcagcactaccgcaggatggcttcgcaccgtcgccgacgccatagaaagcatggctccaggaccaagtggagcatctggccagtgctggtggccatcctcctgatcatctcagtggcacagctgctgttcaccttctggatgtaccgcaagctcatgaatcaaaactcaaaagtagacgaacaatgaattctacactgcgaatttcatactttggatgaagtagactgcgcgtgccttgtgcgttcatatgttgtgttgtgtagctactagctactgagtactgactagtgagagcaatagcccaaaactttggcgggagatcgtgaattttgaagcagtttggcgccaaccattttcaaatggcgctttgctccccgctaaagcctagtagctctgagatttgggaagcgaaaatttggggggaatgaaaggggacagaatgaggaagaagcagaccaagaattacccgagcagaatccgatcgaccggcggccagaccaccctccaatctttcctcttcaaatccaggtagggaaagaagctacctcgaattcagattgtccccaatttttttccccatccttttcgcttcttacatttgcccttgaatccttcagcgttgtcgatgaggaagtgaagccgatctcgccgccgccggagaaggaggaggaggaggccatctcgccgccgcaaccgccgaagcgggagatcatccgagtcaccaccaaggcgatcgtcaaggtaaccaatcgaccaaaccaatccgatgcttccccttccttcgcggtgtaactctggaaatgcttcgggatctggcaggagaaggcgagcgcattctcgtcggtgggctcctcctcctcctcggggaagagcggcgccggcggcggcgccctcaacgcggcggcgctgttcaggcggttcaacagctcagcccccgtgccgagagcggaggccgcgggagacggcgatggcggcgtccggctggagatcgaggacatcgcggcgggggatcgccgccgcgagaccaggaagcggaagagccccctcggtgcgcgcctcgcctctcgaatcccatctccccctttcaggctttcaccactcatccgtgacgcgatgtcgatctccctcgcaggtggtggcggcggcggcgacgaccaccacagcggcggaagcggcaagcgcgtggtggtgctcggcgacgacccgaagccgaggcccgcggcgaggacgatgacgacgacggcgacgacgagaaggcagcggcgggggcggcggcatgcggggcccaccggccgcggcgaggagggcggcgaccaagctgcgtacaaccactgtaatctctctcccctctctcgttcgctctctcgattttgtgacggaaatttgaacggcgtggtggcttggtttcagacgcgagcggcggcgggtggtggcacggcgagatggagggcgtcgacggcgaggaggtggggtggaccgacgacatgtgggaggggatggggtccatcacgctcggaggcttggagtggcactagcagcagccgccgccgccgccagtcgcgagctccgccggtcgccgcggcggcgcagctcgccggttttgggtttcgggtttggaaggtgacatgcgttgttagccacggcgagctgtgggtcagattatgctatgtctaatgagattattatatcatatgttactccatttggcactgtttgaccactcgtcttattcaagaaatttgtttaaatataaaaaataaaaagttgtacttaaagtactttagataataaagcaagtcaaaaataaataaataataattctaaaatttttaaataagacaagtgataaaaagtgcaaacaaaaacttaaaatccctatattatgtgacggagggagtagatatcagtgaaaaacaaaaggggttaaaatgctgctgtgctaacggtataggagtattttgaagtactaatataatttatacgctttatatgtgagaaatgatcaattagtacatcccagcttaatcaaactctgctacggcaggcagaccaatgtatctctaccaaccacaacaaaaactattgttaaaaatttacaaatggataacaagcaataatagtatactcccgctctctgttttatattataagtcgtatactttttttttgttagttaaactagtttgtagaaaatataattacattttcaatactaaaaaatctcaaacgacttataatataaaatatagttaaatttaatgaatctaatttggtgttgcagttgttgctatttttttataaatttagttaaatactaagaaaaaatcaaacgacttatataagtataaaatggaggaaataccatttagcaaataatagcatgaagagagaggtgaggacaaatacatagcaaaataataaatattttttattcagtgttcttcttagtactccacgatgcttactatacctgatagaacatataaatcaaaaaaatttacttataaattacttcatattaataagccgttacagattataattgtaagccaaaaggtggggttgtttctaaaaaatcctgatcttttcttcaataagagttggatgaacattaagattttcgtggcacgtttttcaaactgctaaacggtacgtttcgtgcgaaaactttctatatgaaagttgccctaaaatatcatattaatctatttttcaagtttataataattaaaattcaatcaatcatacattaataccatatcgttttgcgtaaaaaaacttaattttcatcttcattttcaggagaaaagaacaccatctaaaatctacaagctagacccccttcatctacctattttcggcagtcaaccctacatgatggcatgatgcaaaatgccaccacgattcattattgatcatagttcatactccctccgccgctccgccccctaatacaaatgattttaatattttaattgtaagatttgatcacttgtcttattaaaaaaaattatgtaaatataaaaaatgaaaagttgtgcttaaagtactgtagataataaattaagtcataaataaaataaataataattctaaatttttttaagtaataatggtcaaacagtgtaagcaaaatgtcaaaatctcttatattagaggacgaaaggagtacttcgtaaacttaaattcgtgtcatatggtatctgcacttcacttcactaacccctgagccagcaatttgatttgaactgctctctcggagatgatgaagccgaggaaacagttggtgctcaaacctcatcttttcaaatcttggtttgcggctttttcatctggctttggggtaccagatggtaaggaagtgactccggattatctccaaagattcgtaaggtgaactgtcttgcttcactctgagaccaacccattaggcgccatgattcttttcagctattggctatattaaattattgcgatcacgctttttaaaattgctaaatgttgtgatttttgaaaagtaaaattttatatagaagtttctttaaggaaaataaataattttatttttaattttgtcatagttaatatttaactaatttctcaattaagtgccttttgcgataagtcaattgctccttcctccaacctctgaaacgaacagtgctaagcactactccctccgtttcacaatccctccgtttcacaatgtaagtcattctagcattttccacattcatattgatgataatgaatctagacatatatatctatctagattcattaactttaatataaatatggaaaatgttagaataacttatattgtgaaatggaggaagtatttgtgatttgtgaacatccaaaggacattgtggtgactcgaaccaccattcagttgatctgtaaagcactaataaagcgtagaaaaaccactctttggcaaagaaacaacgtgcaaagttcaatcacgcataattagaaggcccaaatgctaatcaaccgccaagtgtagcaaaattcctcatttgcgtcttctcgaattaattagtcgatgtcagtgacagatgacacaaaagcaaaagtcaggcagctcatgtactccctcagtccctatatataaagattttagttgaatgtaatacatcataatgcaacgaatctagatgatcattggtccatttggatgggatagtgcgccaacagcgagaaataaatttcttgtttgggccttgaatggaaattggaaaacagaaacctggaaggaatcttttcaaattgaattatttcacataatcacatggaaggcttcgttgctccaaacagaagtaaaactgcaatgcaccttcgaacatctaatattcactcaatttaaaacgtactccgtccgtcccaaaaaaataagagattttaaacgaatgtgatatattttaagacggatggagttctatgagtttgttgatttttccaataacatctgaccattaatctcatttaaaattttagtgcagatataaaaaaaatataacatatacttaacatacctttaataataaaaacaagctgtaacaaaataaacaatacgaccaatcgtatgttcaaaagtcaataatatcctataaattccaatttaagcttaaaaacgcagtgtgctcatagacaaaaaaaaagtctttatttccatgaaagagatagtaaaacattacaacatttcaatacaaattcataaaaaacaacaacattgcagcatttctactgtcagatcagatcctctaaaacgcggttaacctggacatgtttcaaaacaagaactgctattagtaacacacacgaactcctcccgctcctcctaatgttgccaatttcacacgatcgccgcaatttcgcagaggagaagatgaactcatcatcatcatcatctttctcgccatgaactcgatctcatccttcacctcctgcatctcgttcagctcccagaagatgagctcgccggcgagcttccgccggagctcgtgcacgtcgtccatggtgaacccccgctccagcttctccccgtcccagagctccatgcacttgatcgcgaagagcccgcacgacgactcgtcggtctgcgccgggaggccggcgaccatccgcagcttccatccgccggcgtccgcctccgcccccgcccgcccggccgccgccacgcaccgcgcgacgccgccccgtatcttggacatggcggcgtcgtagaatctggggccgaagcggcggccgtagttggaggagtcgaggatccggtactcgccggcggcgacgtcgagcgccgccacgaagaagtgggactggtggttcaccgggaagagcaccgtgtcgtgggcgaggtacctggcgcccgtggccgacatgtccgcgtcgtgccccgccgccgccgccgttcttggcgggagggagctgacgtactccagccagtcctgctcctcgacggagccgaggagcacgcgacggccgttgcggcggcggcggcggccggcttggcggcggcggaggaggtcgagggcggcgtcgaggagcaccccggtgatctgcctctccgggccgtcgcgggacaggggcacggcgaggcagcgcagcgcgtcggcgcggacgcggacgcgcggccgctccgacgagaccagcagcttgtccttgcgcccgccgtgcgcctcgacgtacgccatcgtcgcctcctcccgcgcggcgtcgacggccgtgctgctcgccgcctccgagcggcggcgcgcgttcttggtctccgcaatcccgatgttcgacgccatggctagctgacgcacgcacgccgcgctctcacgtgttcgtggttcgtactcgccggagttcgatcgtagcggcggcggaagcgcgagttctgagctccgacggggtcttgagaggcgaattcgcggcgtgcaaaggaagaatctcgttgcttcgacgcgacggcgacgagataaatggaggtcggggaggcaaaggcggtggaatggtggggatggtcggtggcgcggctgcaccgaccgaccgagcaaaagtcggtttccggaattgacttgtctggagaagcgggctgtacttgcaacggcgaccggtgggcccaggtgtatatctatctactgctggcccactgtaagcccatgttaatgaggcccaattagatgggccgcatcaatgtggtttccggcccaacagtggcctcattcccggcctcttcaggcccagaatgtatgcgtcagacgtaggccgattcctcttcaggcccagaatgcatgcgtcagacgtaggccgattccttttcagccccagcattaggccttgttcgtttaatcccaaaaaagggatttgggggagaatacatcacaatagatatggaaaaatcccttccaaatcccaccaattctcttgtggaagggattaaccgaataagatcttaatgggacccaagaaggatgccttccatttcccttcaaaattaattatactccaatcttttatcaacgactttttcttcctaacgaaatgcgagagggcgaaaggggtgaatgggaagtactccgtgctacccgttgccacaccatctccagctatacggatcacaaccactatcggctgccaactatttgtgtctattgttcgtcatcgccttccaaatcaccttacgtcgccaccacattctgaacacttctagtgtgtcgtaaagccactctgccatgctatcactgtcttccgcagatcgtcaaagtcctcgatgctcctagagcatcgcgaagccatccaccatggcatggacttgcctttactcttatgcgttcatcggagatgctccaccgccatccacatctatccgtaataagaccttggtgtcgatgcttgcccgagagctgatcatttgttctactccttcccttttcagaatatttttgtaccccttaatttgaaatctcagtgttaaaagttgtcagctagtggttcgatgctcttacgactgatttttggaatcaacacgtgaccaacaacacatcttcaccagtgatttatgaagaggagttagggtgtgtttagttcacgctaaagttagaagtttggttgaaattagaacgatgtgacggaaaagttaaaagtttatgtgtgtaggaaagttttgatgtgatggaaaagttgaagtttgaagaaaaaatttagaactaaaggtcgtttcacattttcctaatcaatcttcctaaagtttaaccatacttgtgaagaaaaatagcaacacatataacaccaaattaattttgttaaatctaacattaaatatattttgataatatatttgtcttgtgttaaaaatattattatatttttatacatatttgattaaaacgacttataatattaaatatagaaagtaataaacaatactccctccgttctaaaaaaaagacaaactgtgggtttccatgccaacatttgactgtccgttttatatgaattttttttataattagtattttcattgttgttagatgataaaacatgattaatattttatgcgtgacttatctttttaattttttcataattttttcaataagaccgacggtcaaacgttgaacacagacataatagtttgtcttttttttttttggatggagggagtatgaattagagagagtaataaactgttaaattgcccggaagctcgtgcgctaaacgctgagatttattttcattatcttaaaataaagcacagtattaattaagaagttaataatcgtattacgattcacaagctagaggagggttcgtggacacatcacggttttccactgagcgcgctgcgcgcgacgcgagcgactcggcgatgcccttggcgacgcaatacgccacggactcgatggtgatcatcgggttgacgccgacggccgtcgggagcaagctgccgtcgcagacgtacagcccctccgcctcccagctctcgccgccgccgtcgacgccgccgtgcttggcgctcctccccatccggcagctccccatctggtgcgccgaggcaaggagcgcccacttgtccgaccccgggtgcatcggccccttctccacgctcacctcgtccaggaacgcctccacgtcctcgtcacgcgcgcccttgcaccggaggcgcagcccgtcgctgcggttcgtgcccacctcggcggcgccggcggccaccaggatgcgcagcgcgcgccgcaggccggcgcggagctcgccggcgtcgccgcggctcggggtgaagcggacgcggccctcgccgccgacggtgcccgcggcgcggtcgcggacgagcaccaccgcgtgcgccgtgcgcgcgtaccgccgcatccgctccttcatgtcgcggccggactcccacggcaccacggcggcgaacgcgcccgggccgagcgccggcgtctcgatgatggtgcggtcggtgacgcggtgcatgctggtgatgatgccgccctcgtaggacttgcccgggagctccgccgtgctgtccgggaagtagccccacgccatggacccgggtggaggtgaaggttccggccgatgtggcggttcttgagcccgctgttgcgcagcagcggcggcgtcatgagcgcgccgcacgccgagacggacaccttcgcctcgatccggagcttcttggtgatgcctttgcccaagcacttcgccacgacgccgacgcacttcttgcgccggccgccgccgccgccggtgttcgtctcgaggatgaaccgttcggccttgcacccggtcaggatgacggcgccgcggccgacggcgtcgacgagccacgtcgtgtcggtgccgcgcttctcgccggtggggcacccgaggttgcagctgccgcagaagtgcccctccgacgagttgcgcgacacggcctcgacgcgcagcccaagcgcctcgcagccgcggcgcaccgccttgttctggaacccctcctcccggcaccggccggtgacgccgagccgagcgcacacggcgtccatggcctgcacgtagccttgccccccgaacagagggagcccatggtcgttcgaccactcctgcaacacgttcgccggcgtgcggatgcaggccgaccagttcaccgccgagccgccgccgaccgtcgcgccggcgaacatggtggtcgtcacgttcgccgtgctgaacacgccgccattctcgtagaggcgctccatggtcgggccctccagcgagctgtagtccctggcggcgaagtagtcccccttctcgacgacgacgaccttgtacccggccgacgcgagcacggcggcggccacgccgccgccgcagccggacccgacgacgacggcgtcgcacagcaccgtgtggtggtgcgcgctcggcgacgacgcgcccgtcttcagcgcgaggcccttctccgcgagcgacatgagcaaggcgttgtcgtccagctgcttggtctccacgacgccattgtccagaggccggcacggcggcgccgtcgccggcgccggcgtcggcgttgcttctgtaggttcttctttctgtggctcttcctcggccgccgggacgctgtacccgattgccttccaacttgggttctccaagttctcgtccacctacatatgttgggaaaagaaggttaaatcgttgataattcgaattttctgtgaaaatgtgtatgcttgcatttcttttatgatttttataatggtcagatttttcatgaaccaaagaaaaaaaagtacaattcttaataaggtatggtaaaatactaccaaaactatagtaagttaacttgtggtaatttcattatgtaaaaattacagtattttaccattcttaataaggttccaagtgtcaatatattctatagtaagtttacactgtgaagtactacatccgtcccataataattgcatttctataaaattagagacggattaatagtaaacacaatttaccacaataagggcatgtacaaagatagagttaaatatgagctctacgttatatagagactagcatcctataacagttagagacaatatggtctctaatcattaatgtatcaaaatactttttcttacttttctttcctttctttcaccaccatgcaacaaaatttgctctaataaatactaagagtcgactctgagctgttgtcatgcataacaaccatacacatttctctttcttccatgtcatcaaatttacttgcatggcaatagagagagaccactaataaacaccgttgtacgtgcctaagacggattcttaataatgcaattattatgggatggaagtacttcacagtctaaacttactatatgatatattaacacttggaacctaccaaaccaggagtagattttttaggggctatctaaaaaaaactccacaagtttattatgtaaaaactttcaaatgtaactgtattgtaatataattataccgtaagtatattttaattacattgtaatttttatgtaatttctgtataagtattaaaaaaatatatgtagcttgaatcatagagattactatttaagttaaagagtgattacatatagttgcactacatgcttatatttgaaagttttttttacccaaactttttttagcaatatcctttttttttactatgcaaagttcaaatcgaaacaaattcggaaagtacgactagttgtaaggtggtggagttgtggcctcgttggtgtatgactcgactccacccgttagggttatcgatgaatatacgtgagtgagctttcaataaaaaattactagttaagctagggatatatcacccgttcatgttttatatgtcttacgcgtaataaaaaaaaccattttcgttagaattaacattaccgcggtgtagaagacgaagtggcagaggaccttgatgagggcaaagatgatcttgagcgcttcagcgccgcctcccgccgctccaccggcatgtcggcgaaccggcgcacgtaggggaactcaccggagacgcaccgccggccgcacagcgccagcgtgccgaccctcgtggccaggatccacaggatgatcctcaccagcacccctgcctcccagatgcaccgtgtcatggtcagctcagcaaccttttcttgcaagagattagagacaaagagaaaaaaaaatgttaagttaaacacaacttgttgtatatcaaagttatctgaaatagttagaagaatcagagatttttcagtagttattaaaagacaattgttcgagagttgacttgaatagttgggactgaaatgtgcaaaaaataataataataataataataataataatttcgggcctattgtccgaagtttcttttttcgaaagaagggggcaaagttggttagttggttagtgtagctatcataattagcacgagaaaactacgtctacgaagattagatcatgataaaaatgcactgcatctaatgtttcagttaactgactgatcaaatgccaactaatcaactcgaagaattggagtagctagggtgaagacagatggaatttctgttagattgctacagcttatcagggcttgggtcgagctgtgttagtttcctgttagtctgtaatgggcaggttggatgtttcttttgtggttatcggctagggacctggtctttctatcgatagctatctctcttttttttttcaagacttgctgtagtttattttcatttttagtaatgaaaatgggggtgcttggcgccctagttctaaaaacactaatcaactcgacactggcaaaaagtattttttaacaaaataataagtggacatatattgaagctttcaaaagttttaaaatgaacacatggagaaacaaaaattgagtcatcaggttgatgagttgattatcgtctctgacagcgctgatcagtcgcgacgaaatcatctcaatcaaatcaataccatatgcgtcgtcaacactgatcgatgacgacgcatgcgctcacctcgtcggggacggtggactcggcggcggtggcgaggtagaaccgctcgacgtccatgtcgccgccgccgcgggcgccgtcctcctcctccgccggcagcgccgggatgagcgcgccgcacatggccctgagcgcccccatctgcgccgccccgagcccgtgcgtgtaccgctcccgcctcgccgggccccgcagcgccgggtgccccctcgccgccggcgccgcctccttcgccttctgatccatggcctcctcccgcggcggcgacgccattaaccaattccctgcagctcgcgcaagctcagctgctagctatagcacacgtacgtgtgtagatatagagtaagtaccgaagtacgtaccggagcttgcggggcacagcacgcactagcctcgcagcgacgtcgacgtcgatctctctctctctctccgattttgtgaagctgacatgtttgtacacacgtatgttagagtacagtataccagagaaatcttgtgtagctgtgtttgagactttgaggagaaggagatagagaagattggaaagatacgcaaaacgaggtgggctattagcgtattattaattgagtattaattattttagactttaaaaatagattaatatgattttttaaagcaactttcatatatattttttttaaaaaaacgcatcgtttagtagtttgggaaacgtgcgtgtggaaaacgaaacaaacaaactccctttgttctccgaacaaacgcatacattatattagaaatctcttacgtgacctagaccgctgacacgttaattagaggaagtaacactggtggagaaaccatctttcgtcggtcggccgatttccacaatagtcccggatgcaataaaaaccggggctaaagatgatctttagtcccggttcaaaagggaaacgggcatatttgatctttagtcccggtttgtgttatcaaccgggactaaagatcatctttagtcccggttcgaatgctgtcaggacctgtcaggcccccccgggatctttagtcccggttggtaacaccaaccgggactaaagatcttaactttaccaaccgggactaaagatcccggtgatctttagccccggttggtgttaccaaccgggactaaagatcttaactttagtcccggttggtaataccaaccgggactaatgatcccggtgatctttagccccggttggtgctaccaaccgggactaaagtcccacccctatatatatgtcttcttcctcctccagctgcccgagcaagcttcaaaattacttcaaaaaagaggggaggtcatgccaaaatttctattgaatttattttggtgattacatacaaatcggaggtgcctaaaaggtttgcaactttatcctccaatgtttttttttgtcatactacatttgcacctatgttttgcacacttttttttgtctccaaaatttagttgtaagttgatgagagagaaaatgtgtgtggggaagaaagaatatatagaaatttagttcatttgctaaacaaggttttataaaatagttgagaaggaaaactctagtgaaagttaatcttaaataatagaaaacaaactaaaatgaaaaataaaagaagtaaaacacattaaaattagtttaaaactttacaaatagtttttaagaattatttggtgtaatattttatgatttttgtatgaataaagatatcttataattattgtatgactgtcattattgtaagaataattatttgtgtgcggtttttttgactcatgtagatggatcggcaatggatgtacgctgaccggcggtccaaagagtttattgacggcgtgcactattttttgagagtggccgaagctaacaggcaaaggggttttatttgttgtccatgcaataagtgtaagaatcagaaggagtattctgcatccaggactattcatttccacttgtttgagtcggggttcatgccaagctataattgttggacatcccacggagagcaaggtattgaaatggaagaagatgaagtggaagacgacaatattccggactttgctcagtatgttggatttgaaggaaatcaaacgggcgaggaggaaatagctgctgatggtaacgacgttgcggatgatcttggtcagatgttacaggacgccagggaggactgcgaaagtgaaaaggaggcccataaattggacaagatgttggaggaccacagaacttcgttgtacccaggttgcgagcaggggcacaaaaagttggataccactttggagttgttgcaatggaaggcaaaaaatggggttagtgacaaggcatttggcgatttattgaaactcgtcaagaacattcttccggggggaaacaaattgcccgagacaacgtacgaggctaagaagatagtctgcccgttaggactggaagttcataagattcacgcatgtccgaacgattgtatcctatatcgcggtgaggagtatgagaacctagaatcatgccctgtttgcaaagcactacgatacaagattagacgggacgatccaggagaagttgacgggcagctaacaaagaagagaattcctgctaaggtgatgtggtatttccctataataccatggctaaggcgtttgttcaggaacaaggggaatgctagaatgttgcgatggcacgctgaagagcgtcaacaggacgggatgctgagacaccccgccgatggttcgtagtggcgaaacatcgacagaaaatttaaagaatttggaaaggacgcacgaaacatacggtttggtttgagtacggatggcatgaatccttttggagagatgagcagcggccatagcacttggcccgttacgatgtgtatctacaacctccccccctggctatgcatgaagaggaagtacataatgatgccgattattattcaaggccccaagcaacctggtaacgacatcgacgtgtacctaagaccactggtcgaagatcttaaacagttgtggaagaaggaaggtgtccccgtgtgggacgaggacaaacagtaggagtttaacctacgagcgctgctgttcgtaaccatcaacgattggcctgcacttagcaacctatccggacagtccaacaaggggtacaaggcttgcactcactgtatggatgaaacagaaagtacgtatcttaagcactgtaggaaggttgtatacatgggtcatcgtcgattccttgcagcaaaccacccggtacggaagaaaggcaagcacttcgaacataaggccgaccaccgtacgaagcctaaacatcgcagcgggaaaacagtgtttgctatggttaaagatcttaaagtagtgttcggaaaggggcctggaagccagcatatagagagcgaagatggtcacgcggcgatgtggaaaaagaattctatattttgggagttaccatattgggaattcttggacgtacgccacgcaatcgacgtgatgcacctcactaagaacctttgcgtaaaccttcttggcttcctaggtgtatacggaaagtcgaaagatacactggaagcacgtaatgatctgaaacatatggaacaacgcggcgaccttcacccggaactaa

SEQ ID NO: 27063 - DNA, 1552 bp, Oryza sativa
atatttccaccttcatttttcaatataatgacgcatctgctttgtcaccttgtgaaagagatccgtattctcgggcctatgtacctacacaacatgtttcctttcgagaggtacatgggcgttctgaagaagtatgttcgtaaccgtgctcgtccagaggcaagcatcgccaagggttatggaacagaggaggtcatcgaattttgcgtagaatttatcgaagaccttcgcccaatcggggtacctgaatcacgccatgaagggagactacggggaaagggaactctcggaaggaaagcaataacgacggtagacaacaatttattccgtaaagcccatttcactgttctgcaacactcttcattggtagctccttacatcgaggagcacttggctctagttcgcgccaggaacatcggtaagtccgatgcatggattacacggcatcacattgatactttccccgcgtggctacgacaacatctcatgggtaacgagtcgatcaaccaacaacttgccttcctggcgaggggaccgtctgggtcgatcgcgacattccagggatatgagatcaatgggtacacattctacacgagagcccaagacatgaagagcacgaaccaaaacagcgctgttcgtgtcgatgccatgggacacgatggaacaactgccacgtattacggtgccatcgaggacatatgggaacttgactatggtcctctcaaggttcctctgttccggtgccaatgggttaggttgactggtggaggcgtaatgattgatgacagtgggatgacaactgttgaccttaacaaggttggatactcggacgaaccttttgtccttgccaatgatgtaacgcaagtctttttcgtgaaggacatgtctagcaaatgaaagaagggcagagggcctgatgagcctaagcgtcaagtggttctcccaggcaaaaaaaaaatcgtcggagttgaggacaagactgacgaggattacgatcagttggatgggcaaccccctttcacggtgacgattgaccctagcatcctcctatcaaatgaagacactccttactcacgcagcgatcacaaggagggaacaatagtgaggagaaagtacgtgccgtaattattgtgtacacgatgtaaactattttggatgtattgattatccatataaatcaattgatgtatggcatatgttaattacgcacgattattagaggtttcaacaagtttaaatcatgtatatgctagttatatgtgatacttacaatttttaaaagttttaaatcacacaggtggcaatttcatatgtatgttaattagagtttttaacatttaatttactagcattcatatgctaattataattgactagaggatttttaaaagttttaaatcacgcaagtggcaatttcatatgttaattagagtttttaacatttaatttactatcattcatatgctaattataattgactggaaaaatttttaaaagtattaaatttaatatatttttaaaactatcattcatatattagagtttttcacaa

SEQ ID NO: 27064 - DNA, 9821 bp, Oryza sativa
cgtggttcatctccctccctgtaatctctctcttctccttccttagggcaccccgattctcgtccgccggttgccgtcgtcctcccgtggctcgccgtcgccgttcgcggtcgtcttcctccgcgccggccaccctcggtgaggcgccctctcccctctattcccctctctctcccttctagccgccgctttagcgccgccgcccgttagccgccgctctagcaccaccgcccgtcggcgccgcctttgcgccgccgtctccgccgccggttaccgtcactggcaacgcgtgtgcgcgcgccgtcgccgtcgccgtggccgcttggccggtcttgagccgagccgggtcgccatcgcccgtccgatcggccccgggccgatccaggccgtcgatcccgtggaccggcggtggaccacccgcgtggtcccggtccacggtagactgaccactcgtgcgccgctgccgagtggggcccgcttgccggcgccccttttccctctctcccgagccgctgaccggtggggcccgcttgccggcgccgcgccccgccttgatgacgtcagccctgggatttattgcgcaataaatgatttaaggactttttgttatagtaataaacacagtgaatcttctaaaattcataactaattcatctgagctccgtttaagcccattcaagtctcagtaaatcaagaaaaatgtgtagaatccattaaaaatggttttgttccctgtttcagtagtcttatagcctgtttgcaatgtttgccttgtatgtcgctagattccggttcctccgacgctccggtgtacttcgaaatagtcgccgaggttcctccagcagcagagcaaggcaagtcatgcttgtcacttgaacatgttgatcctatattgcaaatgctctattgtttttcttcttcaaatattgcattgttttataatgttactatggggtgtttacctattgtcatagccatgctattgttgtaccatgtccctttgtcagcttggggttataacatgactagagattggactagggattgcttagccatgcttagttcaactagtgcacaatggggaaaattctattaatgtttagactgttggttctaatggtattgttggattagtgccaccgctttggtgttggttaattaaaatgaatcacatggtgggctgtgggtgcatggttttgctggtcgcacccatggcagttaaggaccggttcgcgggatgccctggaagaacttatcgtacttaccacaagccagcgtgggcaacggctgggcttgtagtgtagcttacctctagctgacgcatccaggcaagggtgggagtgatggagcggggcgggccctgcgacggcctctgtcgcttccggattcacctaggcacgagaggggactgcccgctgccttgcgaggagtgggggtgaaacctgaggtgtggtgtgcttggttagaggggttatgcgaagggtcctgtcacggcctctttccggtatgtcgtggtggcatgtcggcgcacggaaacatgtcgtggggttgtgtcttgtgggtacagttgtacacctctgatcagagtaaaactatttgaatagccgtgcccgcggttatgggcggacaaccagattcaccgtgattagtctcaccctagtttagtcttttgaaattggatagtataggtggatggttgggcctgtcgcaacgtggtatagcgttggacagtggatgattaatattaattaattattatgactgttttcttctttaaacttctgtttattaatgctcgctttatgcaaatgaaccactctagctctcctttgataattccctgcatcatacccctattccggtatgacttgctgagtacagtgggtagtactcagtcttgctctatttttcccaaccccagagtacgagtttgtgtcagatggaggtttctctgaggagtaggcttcgtccgtgccgtcgaggatgcctgtggagtggtgtttccgctgcagttctagacaaggcttagctcctgttgtctttcgttttttctgctgcatttatgtaagacttttatgatgtttgtaagacgtggatctgaatgtcaacattgtcgtttgtgtaccccggctggtcctggacggggattttaatgcacattctgcttggaattctattcggaaatttctgggcgtgacatatatgcccacatatcactgcacatgtaacacatgctcaaatatatgcaaaccagcggcacattcatgaccttactaaattcttgttggaaagctatttacatgtatgtaatattcatagaccccaatatttgcatgtgatgagtggagtcatgcgtctacaacttcgtcataatatataccactcgtgttttcctcagtatctttccatcttgttttcaaggttcctctttattttcatctttcatatattattttctgtttttagtttattatctagttttatatctttttccttttctctaactatattttacaccttttcagttcattttgattttctgaaatttcatggtgggatcaaacaggagggagtgtgatcaaccccactataaatattactacttatgttaattctctcccttttttatcatctaagcatgcataagattgataataaatgaggttcctttccaaaaaagttgataaataaggggaagagtagcatttgttatacaaaaagagacagataaccaacatattagtgtctatatgtgatttagaatgaaacagacttatggctttaaattgacaaaaaaattatcagaaagaaatggaatttgatagaggcttcagtcatatggggctaaactagccttaatatcggtagaggtcgaaactggtcgctgttaatagatgtagggttaccctttgtccattgttcccatgcaactttttttatactgatcgatcattttgctagtcatcaatataatcttttatgcttatagagatggttacctgaactttgactgataatatatatttcattggaaaaagatacgaagctgcatgaaaatgatatgtaagatttgctcataacagtattgatcaaagggaggttctggacttcaggtgatctatcaacaacagctagtttgttgctcaactataccgaacaaaatacttctttcattccatagtgtgtaactattgtcttaggagtatccatattaaaacattgttagttgaggacatgacaaaatatttacaaaatttgaccctaactgaatgcttttgaaagagacactgctcctcactccgtttcatattataagtcgtttgactttttttttctaatcaaacattattaagtttgaccaagtttatagataaaattaggaacacttaaaatatcaatttactttcattaaatctaattttgaatatattttgataatatatttgttttgttttaaaaaaaatgatactatatttttctataaatttagtcaaatttaaataagtttgactagtaaaaaaagtcaaacaacttataatatgaaacggagggagtacatggctggtggtcaaaatcaatcttacaggtggctggcctgctgcctgtaaccaaaggttagataaaatcgtggattttgacaagcggaaaaccaacctagcaaaaatcgacttttgctagcggatctcataagtcactgccaacgaagagatatttggggccgaaaaagaaataaaaacattttccacaacaacatgatttgattcaaatccatatttttcacatggacatgcaagcatcaacatcgtcataatcatcgccacacacaaagccaccgcggtcatcatcttgtcgagcttcatcggcaaaggcgtatgcggtccttctttcttgactacggatccgggccatgccgaggccttcacgctcgtcgccgagccatctgtcgtcgagacccgccggcgcatgatctggccgccccgaggtccgtcgtcgccagatctagtggttttgaggctggctcacccctgccatcatcgtcccaaggctattgccatctctgtttgccgtacgtcgttgaggcccgtcgacaccagatctggtggccccgagacccaccattgcgccgttgttgtcccgaggccgccctgtcgtcgtcgtcccatcagctgctcatggagctgctgggggagagagtggagcaggagaatgagtggagaccgaccgcctttgccaccccgtggccgtctcgccatcgcaggtgataggggagagagtggagagggacaactagtggagaggagtgagggagagggatgagaaccggtgaggatgagtataggtgagggatgagaatgagtataggagagtgtctcctaaacttgtatattttacttgttgatatcccatgctttgatgtaggatatgtggatgaatgcatgctataaattacagaaaggatagatgtatatgtttaataatgtttaaaatttattttttagtagtgagatatgtatagtagttgtactatgtatttccttttttgtcttgaaaaaaaaggtgtactatgcctttgtgggtatactgatggtcgtttgtcattaaatttttctccttttctgctcacttagctcggtctatcaattacagaatggatcgtggtggttgaataatgcgaaatacatcatgatctgtaaagttcatacatacacttgtttatgatgtttagcccccatcaggatttgatctccaaagctcagatgcacatgtttacttgtacacattcttttagttctaaatttcagttcttttctcttcacgcctagtataatttacctaaataaaaatgatctttcactgctggagaaaccctttttaatcccggttcacaaccccctatagtcccgtttatacaaccgggataacgaatccgagactaaagatgtgtatttttagtccggttgaaataaacaaccgggactaacaaattactcgtatacagtacataacaaatctaatcatagctattttcttacatttcgacagacctcctggtctcctaaggaagagtgagcttccctttacagtgaaaatatcaccaatcaaaagatatgttgtacaaatacaaaaaaattgggaaatacaagaagtggaaactcagaacaataatgttagcagcagcttagcacttgctaataattttacagtcctgtcaagtaataagtaatgcctcttaataggaacttaaaactgtcatctttgctaccgactaaattcagctgtagttgcaatttgtaatcaagtgataggtcacactaggcctcaagctgtgtaatagttcataaatctaggcaatacttaaacaaatatatgagtcaggaaatctgcttgcctaaatatcattctgggacacattttaaatgcattttaaccttgctacagtcaactaatggtccacagagttgacacattctgaaattatttttagttctgtaaataaataaattgtcaatctcatatactcaaactaaaagaagctgataaaaacagatgtgacttgaagtcttgaacaacagagctcattcagcccaagtcaaatcttgagcaaacttatatacagtcagtcccattggggatccctacggccctacccactggatgaacacatcaaggacatgatatgaataatatatccgttagctaattgcttgatcaacacaacttcataactactccgacagtggaactacttttgacacaccaaaaaaatgagataactcgtaaattgctacagtcaagtcacatagataatccctggacaccagtcgttaaacttacatatattttagacaagtttgtcaaataagtattacttgctaaatgagcagaacaaggtccgccaaataccagcatgagtttactggagacgccttccaatacacttgggtacataagacctatctacatcaagcgaaccatgataccagtatggctcgggcacaggccacctgtcatccaagataacttttcctatgtaaattgatcgttgaatacaacaatctaagatgccagaaacaagtggcaatgaagaatccaaaaataaataaataaatacctgtttttcttcgttccctcaccgatatctatgggcataggattgttacatccactgcgaataaaaaaaatttcagtctaaattcttagaataagcattatgcctactagctatcatcaagatataacaaggaaaaaaatcatacctttctgatggtaaatcattcactctgcttaaaacttcgacaatcttatgccttggtaggaaaggagttgcttcacttccatcatagaagttcatgccaacaaaactcccatcaaaattaataagagggcctccaatcccagcctaatacaaaagaaaggacccaatgttactggaaaagttgaaattcctgagaagtcatgtgctgtgattatagagataactcagattctcatgcaactatctatatgggctactacgtaacaaaaaaagtaagagaaattcaccacaccttcttgattttacatgtggacagcttaagatctttgcagtcaagtttgcatccctttttaccacgcttcacattaccaattgtggccatcaatggtccaagtctagtgtcacgtcctatagctactactttttcagatggctcttgcaccgttttactaaaaatatcttctaggcgaacagcattgaaattcttcttgagactgacaatagcaatattatagtttaaattatagaattccaatgtcccacaacaacgttggttcggtgggagaaacacctcaatctgcaaacataaagtgagttcagctagcaatcatataataaagataaagataaatgactaggagaaccaaccgtcaggttactatcaatcttgtcatcattacaacgattgaccaaacttgctgaagtcaagatgacagtgcgcgtagctttgcttccatgccactttataatcaagcctgtgcatgcaaaaaacctcacgaaacctacacattacaactttaatcattagttagtgaaggtaaaattgcatagaaaagtaatgaacatattgctgtcaaaatcaccattgaatgatgcaagggagacaacacgacgagatatatttgtcacaacttctttcggaagttgataccagacacgattcctacaagacttggctggatcaccataagggtaccctttccatgcaagtaattcaccaaagcgttcttcaaaatgattaagcaattccccattcactggttaaagaaacaagatcagaaattaactacaaagaagtgcacaagggagatgaaagcaatatcaaaagcaacgacttacattcaagcacaagtggtggtggcatgggatacccataggattttaaccggtaaatagttttcataaatcctgatgcaattaggagatcattattagtactcagatgatatgtgacattagcataataaagaacataggtaacatttagaatgatgattcgcagtaattgttcatcacctgaaggcacttatgcttgatacacctttaggcaacgaatatcctcggaagtggagatgtttaggactgagagaacacagtacacttgttatgacaaacaaataaatacacacgaactagcccaaccgcaaaaacagtcataccaacacaggaaccaaactgtatgaaaggaaccaaggtatgaaaaatgtactaaaaaaatcaggatattaaatattcaacataagacatgagaggactgagcatattcaaatgtaagaaatataagttgcactatccatatggccaaaacgaattgttttgagtttaaacacttcctcatttaggaaatacattaagcatgggcactaatttagtaaaggacatgtggcaccgatgttggtaaccataaggtagaggtatcaagaatccaaattgtttcaatccaaagattacagtgtgaaaactctgaaggctccaatgctgctagaatcaaaagataaccatgtgaaaactcctaaggtcccaatgttgttagtataaaaatggcttaccttaaacaaagggaatatgagacgaatttggaacagctatcaataagctaagtggggaagaaaaaactcaaataaaggatgtgtaaaagacatacttcaatatcccaaaatgctccaaacgcttccgaagcaatttcgttggtaggaaagcatatgtcaaagttccatcatcatcatggcaaatgctaaagttcatcccaataaatcccttatcctttccaagaagcggccctccaagtacagcctaacaaaagcaaattggtaggataaaggaaaaaatgtattgttttttttttacttcgttgcaaacaatgataccttaagaccatcaatattaatgcaattatttaattcaagttttccatcataccaaaagtaacaaacagattataacaacataccttagagatatcttgactatctggaacccaggtgttgttgcagcgaacaaaaccatccatagccattaaattgcctgactcgaaggcacgcccagcaactagtgcttgaataccatcaggacaggccttaaaacttataggacggacctctatgagcccaaagcacgtgacaatagcaatatcatggtcatatagtcctaagaacccatcagtaattctattattaggaaggcgcactgcaacctatagtgataaaagcagtacatcagcatacaatggccacaatcagtttggataaataaagcaaaatggagggcgtaatgaaggccaaataaaccagcaaaatggaggacaatgatttgcagcaccaaccctcaatttatcatctctatttctcttctcgtcgaatactctaaccaaagcagctgatgtcacaaatctcgttaggtgttctctagttgtcccatctggtagaggtattcccgagcatgcaaataacatcttatctcctgggcaagatcatggtttaaataattaagaagtgacaactaaatacaaattacgaaaatccataagcatcggagtgcactcaccatcaaacaaagcaagggagacaacaatggtagacaaatctacatcaacattagcactgattcgataagtttgttgaccgggattgacaacatggccaaatgatttctcttcaaaagcaatgctcgaaacttctcgatcacgaagatctttgtcgaatcgttcctcctctatagcacacagattgttgtaataattagccactgccttccgaatctcttgatctgattaacgaacatgatgtatacacaactatgagtgttttattagagcaacatgtaccagaaaaacaagaaccaaaaaattcaaaatcaatgacgcacattttctcatattttttaagccgcggcttggcttgtctttcttgtcatcacccctacttgaaagcaatgaggaatcaagtttgttccttctgtttatggctctttgctccctactcacacctcttgtgcaatcaatctgtgcctcgtttctcagggtctttgcagtcctgaagaagaaaggaaatgcaaatggttagtcaaggtttgatcataatgcatgtgtgtcacgcccgaaaattcacaagtaatttccaaactaatttgtgtattaaaaatcctcgtccaggaatcacccgaggtatacaaactgacaatttataatatatagattcatcataataactaaagtgattaaatacttacatatgaggcacttagtcctcaccacgaagaaaactgcagcagaaaagaaaatctagcg

SEQ ID NO: 27065 - DNA, 5963 bp, Oryza sativa
  unsure (1)..(5963): unsure at all n locations
cagacgatccaggtggttggcgagcaccctcgtttttaaaacggcgacgtcgacgtgaggcgactacgacctcaacatcgatgtccatctctctctaactttgagtaactgatatgtttatctacatgttagagaacagtgagtgcatcagataagtctcggttacgtgaccctgtcacggaagtcgtaaatcctccgatttactgtcatctgactttgaacgattgacgccccacgtgtcagcgactcgctgtagagaacagtaaatccgaggatttacactggtggagaaaccctttgtagtcccggttcgtaacccccctttagtcccggtttccaaaccgggagtaccaatccggaagtaaagatcgatctttagtcccggttggtaacaccaaccaggactaaagatcgagctgaccttttttttttgcatgcccctgttgctgcatggtttatatatatatataaaccatgcatatatatgtttcaatacatatatatgcatacatatatatgtatatatatatattatattatattatatgtatatacatgcataatatatatgtatttatacatatatatgttatgcaaatgcatatgtatatagatatatatatgaacaaaatatatttacattatagaaaagtgtacacatgcatatagaaacatatgtagtcatgtattaattacaatccattatatgtcctagctagctacgatttcgacgtagtagtactcgctgctagctcagaagctaaggaccggtgaattgtgtttccgtcgtagtagaattcacccttgggatcaaggatttcttcgttgatgaatcccatgagttgttcttgaaccgccgcgataaattccttgtgtgtggtcaggttatccctcatgcgaataaactatatgaatgtatgaaattgattagtaattaaacaagaaatcgctacgtaatgaaattttaaatttatttgtacgtacatcgagctctcttgtggtgatgatttggtctgcaaggcagtggcaatactcgcacacgtaatagccgcacaagttagttccctgcttttgctttgcgcactacaaataaatgacaaacaacgagagatctaattaatatacacttgtatgtatttgaatcggagaaatataaatgtagagcatgtgtactcacaggaaatttgaacttccgcctaagtctttctctccatttgccgcggaccaaatgatggaaccgataccaagccctacatggagtttaaagctattattcgtagtagcaattaacataacaagattttcttaattaacaaaggaacttatgacggtacctgtctataagttcgaaaaccttgtcaaacgtagactctttnttatccattgagtcatatacgttgacggtgcaggcctccaggtcgatgagtaaaagcacccagtggaatctgcaatgtgcgtgggatgcattacatatgaaacacttagcaagttcgtacgggaatgaaatttggtatgtaggaagacagtaaaattaaactaactctgtgttgtatggcaacagtatgaacgtcttgtaatgctgcgccttcaggagatggacgagattgtcctctgtttcttgtggatattggtcgagcaatgcgacgtttactttccgagggtcgatgaatccagtatcgaaaaccctccgccgtcgggccctttgaatctccattctacaacgataaaagggagtatattattttctatggtctacttatatacaaggacctaattaattaaaggagacgtatagtaagaaatctaactgaacgatatacttacaaaatccagcaactcataatagagacgtcgagggcgtccagctggtatagttcgtagattcccctgaaattgatccagagaatgtcatctccttgcaagaagtccgtgtccctgatcctcgctccgatcatctctctaccggtggcgctcatctccatgtacagctgatggaacttgtacatttgtgtgggtagggactgcagcagctcaggcttgacaagcggtttaccgagttcgtacatgtatttcacttccgccttttcgattggtgcgactcctagcaattgatccgtagttagaccggtgtcagtaataaattgttctatcgtcatttctttaccggtcaccaacggctcgatctcctggtttggttgctctccaagctgagggactggtttggactttccagaagatgctttcttcagcgttcgctcatagtccaatagcttgatggcctccttgacagatgcagacatacccctgaagaagttcctgacactggggtctataggaatcttcttttctggacttcgaggcttgaattgtctcttgacttctgatgcaacgtaagcgtcaagctcctcttgcgtgcaatcgtaccccgggtccttgttcttggcagcgtcaactttcgccttctttgttgcccttgtgtgggcaagcggtggagctgggggggcccttgactttgaaggtaccggaagaggagcttgcgggggagtaggtgtaggagcacgaggaggagtcggtgcaggatcctgaggaggagtcgatgctggagcctgaggtggagacggtgctggcggagcatgaggaggagacggtgcaggatcctgaggaggagatggcggagccggaggagatggtgcacgagacgccgcttgtcgcccagggaggatgatgtaccgcctgcgccatagaataatggcatggcatgtgtctcgtagatgcgtctcaccgtctcctccagggtaatccagctcgaggtcctcgtacgcgccttcgaccaactcaactttgaccttggagtatcctgctggaatcggcctggagtggtaagtacctgaagggtccgttgggatggccatgcccgacgccaccttcatattgtgagagattatttattagtaatcaacatatataagcagcaactagcggaatggctaaatcttacctttattgataagttcttgaaaggaatatgcagctcacatggtgtccgctgagtgatgtcatcaacgggacaggtcgattcgtcctgtgtttgcatggcgtccatgctctgtgatcctacctgccccgttgaggcgcagctgctacggtttcctgacgggctcaccattgcaggaggaatggtcggctggggatcatgggaccgatgtgcggccatgcgttcatcaaccttccttgccacctcctcttgcatgttgagttcgtagctcgatacccggaactctaggtctgcaatcttcgcctcggtatctctcttgctactcatccgactcctgtacgtgtggatgtactccttgaaaccaatcttccaaggaatcacccctttccctcgagttcgtcctggatgctctggagtctgcagggcgagtgtcagctcgtccctatctctgtctggtcggaacgtgccctgagaggaggcttccactgcatctgttagtcgtcgcgcagcctcttgtatctgatagccgaagaccagtgagccatcagctgggttgagcgttccaccgtgagcatagtaccagaacttcgatcgttccggccaattggctgttgccggttcgatacccctctcaatcaagctagcctccatctgctcccacttcggcatcgcgacgctatagcctcctgaccccaagtggtgatggtacttcttcttggcggcattttctttgtttctttccatcatcgcctgcccttgttcacctgtcttatatgcaacgaactcgtcccagtgatcccttagctttgggaatgtgtcgaagttcggtgtctgccccttcagtatatacttctggtacagatctcccttgaagctctgaaactgttctgccattttcttcagagtccaccttttcactttgtcctctgtacccgcaggaaggatgaatgtctcgagcattgtggtccacagcatctctttctccgaatctgggacaaagctctcatgatcttcgcgtgcccttgttcttcgccagtacaccgtactgacaggcacgttatcccgcacaacccaaccgctgtgacgtacatagttcttggcggcttcggccggggcactaggacgtccatcttcttccacttccgttatgatgtgccgaccctcaagcttcttcgctgcacctcgttgcccgcgtgccctcttctgtccaacggagggttgactaccactagcctcctcctcctggttcccctccacatccctttccacgtgcccctgctggttcccctccgcatccctctccacgttcccttcctcgttcaagtactggtttggatcctcgttcccctcttcttcattccagtactggctgcttccctccgcgattgtatcgtacaatatctgttcctcatcgcggtcagccatctgttgatacaagaaacatctgctaagtcacgagacatttatgttttaacaatctaagtcatgtatgctaagtgtaaatgtcgtacattagaaccctacacaaccttacgtgctaagtctaattacaaatcgtgatataagctaagtctaggtgacgtatattatacaaccctagctagtaaataattatatactaagtctaattacaaataaaataatcttatattaaaactcaaataatattacatgctaagactaaaatagtcatgtatatgttaagtgtttcgtgcgtatatgctaagtctaattaagactacaatagtcaattgctacttgtcgcaccaattccgtagtcaataattacataccaagtctaattacaaataaagtaatattatattaaaactcaaataatattacatgctaagactaaaatagtaatgtatgctaagtgtttcgtgcgtatatgctaagtctaattaagactacaatagtcaattgctaggagtcgcaccaattccgtagtcaataatgtcatactaagtctaatttgcaataaaataatcttatattaaaactcaaataatattagaacactacacaatcttatatgataagtctaattacaggtctaataatcttaattaattgcattacaaatataacaatcatttatattattacgtcacttgcctgctccaattccttctagggctagctcttccactcaggcttgacggacgactccgacaacacgtcgtttctgcaagatacaaaaaaatgtattaggataaatgcgaagtaacatatatatatatatatatatatatatatatatatatatatatatatatatatatatatatacatatatatatatatatatacatatatatatacatatatatatatatatacatatacatatatatatacatatatatatatatatacatatatatatatattgacggagcttggggctcctcaccgggagaccgcgcaggcccccctttgccggttcggccgggggccctgggtgagattctaagctcctagtctgtatgtggaaggttcgcgagagtagaaacacacaagacacgggcgatgtatacaggttcgggccgctgagaagcgtaataccctactcctgtgttttggtggatctgtgtatgaagaagctacaaagtgcgagccagcccccgattgttctgggatcctttttctctctctcaaatcccctcttctaagtgggcaaggtcctccttttatatctcaaggggataccacatgcaccatctctccctctctttcttttgtgtggggactcatcctctcttccctccaatttgacttctcttcattgatggacggagatttgtatggctgccatccgaatgaccttctgatgggacggcccatacctacctccacttccgccggaagcaggcgcgacgtgggaacatggctgtctgctgacgacatgaccattgtcagaccggtctcaaatcggtcattcttgtacaccacgtgtcagtttaac

SEQ ID NO: 27066 - DNA, 20152 bp, Oryza sativa
  unsure (1)..(20152): unsure at all n locations
tacgttgtatacttaaacatgagacatcgtacactctggcgatctaaaaattaattactagtgacagtgctggtcaacagtgacgaggattatttgggaattaaggatggtataaaaataccattgtattctctatttgcagctgaaaaaaatcacaaaagtacaatgcatttgattctcaatttacaaactgaaaaaaaaatcaaaatgaaaaaaataccgggatcatcataaattcgctgcaccgctggatcgatcgttcttgattgatccaacggccggtacacgtgtggggatggtttgaagtacatggttaatgttgtgcaggtagctcaagaaagccttgagttgggtttacctgtcagtaaaaatggtccctacaaacaagtgatcatcagtaatttctagcgatgcttttgtctactgtgcatcatgttctctggtcacacgccattcaatcggtccgagctactaccacgatcagatcgaagagttattgcatgcgtttcctttttcttttatttgtcatgggtttttattttttcttttctgattatatatatagaataacacaacaaatatatagtaccaattatatgcatgcactttatatgctcacaagtacacaaccatggttagtcagtgatacagctgtttagataatggagctagttagtactactgcttaattaagttaggtctctttctgttacctttctattttttgtgcagaaaaaagaaaagagctcctgaccaattttagctatcacttcccccaaaaaagcgcagtactgaaattaattaccagtggtggttaggaaattaattaagaaactgtgtgaaagtaggaataaaatgaagaaaggagccgaggtaaaaaaaagagtacacaccaaattaattagatgtttacaaacattttacaaattaatcacaattctcaaataaaagggagttatcccaactatccttattaaatctacttcatatggtgcatattagtaaactataaagatgcttgtgcatgtactattatcatttatcatacagcatgctacccttattaaatctactacaagtagtgcatattagtatactataaggatgtacatgcatgtaccattaccatttaggcattgtttagttccaaactttttcttcaaacttccaacttttccatcacatcaaaactttcctacacacataaactttcaacttttccatcacatcgttccaatttcaaccaaacttccaatttttgacgtgaactaaacacacccttattagaaggcacgaattttggtccattatatatatatacatatagagagatattcgttttgaaaatatcgtattagactgtttccgatcgtcaaaatattaagatttaattatgggcaaatgcataatagattttcttttcaggctttcagtctctccaccatgttttcataaatttcataaaaacctataataacatgaaggagaatacagtgatgattgttgtagtagaacagtagaagtacacactctttggtactacactccaatactccatcgctcatcgacagagaagtaaatgggatcgtgaagctagagctgcgctgcactggactgagctttcaaccacactgcatgtgagccagctgctctgctccatactgcccccatagcttaatactaacagctagctagctccttcttcttcctcctcctccattaatggcggctcagcaagtttggtttgcctttataagagcagctaccttacccctagcctagccaccctgtaagcagcaagcatcaatattgtactgacgtggatcatgtcttcttcttcctcctatggaacgtaggagtggtacagtacgtagtaatggtagatagacactgcctttcaccggtttgggcctttgggatccatggttgccggtttcagtggtgaaagccagtggcttttcagttggagaaaaatcggagagtatggttaccccaccgaccgtagtccgacctgacaggtcagcaaaagcgggcggtgaggtggcgcatgcgtggaaatggtgtgcccacgtgtataaagcatgggccgaggtttggtctaggaataacaactgagatctatcaattgacggagtaaaaaaaatatagaggtcaacagtttagatcgattgtccgtttgatctagttggtcaatatatttaagtttctaagtaaatgcaaggatttttatttttcttgtggagaaggcatttttctaaatttatttacatttagacaccaatacattatgtattggaatactattatgcctctatccagtctccatctctccgatcaattaacggatcaaccgatattgcaacaaaacatacatggcttgcattttaggattcatggtgcataatctccatgcatggatgaagtagtaatttggagtgtaaactttgaacatactctatctattcagacatatttgacatttagcataaatttcggttgaactaacaataacttttaaaatgcctatttttttattaaaaaaagtatatgtagattcaccatagaaatgtaagcagtaacattattataagctcattagattttgtaaacacattgtaataaaaaaatccacagtcaaattcttaaaaatctgactaattaaatcttattctaaacatgagatttgttttcttgggaacaaaataaaaggcccacccttttgcttattcctggaataagcgaaacgaagtgatctttgaataaacctttatatacatgttcttaacgatctaaaagcaaaggttgaagaataaacttcgatgaaaaaaaccttaaaatcaccttcaaatttaaggttaaaaatttaaattttggctgataagtagtataagcatttgttggaatgcatatggcaggacgcacgcgaacaaggtggcgctggtgatgacgtcggagtcgatcgccccaaactggtacgccgggaacaagcgcagcttcatgctgggcaactgcctcttccgctccggcggctgcgcctacttcctcaccaacgacccccgccaccgccgccacgccaagctccgcctccgccacctcgtccgcacccacaccggcgcctccgacgacgcctactcctgcgccctccagatggaggacgacgccggccgcccgggattccacctcggcaaggacctcccccgcgccgccgtccacgccttcgtcaagaacctccgcctcctcgccccccgcgtcctccccctccccgagctcctccgcctcgccttcgccaccttcctctcctccggccgccgcagcggcggcaagaagacctcgccgtcgcagcagccgctcaccatccgcatgaaggccggcgtcgaccacttctgcgtgcacaccggcggcgccgcggtgatcgacggcgtcggcaaggggctcaccctgacggagcacgacctcgagccgtcgcggatgacgctgcacaggttcgggaacacgtcggcgagcagcgtctggtacgtgctcggctacatggaggccaagcgccgcctccgccccggcgaccgcgtcctcatgctcaccttcggcgccggcttcaagtgcaacagctgcgtctggaccgtcgagaagcccgtctccgacgccggcgtctggaaggactgcatcgaccactaccctcccaaggagctcgccaaccccttcatggagaagtacggcttcgtcaaggacatgatgaacttgtgatcgatccatcaaattccccaattaattcctcgatcgatctctcaagaaccaatataatcaatcgatattgcatgtgcttgcttgcgtgcatggattaattaagcgatcggttagttaattaattttatcgccatttgctgcagctctgttgatgattaggatgaacattatatttacagggagggggaagaagaagtaagaacaatcaatgagttgaacaaaaaaaaaactaaggattcaattcataggtacatatagcagcttgtgattccataattttcttttcagcatggtggtagtatatggattttatttatttatcttattttttttgttgttgtttgtaactctctgtatgttgctagctacgagtgtcgtcctagctggtggcaggtgttgtgtctttcattaattgttcatggtgatggactatttctattcaaggatcaaattaaattatttttttttgaaaggaggattatttatcagttcatggtcatgtgcaagtctcatgctgcaataaatatcatataccctgtaaagatacaaatagtatactatgtactagctactataaggagtatatgttttattcatatcttttgagaaccaattcagacttgattaaggtttatccttttttcattctaagtatttttcctaaaacacaatatacatatagaggctcatatataaacattagcacactcttattcagagttagagcatcccagcaactcgtctaaatttgatcttccatatagctatatagatggtcataaaaaaaaggaaaaagtacgaattactccctctcaactattgcacgcgttcaatttacccccctaaattacaataccagatatttttaaccctaaacttttcaaaccggacaaattacccccctaactcacctcgaagcggttttgatccaacgtggcgcacacgtggcggtccagtcaaccaaaaataatactcctaaaaaatagtggctcccacttgtcagcatcttctcctctcttctactttcttccaccttcccctcccatccatctctctctctctctctctctcaccaaggagcaagggccggggaacggcagcaacggcgtcaccagcgtgggaggagacgagcagcaggcagcgcgcgtctcgcgaccgcaacggcacgagctaggggtggcggaggacggcgcgacagtctaggctagggcggcggcagcgttcccggggtggaaacgggtcggcggcgggagacgcttggcagtgcggcaggcggcaatggtgtgcgaaacgagggcggcaagatgggacgcgaccttggcttccatcgacgcacaggagggcggccggacgttgtcgtcgtcgtccttgatgtggccgagctccatcgccatgccgaagacttcctgcaacctgcagatgctcctgaggaccacctgcatcacgatctggaccacgcagtactccatggacgccaccgactcgatccctcatcaaacagaaactatcctaccatgatccatccagccagagatcggtcaagaaccgaatccagtgctatcaaagtaagatcgcaacaagcaaccatgaattgattctagaatgcaaagtaccgattatcagaaaagaacgagagcaatgcaatagattaaaagggaggctagcagtgacggcaaagatgccaggtcggcggctgcggacgagtgtggcgctggaagcgcaggtgcttctggtgggggaggatgccgccacggacggcgcggggacgacacggggagtcggggacatcaccactccggctccgacgaggtaggcagaatgggctactgttcctcgacgtcgaggcacttgcacttgcgggcggagggtgaggggtcaacgaggacgaggagcgcggcagcggcggcgaggtggtgagtgagaaggaggaggaggaggtggatggtgggagatggagcggcgtcatcggtggccgtggcacatggtggtggagactggagagaggtaggaggggagagatctgacgatgggccccaccgacttttttttaatgaattgctgactggattgccacgtgtctgccacgtaggaccaaaaccactccggattgactaagggggttatttgtctagttttaatagttgagggtgtaaattaaatatctggttttcgagtttaaggggataattcggtcgaccgtgatagtttaggggggtaattcgtactttttcataaaaaaaatttcctcctttatatttctctccacttctacagatcatccatattacatcatctatatcacatcctcaaatattttaagagtatcttttaactaccatcaattaatattaatttttctttttttttcaccattatccttctctttcactcccttctctttcactccagaagtccagagagcttgagagaatgggaggacgcgagcgaaggacggaggagcggaggggcacgagcagctcgccgccggtgggagcggaggggcggcgcgagcggctcaccgccggccagagcggaggggtggcgcgggcgaaggggcggcgcgagcagctcaccgacggccaagcaaagtggcggcgggagtggaagggcggcgcggccgaaggtggtcgacggcgggagcggccgacgaaggtttgcctcatcctctctccttgatctaccttcattacttcaccctctgcctcgatctcgattcggatgggatgggagaacggatgggagcggtggttgcgggatggcatgaggagagagaactctgggaatagcgcatgcgccatctatggaggcctagagggggggtctaatgggcgatcgatcgctagggcgatcgcccagtgatcggtccacccccccagctcctatagacactcctcccacttccccccttcctcctccccttcttctcttcctatcagagtacaccacaaaaaaaattaaaaaaacaaaaagttagaaaaatttatgtataaaaaatttgaattcaaattcaaatttgaatcaggtatgtaaacttttgacttgtagattttggatctataaactttaggtgtataaactttagatgtatagaaatactatatatgaaaaatatttgaattcaaattcaaatttgaatcggatatataaactttaggtctataaactttagatgtatacaaatactatatatataaaatatttgaattcaaattcaaattcgaatcggatatataaatttttgacttataaacttttggtctcaactttagatgtgtaaacttgaggtgtataaactttaggtgcataaatttactaaaataggaaagtaatacggtgccaaaaaaggaaaccaggtggaggaagggagggggaggagggagggaatcgatcgctcgctcgctcgcccagtagcattcccgaggcccagatggcgtatctgttggagccggattttctccccccatacactattttctggatggaagatgggatgccggaattgatgggaatgctcttagatcgcaagttttattttttattctagtattaagtaagtgatgcatcattggttgatagagatgcaactcaatatgaatcattgtgggcagcacccatcagggtttcccaaaccgccggggccagggttaccgcgccccggcggtaagcacggttaccgcgcagtaaccgcggtaaccgcaaaaaaccgtacaaaaccgtgcaaaatttatcaaaaatttaaattattttttaaatttatttgaatttaaggaggttacaacggtatttatattaccgtacccccgcggtaagcccggtaaccgcgataacctcacggttaccggcggtaaggtaaaccctggcacccatacgacctaaccatgtcaagattcgatcggtttttcccttttagaaaaaagtaagagatcaactacacttcatttcattaagaaagaaaacaaaccgcccatatttcattttttaaaaaaacaaaccgcccatataaccaaggcctcacgagccattcattaaaaaaaaaggctcacaagcacttcgtcaagaacttatccacaatgagcatcacacaagacgacacataattattttctttttttagaaacaacgcagacactcaccttacccctataagcatcttcaaagactgcgcctcactgttgacaggtacgtcgcctatcactaaaaacacagcgccgttaaatcctataaaattcgctctcatggggagtcgaacctaagacctcaggtgctactgaggcttttgtaactattaggctattaggctacagtacggttgtctccgctatagacccgctctcaatcctctgggctatgataaattgataatgggaaacagctagcgccgccggaccggctggcctgcatcttatgatagatgttccatgatccaagcacatctacctgtagttactgtacaaacgaaatcattaggttatatagctcatcgccaactagccaaatccctactcatcttaaatacacaattactccactaattaggaccatctaaaaatatcttgagctagccgcaatgccaactcacacacagagaatatagtccctctgatatttagaagggctgaatcagatgttcctaatgagactgcatccgcattattaactaataatacagcaaattaatacaagtacagtgcgacgtcccattcgcaaacaaacagcagtgctctgatcaatcaattaacgaaaaaggggatatatgatcccaattgatgtgctgttgatatgtgctgctgtgatgccacgtggagagggagagccagacggatggtgatggtgacacattcatttcaagcctaatcctcattcatttcgtatcatatataatcacaattgctgattgatgacaagttaattaactgtactatgtatgttgccagcatcgatcgtagacatgcagatcgacgcggtccccgagtggatgcaaattaatgcctgcgccattttctttctgctatggtcatcgtcgctacttcgtgttttaggtgtagttgagaggagtggaaattagacaattgagagtgtcattaacatataattaactaagtattagttatttcttaaaagataattaatatgaatatttaaaacattttttctagagatttttaaaaaatatcatttagtaatttagtaagcgtgaacggcaacgggtaagtttttcctatttttgtgctattggcgaaagcagccctatagttttgtctgaaaagttaaataactatagctggtaagtctatacaaaatcgtgacaaacatatcaaattagtttaattaaaatcaacgataacaatacctatttcttgatatatagtgtattaacttaagtacagtagatgttaactatatatttatagatttgctccaagttaattttttttgacgtagttcaagactagaacaacttgcattttggaatgaagtatccggtttcttactgacattcgtctctctaattaagcatgtgcgaaggagcacatttttttgtacatattaatttgatgtactttctctgtcataaaataactttatttttcacataccctatatatatatatatatatatatatatatatatatatatatatatatatatacacacacacacacaaataaaacaaataaaattttctttattttataaaatcctaatacaattttcttatgtttatttttttggttttttgggacggatggagtaagttgctggtgcgcacacgccctgctcatgtgcaggttcacctggccctagccctggagggaggaatggggcaaaacttgtaacgaagaaactgcttatccatatattatgacaccatgatttaaatataattagtatactatgacattaataatagacacgttatgacaccaacgaaacgattttctggatccgccaatggcaacgagacagcacggcgacgagccaacgactgactaggtagcgacgaatcaacgaccaacgatggcagtgcggagacgatgcggtgcggccgcgaggcagcatgccgacgaggcgcgcggccggcgacgagacaacacgatgatgagggggaccagcgacgaggcgagcgggagggagaccgacgccgtcgtcgtgttgtggtgaggaggccacacaacgacgcagacgagcgagcgaggggagtggacgggaggttggctacggcgcgggtggcgcacaacgacgcggatgagcgaggggatttcgctggatatgcaccattgagcatgtatcgatgtataagattgattgatgataaggcatatgattgattttaaatcataaggcataggtttccttatatgtgtacatcccttcatccgtttgggcctatggagtaacgggccatattaacatagacatagacttttggggcctcatagggtcacctgcgggtcagctttcatccccgccccggccccggttatgttcagggccccgacccgatcgacccgcgggttaaaaattgtccccggccccggtccgcccccaccggcacgtcagcacgcatgcagtttgctgtgccatatgggggttattatcaggtctcaaagaccgtgtttagttgttttggcaaaaaaatttgtatatacggacacatatttaaagtattaaacgtaaactaataacaaaataaaatacaaattccacctgtaaattgtgagatgaatctattaaacctaattaatccgtcattagcaaatgcttactgtagtaccacattgccaaatcatgatgtaattaggctcaaaagatttttctctcgtaatttacatgtaaaaactgtgcaattgatttttttcatccatatttaatggtttatatatatgttcaaatatttaatatgtaacagaaaagttgtaagtttaaacggaactaaacacagctatagccgcgccgcgtcttgtccgttaacggccacggcactgaggctttttgcagctatagctgtcgtggcggccgtacatataggagacggacaaggggaataatggatgcgccggccagtggggagtgaccggcgcaaggacagcaatggccaatggttttgatggatcactccactgtccgtcacttcatcggtatgtggttgtggtgtactgatatattagtgcatttgtgtcaggattattgataccacatatctaatattagttgactaaatatcggtaggacccaccacataccatgtgttatacggaaacaaccttcggatgcataagaaaggatgaatagagttctacatgaaaacgacaaggactactcagattgtattcatattgttttccctagttctacttagacaaagtgacatttatgggtataaatacaaggccccataggaggagaggggacacggaacaatagatcaagacacaagatcaacatacaagccaacatgcgccaagacaagacgccggatatcgacttcagagataagcatggctagtcccctacggtatctacggatactgtcaggagagacatagcgctgtctttgatctcgccggatgcagattcgaggagaaagactaccttgttgtcgactacgagtcacacttcagaccgccaaatcaacaacagttagataggctaccccaaatattgtactggtgtgattatggtgaataagagcaacgaccggcttcggccaacaggagtagggttattacctgacaattcagggggcccaaacctgtataaaaatcctcgtccacatctcttttattataatctcgcatatatcctagtaccaacgatccctatactatgtaaatgaaattgcgacatcaaacgtcggcaatatgaatcgaaaaaaaaaaggagggtttggcttacttatctggactgtttaattagctcttgcgttgagatatatgatatcatgatcgaacaagagaggcggggctagctgtaggcatgtatggatgcacgttatctatggtactgtttactgatatgtaagtctcacttgcactctctctctctcgactgcatgtaccaagatgcatgcattcccttcatgagttgatcatatcaaaatttggtcctgccaaatgattgttactgttcagtagttagctgttgatttgagctggaattggagcttatgtacgtcgaattgaatgtgaagaggcggccggcgtcgcgtgtgtatatatgctcactgctcaacaccgtctcttttaatttcgttctgctgtactagagttatgagagactgtacaccgtactcatacataggctgtgtttagttcacgtcaaaattagaagtttagttataattgaaatgatgtgacggaaaagttagaagtttgtgggtaggaaagttttgatgtgacaaaaaagttataagtttaaaaaaaagtttgaaactaaacacagtcatattcccgtaatgggcagcaatgatgggcgtggccgtatttggttatgaggttgatcagtaatcaggcttaagacaaaattgtcattaaaattttttttgtcagcattcgaatattttggagtaatcacgagacagagcatcaccgggttcgatcttcacgtacctaaattgcaacaaggaaactttgaaaaagacgtgccatcaacaatcccatagccccatactctcgattcatagcccccacaacccactccatcttcttcctctcgtcgctgccccatgccgtcttctcccggtttgtgatagctcatgccgtgtttttttcattgagttgaaaacttatcttccgcgcacttaaaatagagcgactcactgacacatatgattgattaagtattatctggagtaacttttttaaaaaataaaataaattaatgtgatttttaaagcaactttcctatataaaatttcttataaaaaacacaatgcttaatagtttagaaagcatgtatgaagttgagaacagtgagaaaaaaaaacacatccgtcaccatctaaccagttctttcttttattacttatttctgccatcaccaaggccgtgtttagtttcctccatattctcaatttttcatcacatcatatcatatcaaaaacttttctacacacataaacttttaactttttttccaaacttccaactttctttcaaactttcaacttttttcaggatctaaacacggacttttaggtacattctactgctagtatatactactagtatatttgatctaatggtgtaaattcatccgatcttcctcccaaatatcctgcagtataaattatttagagtatatttgtctttttatctatttgcgtggggggtaattttttaaattcgtgtttcctcacttggtcagatccgatcgatagccacccacctagtcgaagcccctttttttctcgatgctgcgcgcatgggcgatcatcgctgctaatttcttctgcgagctgccgacgaccacaatctgtgccgccgcgccgccgttctttcttaattaagttcaatgaattaaggactgtatgtgttatggattcagacacttagaaactgatcgaaccaagaatgtatgagataatccacttcattgctatgaacagatcaaatctatttacactattatgtggttttatccctgaccagttttttccctagtgttcttatgcaaatcatgcccattgcaaactcaatctactagattaaatccgatcgtcgaaggaatcgctatgcctccactcacgccgtcgccacgcgcgatgggagcgctacaacacccggacaacgagatccaggaactcctgattgaattaaatcgcaagaaataaatctcaatttcaaattactaaacaacccttttcagagttttaacaaataacaaatctaccctttcacatactactagtatatactagcaatagaatgtactataaaaagtcctcttcgtaaatacgaggaatcaatcgaacaaacccttagaaagaacattttctcactttacctgctctctctgcttagtatgtgtttggatggagggttttgggtgtataagacatggcggtctatattttttttaggtgtttagttgctgggcaaaagtgggataggacggcccggaggagaatattcccccagatgcagccgcccaaggctcgggcgagccgggcgagcgaccaaaggagggtcgcgtcacccctctccaaaagcgagaacgacggcgacgcagcggctggtgcgtgcggcgagggcggcgaccaacgcgagacgcgagagccatgacggcgggaggtgagctcgacggcggcgggaagaggggtcgacggtgtgcccggaggcggcggcggcaggaggcgagctcggcagcggcacgggatgtgagctcggcggcggtgggaggagagcgaggcagccaaggcggaagaggggccgacgacgagcgggaagaggggtgacggcgagccggcggcggcggcaggatgcgagggcggcggcggcgagctcggcataggcccgggatgcgagcttggcggcggcggaaggcgagcttggcggccgacgcggaagagggggcgacggcggcaagaagcgagggcagcggcggcgtgcttggaggctctctttttttccccttttttctttgttatttttctttttttttctgtgtggatttgtaatcgggttttgggtctcgccccactcacgttaggagagaaggtatccactaacccaccgtggcagaaaatcaaatattgatttttcttattttgcaaaatatgttcactgcgcggtcttggtggcgctatgttctgcatgcaaggccatttgaaagttctgcatgcaaggcttgctaatccgcacgcatacaaggccgtttgatcaggaagttgttagtgttgaggttgttaccaagatatctatttaaaacggcggcgaggtaggtcagaagaggagggatttgtgagcagaagcagatcagttctgcggaaatttgatggagcataatcttttgggggtagagggcagaaactcgtcagcaagttcagaaggcggaaccttgtcgacacatgatgtcgcatgcagaaggcggcgatagccgttggttcgtccttgccggcgagttcaggcgagcaccacaagccgacggtggaagaaggtggaaccgcgtcggcgtctcggcgagtggtgacatgcagcagaagccggcggtggcgaaaggctgatccttgccgacgagttcttttgctcagcacaagcgggcggtgcgggaggacggaggtctgttgaatggacacgagtgtgtgcagaactcatcaactgattggtacatatcgaagattcaaattggttgatgtctgtttataattttcctcttgtttgtgtgtttggttctgactgtgtgttgcgttctttggtcaggaatggttttgtgcaactgtgcattgcatggctactggtgataggagtgaagtgatgaatcgctctctccagaaatatgacatccatttccagaaatagtcacacagtttgcaacatgaatttcagaagctgcggagaacccccggcgccgcagaagttgttccgatcgaacatctaaccaaggagaacatttagccagttgtttaatgagcagatcatatggaataatggcttgctttctgcatgaccgttgattagtagtacgaactatctatagttatgtatgatattttctatgagagaaacgcgactaatatttgagttgagttttctgtaacttctactcgttggagtgaaataaaaataagaagttttccttcgtttttttttggctattttagcttattgtgttatccaaattctctattgtcatctttgtccgctatgccccatctttttgtttcgtagttgctgactgtcgtgtgaattggagcagtacaagttcttctgcttcttctgcggatgtagcagaacatggatcgtagttttctgcttgtgtttgtatttgggtttagagatgtagcagaacatggcgaacagcagaactgggagcagaacatgacttattatcgtccagcgtgttcgtttctggtgaaaacataaacgagagccaccaccacctaatacattcgcacctgctgcaggactgcaaatgcaaaatataaagaaaacgaattaggaacagaaacgatcaagaaaagaatccaaaagatgaaaaaataagcagcaaaccttagaaccggaattctccatatgctagagctttcatcgttatctgctacacagccgccggtgaggctactaatctgagctcagttcggttatgaaccatccaaacgtagagaacgattttagatcgataatgttctgctcttccttcacgacgggagaaatatcctgctttctcgctgtggataaacaaacataagtgcaaaaaaaccacccggatatatctcttgttagctcgtctccgatcaaatctcatatctacaaactagggaggctacgttcaatttttgaatctgctgtagaagataagttaaccaccgagaaaactaaaaacgggtgggaatattcgattcattagacccgttaacagtcattagcattatctagtgctagcgatcgaattgagggaggatagggagggagtagctactcccggtagtagtttctaattttcatatatatatgaattttttatttgttgggaaatttgtgaattgcagtatatatatgaatttgatggggtatactcaccctctctaagtgagaggtgaccacatctgctcatccaccctactccctcgaaccaaacaaaaaattagatcaccaaatccaccttcatcactgcaaccaaacgaaaaactgtatcgccacattcacccaaccaaacaaaaaactagattgccatatccaacaaaatatggatcaccatatcccatcctgtcttgaccgtgaaccaaacacacccttacttcctgcaaccgccgctccgatcactctcttcccctgttgctggttctacccgtggctcaattatgtttttttacccaacttgtcattattgtggattattattataaattgtacatggagcgttatttatgatctttatcgtctatttatatgtgtttagatgcttaacatatatataaatgtggtctatttatatgtgtttagatgcttaacatatatataaatgtgggcaatgctagaaagtcttataatatgaaatggatgaaacggaataagtactattttgtaatgttcaaattacagcaaacgtcacaccaattattttccctctgctacaaaatttttcacacttcctaactttccaaaatttgtttgcaatttttcaatcctaaaaataccttctttgtgcgaacatatgaaatagatcgatatttgtttggctactgtcattgctaatttgctttgaaattttttttttgggtccaaaccgtgtagttttcgccagaaaccaagcatttgcacggcttcgtcatatttcaaattgaattggatctcttcaacaacgaaaaccacaattcagacagccagttcttccctcactgaaccgaaaatgacactgccgtagaataaatccctcgcttaacgattatattacggaatgtccattgtaaaatctatatacactgtgtttctcggaattgatacccgcaaagggaagctcagacatcagttaaagagtctgtaaacaaaactttttgacgcagagcaaagatgatgctgacgatatgattttgtagtttactgtacaattatacaacaagagctcttttcgagctgtgagagtgtgagctactgagcttagtggttccgtagatttatatgccctctgatttcaaggaaaaccccatgaaccccactgaaacttgtaaggggccaaggaaaagccgaaaaggaaagtatatatatgtatgttactactcagttgttgcattttgcttctcttttttttttgtggtcagcattcacaacgaaatgcagagctagggaaacatctattgtcgggtgctatctttctaacattaatctcgttcattgcccggatcatttgtggggataggtgtatcctgtccatcaggtttaccttgggggcatcaaggattgccttgggtggagaacgtgcccattgcattgcccaaatggcgagaggccgcatgtagatgagcgacctgtagtgcccgtctatggtccagccttccggtgtttggaaccaatacctgcaacacagcaagaaaccccatgttatctatatcacaaagcaaacggtggttgaaacaagagagcatcaacaatatctaattagtatttttaatgaaattgtcagtgagaagtagaacggtattcataagggagtggtttaagagaggtgcgccagagcaaaatcgatgcgaagcaagttgcattgttgtgaattgcgaaatatgagattattcgaagaacaaggtagtgcttacccatatccttcttctgaccaaccagcaataaaaattccttcggcagtggtgaatccttgatgctccattccatggagcagcatgtttgcagcaacaccgtatgtaacaccggtccagatttcccgagattgcatgcatgtctcatccactttcccattaggagtcataccatttacagctcccaatcgtcctcctttaaccttcattacattgaattcaaatattttctgcagagcacttcttattttattctcatcgaaaagcgggggcaagcctgaagaagcagcataccactgccctgccagctgatccgcctgaatagatcggctattactgcttgtgccactgtcataattgaagtaagacccattccataacttagcctcatatactgctttcgcttgtatgaatttgagcttgtatttttcagcaaatggccgatcaccaagccgatgagccattgtagctgcagcctgaagtgcagcaagccagagaccgccacagtaagcactaattccgtgtacagtccaagcatcataggtttgatcaggaaacccatcattcattcgtcagatgagagcgcatcgacacgtgcacggtcagacagttgattgcagtaatagtcgcatgcatctgcactagacggtcaggncnccaagacattctgctacgcaaaatgagcatatccacctggtagacagcgaaagtcctgctgtatactctggagccacaaacttttggatttaagatcttctccatttgctgtgtatcagtgtatgttgtacgncattcatttcagtgccnatggacctatgtgttctnaggtcatgcggaacggcacctttgaccttgcgaattccagaagtaccatcagccaaaaatttcattcttcgtctgtcttcatagagaacagcattggcaaaatcacgttggatactcaactctattttgggaaacagatcaagcagagcaaaagaagcatagaaatgcacatcataggtgcaccacatgatgtattccactccttccaggtacaaaaatttgccaacattttcagggccattcttggaaagcaagtatggaattggctcttgtgacccaagtccgttggttgccttagccatttgtggtccatgtactgctgcatactttgacacactttgctcttcgccattagccaggtcaccaccattagtgacttgctctgctgtcagtttgacatggttatctttaactgattcctgtttagtgtctctagtgcccctttttgaagatttctgttgattagaaccaggacttggtttttcatcgataactggtggttggccatctacaaaggtgatgctaaactcaggtaccgcaaagaagtttcaagagtaaaaggtgcaattttaaaaattatcctaacgacatccagattgtaatttatgatgtacaactgaacaagcacaaaaaccacaccattacaaagttgaatgaagcatacctgtccaaacagtacccccagctaccagaaagtaaagctcattaaaaagtgtgaacttgtacctgcaagcaccatgaaaccccaaatattctagttaagattttgtttttctttgggagatttagatgtttactgccaaagttctttactgaagaagtagaacacatcagttcagaaagaaatatagaactaaggttgtaccattctggaagtttttcattcttgagtatggggttttgccacttctcaatctcctcttcccaaatcctatattctgcaaaaaaacatagaaggaacatccaacagcgtaaggtcagaaaccaaggaccaacattgcacatctgtccctatcacagcatcatttaactttgttgagaatgtgtgaattacgacagcaacaagtaattactgcattgtgtgtgaatgtgtacaagattaagatgtctaagtgact

SEQ ID NO: 27067 - DNA, 613 bp, Oryza sativa
aagctttggagaagatgtcttaggtggagtcctggcttataccccagttgagcgcctgtgaagatggagccgtaggcccggtagtccgctgctgtttatttttgattgtcaggccttaagtgcctttgtaataatgtaaatattatcgatataataaagatgtgtcttttatatcatgtttgtgtggtgtaccccggcttttcctgggacggggattaatacactagcgagcgggaaaaggcaattttcccggtcgcgacaggggtcgatggacattctccagggcaaatgaaggctacacgagctgcggcccggtagtcgagatgtcatacggcagagggttggtgccctgctgctaggggctcagtcctgcctgcctgtcccgggggttccggccgtaggcgggattgggtcggtactcttgtctatggctaggatgggttggaaactatgtcacgtcttcggtctgtataccgtggtggtatgtggcacgtggttacacgtgaggaagatgtgtcttgtgggtaaagatgtacacctctgatcagagtataatctattcgaatagccgagccctcggttatgggcaagccgagcaatggacccaagtcag

SEQ ID NO: 27068 - DNA, 8045 bp, Oryza sativa
ctttgagtgtgctgggccgttgttgcccgtgtaataattttatatacgcttccgcttgttaaactctgtattgtatcaacttttggtgtaccttgcctcctgggacaaggaataatacacgcacgtcgggagcgcctgttgggtgatttccggtcgtgacagcatggttatccgactggttataggggataacttatatctatgaaatatgtaacggatcatgacttgggtattacgttttcttgtatattatggaacggcctaaagtcctggtttgataagattgtaaagtagatttaggaaaccaataccgtattggttaaggtttctatcttgtaatcctaccccccatcttatataaggtgggcaggaggcactctagggggcacatgccacaacctgatcgtcagatcaatacacatccggcggattcaaatccccaaacaggagtagggtattacctctcattgagagggcctgaacctgtctaaatcttttgtctccgcatccatccacttttaggtctcgtgcgctaccccttttattattgccgaattcatgttttgacagttggcgcgccaggtaggtgtgcgtcgagtttttctgtcaagaagtgtgatggaatcatcctgagtcgccggcatcatcctcgctttgagtttcatggattctgccgccgtcgacaccatcttctgatcaaaaatcaatctaccaaagagacatcggtcgagatgctgggcgaacacgccggaaggactatgctcaagttctattcatctcggattcaatttgattttcgacatcacctattcaagatcattaatcagatacatgccctgtcatcggaatctgatcactatcaagccaagtcccacacgacggttatacagtgcaattcagccgtcagcaattcagttcctatcttggacgtgaatgtttgactggctttgcatgtcgctgtacataccagcaagaaccacattaatttaattaaatctggttggatccatgcgtatacatgcacatgcatgcaagcaggagcacttcatcaagcacaagcaatttttcaaccagatcaggtcaagctgtgcagataatacatgctacaattagttcggactttgtcgccgtcgccgaaaatacaagtctcatgaacggttgagtccgattcataaaaggacacgttttcacaactagattgcatgagcatggattggtcgggtgatgcgtggatgtatctagggttcgagctacaggtaaatgtacccgcgccaattgcctccgtcgccgccgactggtctacccgcctacacagttggttggtcacaccatcattgttgggcgtctaaatcttcaccgccggctggccttcgccgctgcggactggtgtttctgcctccacggttggcctattatgctgccgttgttgggcgtctatgacttcactaccggcctacctccgtcgccgccgactggtgtcctcgcctatacggttggttggtcacaccaccgttcatgggcgtcctcgtcttcaccgaccggcttgcctttgccaccgtcgactggtgtttctacctgcacggttggcctattatgccgccgttgttgggcgtctacatcttcaccgctggcttgccttcgccgccgtcgactggtgtctctgcctacgcagctggcctattatgccgtcgttattgggcatctacgacttcaccacggcctgcctccgtcgccgccgactggtgtcctcgcctatacggttggttggtcacaccaccgttcatgggcgtccatgtcttcaccgaccggcttgcctttgccgccgacgactggtgtctctgccaacacggctggcctattatgctaccgttgctagatgtctacgtcttcaccgaccggcttgcctttgccgctgccgactggtgtttctgacaacacggccggcctattatgccgtcgttggtgagcatcttcgctttcaccgtcgaccgcttttgtcgtcgccgactggtgtgttcattgttattgatggacgactttgttcccacattggccacctctgccatcaccaaggggaatattacaaagctaagtcatcattaattttcttcatatgatattttccttttcctctgcctcactacatcaactggttcgccgttgactagtgagtcgggggctacagatgttatatcttatttttcaataattttcataatatttatcttgattgcttgcgaaataatccagtaacagtaaagtgcctatcgagttatgaagttctatcttcctatgctttccgttgggtttgtcaatggatagttgcctttgggttgattccaagcacccgggggctcgttggatggaccgagtaacacaaggtgctaagtattactcggaataaatcaaaagcattgtcgcgaccgagaaaatttgcattttcccgaacgctagtgtattagtccccgtcccaggaaaagccggggtacaccacacaaacatgataccaaaaagcacatctttattattgtcacgcccggaatttctatccaaaattccaaacgcttacatgtgtgtgaaccctcgtccaggaatcagccgaggcacacaataacaaattgataatagagtacaaatattactctaattaataagcgaataaaatgtcattacagaggtagatagttcctctcaatcaataaagttctaagcagcggaaattaaataaacggcgcagacggctccactccacaggcagcttgaccaaggctacacctaatcctccacaccatcagcctcattgtagaactcttcctctgatgaatgattgcaaggtgagtatatgacatactcagcaagccacgcagcaaatatgcaagtgcacaggataacaaaggatggcttaatagggttccatttgcaaaagcagcttttagcaaacatttgaaaatttaacaaaacagttaagtatataattaaacaatattaatccaacgctatacaacataccctgttgtataggcccaaccattctgaacaaccaccccggctgcacagttctatctccaaaccaggaatataccattccaaaccaggagctaatcaaattattaccagttatagcatcttttataatgatgagaggtgtgagactaatcacgaaagacattgttagacccgcccataaccgcgggcacggctattcgaatagttttactctgatcagaggtgtaccactgtacccacaagacacaaccccacatcatgtcaccatgtgcctcaataccaccacggtatctcggaaaggagttgtgacaatacccctcgcataacacaatccactgcagcgcaccttcctggatcataatcacccccttataaacaaggcatggactccccagcgacccccgtgggcttatctccgccacttctcagtctggtgccccgcaatgaaccatgctatacaaaagataaagccgttgcccatgctggcttgtggttggcacgataaatgtttcacaaccgaaactcgtgaaccggtccttaattgccatgagcacgaccatcaaaaccatgtgctcacaacccaccattaccaggttttagttggcacattaattaattaactaatcacgattgaccatcgtgaactatcaataagccatcatgaaataatagtgagtcattagttatcccataagtgtactaatgtttctaagcagggctaagcaattatatctaatatctagttgaaccaatataaataaagctcaactagtcaaattaataacccaaggtatcaaggaataaggtaatcaatgtacaaaagggccataacaaagaataggtcaattccacccaatgacattcaaaaatagatgcaatagttgaatagaaacaatagctttaaataggatcaacatgctcaaagggttgtttgggatctgtgtgacttgccttgctggccttggaactcttcaaactcttcttccgcgaaaacggactctccggaaacgacggaatctaagcaaaaagaagcaaaatcaccaaaacagcacataaacaagcatgaacagtacatgtggatatttttaatgtgtagatctcaattttagaaaaatttagagacttgaaccaactaaatcggagctaagatgaattagttatgaatttttaaagattaaatcggattaaaacacttaaatcggtttaaattgaattatgacgcaataatgaattatttttgaaaaggaaaaggggatttattgcgtcagcgggctagggtttggtggaccggcgcatgggcggcggttcacgcgaacggacggccgagattgatccgatccaaatcggacggccgaaatcgatcggtctacgaccggctcacgggataggatcccgatgacgtcagcgatgacgtcaccgacgacggcggcggctcggcgaagaagacggctcgggcggcggacactcgccggcgaacggcggcaccacggcaccaacggagggcaccagcacgtagaggacaacgcggcgaacacaccggtgaccaaaacggcggcggaaaaggaacggacggcgacggcgacgagaaggaagcggcggctaccttcgggttgacgacggcgacgatgctccggcgggttccgacggctgcgaaggggcagacgaggacggcggcgacttggcgatgacgacggcggtcttcccgagcggcggcgacagctggagcgacggcggagcacggctgaagcggcggcggcgacggcgaagctagggcacacggcgctagagctcttccgacgacgagaggcgaaggcgagggtggcggcggaaagagaagagcacggggatccttttaaaggggctcggaggcggcggcgaaggcccacggcgacggcaacggcgaaggaaactttcggcttggagagggggaaaaccgatccgattcgaactcgaatcaaactcattccaaaccgattgagccaaagattccaaaggagaaaaagtagaggagatcccggagattgtttcccctctaacaaatcggccggagaaggaaaggaacggccggatttggaaagcggcggcgacggcagctcggcggcgcgaaactagggtttcggcccgaggaagacgacgactgacgggtgggccccacctgtcagcgacagcgcgctcgcgcgggcggctgcggactgggccggactgggccgaggagagagagaacggttttgggccgactttcggcccaaagccaaaagaagactttttaaaacctttttcaatttaaattattccttaaatgcaattccatttattaaaaatactttcttagctcaaataaatcccagaaaaatctaggaattatagaattaagcaaagtatttaatgaaattttatctggcccaattttatattggaatttattaattaaacttagattttcttttcaagacttttaaaattatttctaaaaattccatttaaacaacaatttatatattttgaattttcagggtgtgacaattatatcgataatatttacattattacaaaggcgcttcaggcctggcaatcaaaaataaacagcagcggactagcgggcctacggctccatcttcacaggcgctcaactggggtataagccaagactccacctaagacttcttctccaaagcttctcttactgaaggggggaaagattgagcaagaatgagtacgaccacagtactcagcaagccacaccggcagatgcatgattaatgcaaggggggtacaaggggataataatatcggggttaagttttgcagtaaacagcatttaaaagtcacttagttgcccaaagctattttataaagactatcctagagctacacagtattattaatcaaggccgtgaaccctcacgaacttgccttaacccaaggcctacgatgattcagaccgaactggcaacccgaccctgggtcccagctcgtcccaagccaacccaggccaaccattccacattttagttgttgagcaaattttaagaattaaaacactaacttgggtacattgctcggcttgcccataaccaagggcgcggctattcgaatagattatactctgatcagaggtgtacatctttacccacaagacacatcttcctcacgtgtaaccacgtgccacataccaccacggtatacggacggaagacgtgacatagttcccaacccatcctagccataaacaagagtaccgacccaaccccacctacggccggaacccccgggacaggtaggcaggactgagcccccagcagcaggacaccggccctgtgccatgacatctcgactaccgggccgcagctcgtgtagccttcatttgtcctagagatgtccatcgacccccgacttcgtccatctccatccgtgtacttttgtttataaccagactgagccacaaactaagccttacccactagacatgtggaagtacggtagtgcttcgcaacagaggctcgagcttaatccttatagtacccgaggtacgactaacaaaacccaaccacgcacctcgagcccagcctaaaaccattttgggggttttgaatagagggggaggtgtgtgtccaattccaacataagccaaccattccatagtgtccaaatgatatgagaattcccaaagtctaaagttataaaaccacctaatgttgcctaattaatcagcgaagcatctacctaaattcatactagtggaaccatgaatagagtacccactagttggggttttgtttattctagggtgaacaaggtaataataacaataacaacaatgataaggtcataacaaaggtaaataggcatggctagataaaacagtgataacgcgggaatttaaataaagcgataatgcattaatttaaatcaaaataattttataaactgggattcaatatgctcaaggatgatgtgacttgccttgctcagagagaacggccttccgaaccttcggcgacgaccgcgaaccacgcttcgggaacctctggaacgacagaagctacgcgaagcacacaagcaaagctacaagcctataaagaagcaataacaatacataaaaagaaagcacacggttctttaggttataacaaacattaggagacttgaacgggtcgattcagagttcgtatgaccaagatatgatcatccgaagtttaatgctgttatatggagatttgcggattattataattaggctttgcgactataaaacatgtggaagcgctagcctggaaaagacaggaaggctgcgctgttgacatgcggaccccacatgtcaacctaaaggaccgcggtagaccgggtacacagagacggtccacgggtcgacggaagcggaccccgtgtgtcaaccgaggcgagtggccgacaaacggactctactagacaccacacgggtttcacacgtggaaacaacgcggctaccaagcgggcacactaacacggacactacacggacaagcgaacgactaccgataccgatacacggataccggggccgacaaccgcacaacgggcacgggcgacaccgaaaggacgaggacggggcagcgagaggagagatccttaccaccacgcgacgaggcgaggggacgacaacgacgaacgggcgcggcggagacggacggcgagggaacgacttcagcggcgatccttggacgaaggcgagacgcggccggcacgaggcttgacgacgcggagccgaggacgaagacgacgacgggggctgcagcgaccttgacgaaacaccgaggacggacgaggacggctgacggagggacgaatgccacaacgaccgggaacgacgagaggacgacgacgacgacgactggggctggcgaggaggcgacgagggcagccggcagcagctgcacggaggtgaggacggcgtgggacacgccgcagcgatgcccacgacggtggcagcgcagccagacgacgagccgggcgagcgaccggaagtcgacgacgagaacgaacggagacgacgaagatgg

SEQ ID NO: 27069 - DNA, 11760 bp, Oryza sativa
tgcaccccggattaaaactctccctaatcaattttggaattagccaaatgaatcaagcggatttgagggaggaaatggctagggttcacggaggagagaggaggaggccgggcgggaggaaggagacgaccgggcggtgggacacacgcgcggcgcgcggtcagcgcgcggcaacggcgcgcacgcgcgcgcacgtgcgcggcacgggcgggagggcgccgctcgggttgggcccggaggcggcccatgtgggagggggcggggaggcttgggccgagaggcggcccaggacgagaggagggcgaggaggcccgggagggagaggggaggggagggagctgggccgggagggggagggaaggcccaagagaaggagggagagaaggagagggagagagggaggaagagaggactttggccgcgggccgagagagagagagagaggactttgggccagacttggcccaaagggaaagagagggttatttttaggtttttctttttaataaactctgataattgtttttgttgcttaataattatttccggtgctctgaaaattcaagtaaaatttgagggctccttttagaccaaggagaatttaacaaaaattctccggaccacattcgaatttttctggcacgtattttagtgtttgtcaaattcttttcgaattttaattaattctattattccttttagggaatgatttttatttcgggatgaatttatcaggatgtgacaagcatagagataagataatttattttctgctcttaacaattgcaaaagtactcgagtagtaaactctgatccgtgaaactttgttctattaatgacgaactcatgtcactcgtatgcatgtctgggaagcgcctaggccaactcccggtgcttgggggctatgactagtcgggcagagtgtttaaacgtaaggagtcatctgctcggggaaatcaagattgacgagaggagaaatacatatttataaatattttaaaatacttgaattttcctcgagtattatatttacatcagatactagtcatcctatatgtttgttctgcaggatccagatccagatatgcataaaagggattcatggctttaagcttatctcctacaggaatagatcagtcagaacataaccatcggcttgccatcgtcgccgccgactggtgtcctcgcctatacggttgggtggccacaccgccgttgttgggcgtctttgtcttcaccgactggccgcctcgtccgccaccaactggtgttttcgcctatatggttggttggttacaccattgttgttgggcgtctacgtcttcaccgccggcttgccttcgccaccgccgattggtgtctccgcctgcacggctggcctattatgccgccgttgtaggacgtctacatcttctccaaccggccacctcgtatgacgccaactgttgctatcgtcttcacggctggccacgtcgcagccaccgcaaataggcgtcatcaccttcaacgcaagctgtctacgtctgctgccgactggtttcttcatttccatggctgtaagattctgccaatgttgattggccttatcgtcttcaccgccggtcatctcgtctgctgttgactagtgcccttgcctctacggttggtttatactgctaccactactgatggacgtcatcgttttcattgctggccgccttgtctgacaccgactggcttgttcacttccacggttgcgcgccttcgtcatcattgactggcgtcatcgtcatgatcggtttacctttgccgccgcccatggtgtcttcgctttcatggttggtctattttgccgccgttcaaggacgtcttcgttttcgtcatcattttacttcttccatcgccaactggttatgccgccgccgacttggtggagcgacttcatcttcattatcttcggaaccggcaaaccctattgcctcaacttcgcaagttttgctacttcaccaaccacgacgtctacaagatcttcgacatctcggcacacacttccagattcgacgccgtgatattctactacaacaagtggttctccaattttcaagaattctagtcggacatcttcaacacgtatcttcactcaagtaaagtctactcgacgacaagctacagttctcgactctatcacctctgatgagcaatatcatcttcatgttggtcatttcatttccatgccgactgcgtcagctattgccaatggataattttgattatgacagaaggacaagctataaatgctcaggggcttatcaacttcaacacaaggatcataccttcaagttggattttgttctgagattattttctatgctcgaagactggaccaatcattattccccgtaagggctatcaaccgaatacttgcgccagtcgggattcaatttttatatctattttggagtatcccataagggataatcactcagatcagaagctattcatatgagctacacttggtctatatcaaccggaagaattattactcgggagcatgttatatgcgtcatcctttaaagggtgtcgaaggcatattttttgtcctagccctaatatgtttgcagcccatatttttaggtgtggcctgtcacgttcttttagggacttaggtactttttgcttcggccaaagtgcgcgtgatcaagtgcccaataccttaaaatccttttataccacagttattcaactttttaggagttggtacaatgcactttaaaaggtgcccaacagtgaagtttttcatagctgccctgctgacttttttatatagttaaggcgctgtttgggtttatacagcaattgattggatacaatatcattgctttttgccacgtaagtgtgcatttttattgaccaatattatggcttaggctgattatatattgtggtcatttttcaggcgattggtaaatcctttatgagtttatttactcggattttataccacatatgccgtgtatttccaggtgtggtgaaaccatgtgtcttttagggacttaagcacatttgttaaagcagtgtgcgcattgtgtgtgcttaatactttggaaatttctttattcgcagcatacaagcttcttttataactgttttgctatatgaattttccatgatgtacacaactttaggttgctcgcatcatattttacaaagcaatcggtatatcactcggatcatgttgttcggggattcacgatgcatatgctatatattaatattaagtcacttggttgactataattattaaaaacctttcagttggttggattatttattccttgactatatgctttgtttgttcaactaaccacatagtcgggggctacacctattaggtgcatctagtcgatgcacctgactttatttttcagccctccacagtcttctgatttggtaaaagtactcgggagatcatggcgaagatgattgaagcactaggctttggagtaatctagtccgagagaagattatcttttcgactgtgaaggtctcaggggctactgtggagattatgggtaccctatacccacacggcatggttatccgactggttataggggataacttatatctatgaaatatgtaacggatcatgacttgggtattacgtttccatgtatattatggtacggcctaaagtcctggtttgataagattgtaaagtagatttagaaaaccgataccgtattggttaaggtttctatcttgtaatcctgccccccatcttatataaggtgggcaggaggccctctagggggcacatgccacaacctgatcgtcagatcaatacacacccggcggattcaaatccctaaacaggagtagggtattacctctcactgagagggcctgaacctgtctaaatcttttgtctccgcatccatccacttttaggtctcgtgcgctatcccttttattattgccgaattcatgtttcgacaggtattataccttgattatcttaatttttataagtgcctgatttcagcgtactcaaggtaaaattcaacgcgattggagcaaacgacaactgattctagtggtttatttgctccatcggactgtcgacctacacgtgcatgatcatgtaaccaatatacaaagagggaattagtgttgcatgagaagtctattgcaaatgacgaatgattaaacgttatacgaaaatcaacaagattgtcatactcatacattttaaaacggaaggagtatgacgcagtcttagtctttgcgatcggtttgcctctctcctgcacgctgcgtaatatattttctagaagcaatttggaggccaaaaagggtcctagttgacccgatcgcgatattgtcagccgccgctagcatgcagtgatcaaagatccttgccattaattaagtacacagtagtacctttaattgattatattatggttaagacatcgaacgcacgtatacctaatcaaggtaaacacacacatagacatcaattaattctctccatgagcatctttaaaaattgaatctttaatctttatgttgtgttattctccctattttccaactcatttatcttatttttcacatccatgctttccaaaatgctaagtgatacatttttttaaaaaaaattctacatgcatattgctttaaacaatcctatcaatctatttttaaccatttttaactaatacttaattaattatatattaataaactaatatattcttcatgcaaggaagtgatgttccaaactccactcccaaaagcagcattggattaaggtacaaagtcatctcatatagataaaaaggaagtgttttacataaaaacgaggtagtattaatgtataattaattaggttttaattattataaacttaaaaaatatatttatctaatattttagagcaacttccgtatagaaaattttcgcactgaatgtaccatttagcaatttgaaaaacgtgttacaaatatccaaattttcattcaacctttgtaacaaaacccaaccctgaagttggtagttgcattaattgctggattattctcctgtacgtcgtgctctgcccgttgtcgtcttcacttcgctatctcgtcttctaattaattaacggatttactaattaattaagcaactcgatctggaagatgccttcctgccccacgacccacgggccacggtattcaatctgacccacgactccgacagacggtatacactagctacgacacattccatggtacgtgattaatcaggtggtttatactaaaaggaggaggagaagaggaaagatgttaaaattcgcagataattaatcaagcacaatttagatgatgtgaaatctgcagctcattgttgtccagttctcactttcgctcgacgtggcaagacacaacggatccgagcaataatccactaaacccgccaattaaccatcctgggaacgacgagcaccacacatattcttggtcgtcgtgcagaaaagtacagtgaaggaagaaaaaacaccaaaatactttttcttgctagtacgcaagaaaaagaacggaaagcaacactttaatgcaagtggtcagtatttgattagcttatagtataagtaatctttttcttttgtcccttctaaccaactctgctcctccatttccaacacatcctcgatcgatcccctttcccctcgtgtgggctctacattggaggaatcgagtatggctttctttctttgacaaaaagtagaaaaaataatcagccccatcgtttggcctaaacagtcaaagaatatgccaaaatttagattttttaatttgattttgaaatgcttttaacgtaatttttgttaatgttggcttttaagtcgcgacgaacaaatctacaaaagttttacttataaattaattttaattttttaataagccaaataagccattttggaaaaaatgggcaaccgatgggagccaatgcatatataggcgagacaatgtcggcaatcacttttagatcattcggtcagaaaaattcgtaaacggtatatccacccattggacacgtgacgatgatgtcaacacatgttcggcaaagaaaacaaaatcattgcattaggatgcaatgattttctaagtttaaacaaaccgttgttgttggctgttcgtaaggcttcattgaccatctatacgtctatattttatttttctttataactttagccgtcattagtcacacactattctattttttagagggagcttattagatctatggttagttcttctaatctggatagaagatcactagttaagacgtaaacaggaaaacatatatagcagtggtggatacgtttacaataaattataaaatatttggtattgaatgaaaagtgattataatgttggtctatttgtaactttaatccatatgcacaatctaaagtaaaatacacatttaaagcttgtttgagagtttagttttatttctcaggtgtaaaataaaaacacctgtagtttggtgtggcccaaaaataccactgaaaaagagctgaaccctactcagctctagcaagcaagcatgatttgcgtaaaggtcataactgattttttttaaaaaaagagtataaacattgtcatatacagaaattttaatgagaaaccaattgaaactacatcaaaattatacacagaacatgaaaattatggtcatccaaacccttaagagtagctgacagcagaaacacacaagagatcgaggcatatttcataaatttgtgaacataatcaactgaccccatttcacaagcacacaagaaaaatctctcatgtgttctgtgcccatttcgcaacctcgatatctcgtgtttctgctgtcagctactctgcgaagtggggacaatcggaggtatatttagtgggctacgggccatccaagcaccacttgtacattaaaacctaatggaataagtctatcctccctccctcatcacccttgatcaaatcgtctccctcagccccaaaaccgggtataacacctcctccatttttgaaaaccggtgcaaatagactcctttggtggtttgggaagcggtttatgcaagtggggcccacatgtcggtgagatatgaaaaaaaaatacggtgggcccacatgtcaagtccttttttttttcttccccacctctccatccttcttctctccctctctcttcataggcagcagcaggagagcaccgcaacggcgcggtggatgatgagtcgacgacgcaaacaccatgaacgctatcgctcggagcagagacgtggaggcgtcgttcgccgggttgccgactggcgaggatgacgatgacgacaacctactgtagcacgggtgaatcccgtcgatgtatggcgcctcatctgtgacctccacgaacctcaggttccaaaggagcgtcgtctcccccgccatcgccttccatagttgcgcgacgaagctgccggtggagaggaatgagaaggtcatcgctgaggcccctgatccaaaccgggggagagagaaaggtggaaacgggcaatgacatgtgggccccacccgctgactcaacaagtcaaccgtgatcaacctgccacgtcagcaaaactactttccaaaccatcaaagagtctatttgcaccgtttttgaagacggaagaggcgttatatctggttttgtggctgagggaggtaatttagttagcaacaagagataagggaggcaaaatggacttattccacacctaaaaaagatttaggctggtattttacattgctatttggccacaaacagggcttccaagttggcccttaataatgatattttcaccggcgcctccactccaatctgtatgtacggcactggaaaaaacgacagaaaaaaaaataaaaataaaaaccggaccacgtccacgtgtacgcgaaaaatccacaaatagtagcgaacacatagtactgatcaacttgtggagctcgatcgatcgctgtccagtttcgcgccacgtggcaattggcaaagatagagcgtatgacatcggagcaagcaaaccactcgctaggctagctatcaaccttagcagccaggaagctgggatcgagaagcaaggagagagagagagagagagagacagcatggaagcgccgccgccggcaacgtcgagcaccgtgtgcgtcaccggcgccggcggattcctcgcctcgtggctggtcaagctcctcctctccaaggaccactacgtcatcaacggcaccgcgcgacctcggtaagaaaaccttcgattttatctctgtaagaaattttctgaaacgaaggatcgctacaagtagtacaagatgattgcaataattttttgagctataaattgagaaagtatcgtgcaggtgagggcaagaacgcccatctgaaggcgctggagaacgccggcgagagactgcggctgttcaaggccgacgtgctcgactacggcagcgtcgcggcggcgatcgccggctgcgacggcgtcttccatgtcgccagccctgtcacctccggccgacccaccaatcctgaggtcagtagcttacaccatcctgaacctttcagacaaaattaccttttctttcagaagtttcagtcaaaattactgtactatactagtttggatttgcttctagttccaatgtaatcactccgatgacatatactactagtactgaactaggttcacttagaagcaaaaagtgtttttaacttttaagatgtgtaataaagtcctacaaaaattactgtgatgcaggtagatatcatcgctacggctgtaactgggacactgaatgtgttgagagctagccacgaagcaaaagtgaagcgagttgtggtggtttcttcagttgtcgcagtgttcaataatcccaactggccaacgggtgagcccttcaacgaagacagctggtcagatgaggagacctgcaggaagaatgaggtactaagttgttattaagagtactgatgaagtagtgttatgtcgtcctaacattttctacttttgtaacatgcaatttttggcatgttgggttaggtgggcatatgcaatttttcctatgcactctaggagagagaaacagtctgaattgatttttaaaaaaaattaaaaaagactttgtcttgtcctatgcactccactttatatagataaacaagggcacaatctgaattttcttttcctgatatttggtacaattttttttcctttttggcaatgcgtgcatggtttgtttaccaatcatagagacaatttccttaccttcagtaattcatgctacttctttgtcaaatgcactaaaaatcaattaattatgctgtttctgataggagtggtacccctattacctttccaatacactggcagagcgtgaggcttttgagtacgcggcaaaaactgggatggacattgtaactatctgtccggcgttgataatcggtccattgatgcagcctacagtacctacaagtattgaagtcttctttcatattataaaaggtggataggaattttcttatttcagtttgccttttacattcaacaatagtagcggatttagtttaactgaaaattcccgtatgatgttgtgttagacaataatagcatgcatgatatctcaccacttgtttcatattttttccttttccaatatgaatcatgcaaagaaattgctataatattttcgtagctcaataattaaacatcaagctactttactctgtataataagtgtaataagtgttgcgtactgaaataccatactgctcttatcggtggtggagcaaaaaaatatgcaagctagggctgaatttgacaatttcagttagaaattatatacttccaaattttatttacaattcactaaaggatttacttggagttttggagccaagtattggactcgaggccaagttgccccaagcctggctgcgcccctgtttctaatgcaggagacaacgagacggctggaaacagactcgagactctgttggatgttcgcgatgttgccgatgctattcttttagtctatgaaaactcagggggatctgaacgatacatatgcagttcaactccaagaaaactaagtgatataataaacacgtcaaagagcttatatccagctttcaattatccccaaaagtaagcttaattatttttgtgttccttaattagtacatgcctgaagtgtgatatatgcatttttgtttattcgtgatatatgtagagacttattgtgttgtgtttttctttatcgaagtggatgaggaacaaaacactaggtttagttcagagaagcttgagaagctaggttggaccttcaggcccatggaggaaaccctcagggatagctttgaatcctacattggtttggggattctgacctgagcgtcctactggcacaaccttatgaagattctgtaatcagtgataaacaatcagctggagatataatttcgttaatggaggtacatgattgaagactccaacgttcaccacaattgtttcaatgcttaagaactcgtatgatgcaaaaccgttaaataatgtaatatcagaattgattgttttcacataatatcataattgaacgctcgtagatgaggtacgtactgtcacttgagatctgctactggtttccgtctcttaaaacgtgtgttaggggacacattcatagaggtgtgagtgtgatgttacgtgtgtaatggtgtgtgtgcgtgcatctatcgtgtaatataaaaagaaaaaaaattattagcacatgactttgctcaatcaacaatttttttttccgggacaatagaaggacgccgaccaactacactcaaattaagacaaaacactatattttacagttttatatgaatcaacaactcagaaaaaagaagcacaaagcacgctatggtgcaaagcgctacaaactacaccggcataacacacagcagcagcataacccaccgctgctatgctctgctcaaaattagtaatatttatatttatattttattattaaaatatattaaaataacaaaataattttaaataccgtactaatttgaccaaactaatcagtgtgtaatatctatattatagaagtgtcaataattaattattttttaattttaaattttagttatttctaaattatattcctatatgaattttagaattttaggctcttctttcaatgtttcttatttattaattctaaagttccattatttataaatattattcttatatggactctaaacctttctttcaatatttcttattttcaaattcagagttttacttatttataaattttattcccatacggactctaaaactcttttttcaatattcctaattctttcagagtgattttctcaaaactacgaggggaggaggaagctatcggcatgattgagggtaggggtgaaaacggagcggatattatccgatccgatccgctccgaatccgtccgatgtgaggatacggtaagggtttttagatatctggctggatgtggatgtggattttgtcatgcgaatgcggatgtggtatcaacgatatccgatggatgtggattattcgatattttaatcggattatccaatgttctgtttggcggataatccgcaactttcaggccacacaacaactctatttagcttattttacatcgggcggcccatctagcacatctagtgtaacctaatccaatcctcctcaaatctct

SEQ ID NO: 27070 - DNA, 3993 bp, Oryza sativa
ctcaacggcacccgctgattacgcacgagcgttgcaagaattttctgccgtcagtatggtgattcccggccaggcaccgccacgtgtcagtttcctttccaccgggcaccgccaattgtcagttgcctacccccacacaacacacacaaatcccactccccagcacaccaaaagcccaaaagaaacggttttctcctccgcctctgctcgatcgaattcaagcgacggatcagaagatggcggtggagtccggcgagttcgtggtcgtgcccctccttgcgcatccccaggacagcgcctccgagccggggcccttcaccgatcaccgcgcgccgttcgccaaccgcgacacacgggcacgcttgaccgtggccgtggccgacaccaacggtgccgacgtcttggcgcgcgagcgcggcgtgccctcccgcgaggccattcgggttcagaaccgcactccgcctagctgggcgtacgtgtccgagtccaacatcctcgcgcgtgagaccggcgagcccctcctcctcctcgacaagcaccgcactgccggagtgggcgtggccgtcggcttcacgcgtgagcacggcatgtcattcggtgatgccctcctaggaaaagaatctccccgccaggctctgcaacccttctatacaatttcttttttttttcttttacataaaacataccgtttaaccgtttgaaaaacgtatcaacggaaaacaagaagtatgcaaactcgattagctatttaggtaatggtggtcgccgccattgccttcgtcggaagccggtaacggacaacatgaaccgcggcggcggatcggatgagcacaacgacgtcacctggtacggatgggtcggggcagaaatctccgaacccaccgacatctctttgacatagttgggctgctcggcggagttgggccaagcggtaacaggctatctagggggatgcccaccaaagtgcgggcctatctgcaaattatactgggcttgttttgccagcttaattatcgattctcctgtaaatcctgccctaggtggatctgcctacaattagctctatcttttggtttactatgtttgtaagccaattttcaatacttattttaagttgattttgtggatttttcatcatagtttattttacagtatttgcttgtgaatcactctgtacacatatataaagatcttaataaattatattcttagttgataatagtcatttagacatgcatatgcataagcgaaaatataatagtcccttcgtaccataatataaggtaatatactattccctccatctacttttgatagtcatatttcatcttgacacacagaccaaggataagtaattctacttatcatccatttaaacatgctattagtcatttctaataaacaagcgattcattaatatttacatttctcgatgcccatgtagccaatcttgtgtggaagaatggagagtcacgcattaaatccgagaaagttattaagatgataggttgttgaattgaaatatgcccatcaaaaatattttttttttcagatttggaaatatgactatcaaaaatagatggagggagtataaaatataagggattttgcaatcccaagacatcactttattcttaagggtagctatatttatgacgtcatatttctcactaaaaaaatagtcggcatgaatttacattgtaagtccctaaattacatacataattttaatgtatttataatataagtttcaaaattatatatgtaagtagagtgtaagtagtgtgtaattttattttaaatcaatgaataaacatactgaagtctatgagatgcaaattaattcattatattaactaaattaagtaggtggtcccactgctaatgaccgtacgtacatattgattagataagctatacatgcacaaacacgaatcgaactgaagatcgggtggccaaaatattcgactgtgatgggcaacaaaatgtgaccccaaatatgttattctttacctaccaccttttatactagtttacttaatccactacttttttactattttattcccccgcctatcaccttccgtactactttattctcctattcatcaccttttgtaccatgtcttgtccttttaccacttccttaattttgtaaaaatggcataattccttatattattagacggagggagtaatagcttggttgtgcttgctcatgtggcgtaatacaacctagcatctccaagcttgaccgtcaaaataaaaacagtccctcaaatcttttgctctatataaaatcagttgttgccaaaatttaattttagaacttgattttaaagtttttttaatcaaagtttagttttcaatactaacttttaaattgctaatgtcatatatatatatatatatatatataagttttacctataatttttattattttgctaatatatatgtcgcacgacgtattttcagcagacgcccaatcgatgggcccacaaaccgtcggtgctagtagcaggtgaagtggtaagaaatactgctaccactattttcaaatgtatgatggtaattagtaccgccgaaccaaaagattgagagattacttggggaaggcaagtgcgcaaggaaaaatagaaaaagaaggctatagtaaagaatatttttcacaacccatgcattggatcatgggcttcttccctaattaagagtttgggacaaaagttgaggatctttttctcgatctgcgatcacatgaagcgccaaaagaataatcccaagcatgactcatccatctttgatttgctctttgttgttcctcagatgactcagcggccgtgtttgtgaccagtcgtgagtagaaactagtataacgtagagtactaagtaaacaattggttcgttttcttggggagcaagagtactatactatgataaaatgattaatgcacacgcttctcgaatttacaagtagtgtggactttccatatatgagtataattttaaattaattttgtaatagttattatttattggttctctaaaattatcaaaaactattaatctattcaccattcatcatagaacaacaccccgtagcgctaacttgtgttattttaacactactagaaatgtattattgacaataacgcaaaccataggtcagcataggtcagcgctgatgccgatcaggtatcaaagatgtaaagcaagatgtctatctacgatattactgaacctgaagaagaaaagaaaggccaagatactaaaactatgaaatatactacttcttttcccctacggttataagctactatgaaattttgaattttaaaacttaattttttatgtttttttatcaaagtttattgcttaatgttgacttttaaatcggtaaggaaacatgtataaaagtttattcaaaattattgctaataagctgtaagggttatgatcaacatatggccactaataggagcctttgtttgcttgaagaccgtaagcaaccacttaaaaaatatttataggagtataatatgtacgtgcgtaggttgttcaaaaatcaattaacaacttttctgcaaggaaaatcaatttgcacttccttgcaaaaacaaagggaaagtacaaccactctagaacaaccaagtagtacatttcttttgcatgtatacaaaaaagatcggagggagtatctcggtggtgggtagagtagtaagtgtgttgtactcgtactagctagagtatatgcttgcttggcgccacgcaagctcggtaacgaaaacgacatactctacatgcaagaggttagactattgtgcagtgttgcctagctccttaattgtcatttgcttttagcattagccccttggaatcgactcaaaccgcgggaagaacagatcgatcgaccgcggtttaatttggcggcaatttgcacagatcagaattcagaattgaattgaggggatgcttcccgtccaccgggggacg

SEQ ID NO: 27071 - DNA, 4729 bp, Oryza sativa
ccgctcgctagcccctttataaggacccccgagctctcctctacccgtcgcctcctttgccttagcctgccgtcgcgtctagcgccgcctccgcgtagccctagtcgccgccgtcgttgccgtcggttcagccgtgtcgcgcagccgttgcagccgccgtcgtcggtcgccgtcgccaccatcgggttcgcaaggtcgtcgccgtccccgtccaccgcttcgccaccgccgaagaccgccggagcgccgtctccgtcgtcgacccgatctccgccgccgcttcttcctcgtcgccggcgtcatccgttgttcttccgccgccgttttggtcaccggtgagttcgccgcgtcgcgctctacgtcttggtgctctccgtttgtgccgtagagccgccgttcgccggcgagcgtgcgccgtccgagccgccgccgccggtggtgacgtcatcgctgacgtcatcgtcgccctctcccgtgagccgccgtggacccaatcgatctcggccgtccgttttggatagggttgatctcggccgtccgttcccgtgaaccgctgccgtgcacccggtccaccgcaaaccctagcccgctgacgcaataatcctcctttttcttttcaaaaataattcattattgcgtcataattcaattaaaatcaatttaagtgttttaatccgatttaatctttaaaaattcataactaattcatttgaactcagtttaatgtggttcaagttgcaaaaattatataaaataaagatctacatattaaaattgtccataaattgaattaaatttatttaattctttttaaatgggctttaattagatttaatcttgtaaaattcataataaattcatttgaagtcagaatgaggccgttcaagtctcataattcatctaaaaatatgatctacatgtttgtttactttttatgtattgtttatttggtttttattagtcttttccttgttttgcgtgttagcttgtcgtttccgtcgttgtgaaggttcgcgagtgcgccggaagtattcaagaagattaattgaagaccgattattgcaaggcaagtcacacagatcctaaacccaatcctttgagcatgttgatcctatatttaaattctctatttatttcaactgtgcatttattttcgaatgtcactgggtggtgtgaacctattcctttgttatggcctgtttgcattgattactttattccttgataccttgggttattataacttgactagttgggctttatatattggttcagctagatattagatatgattgcttagccatgcttagaaacattagcacataattgggataactaatgtttcactatcacttatggttatatttaatggtagctcacgatggtcaatcgtgattggttaattaattacttgccagctaaaacttgataatggtgggttgtgagcacatggttttgagagtcgtgctcatgacaattaaggaccggttcgcgagctactattgtgaaacattaaccgtgccaaccacaagccagcgtgggcaacggctttaccttttgtatagcatgattcattgcggagcaccagactgagaagtggcggagataagcccacgggggtcgctggggagtccatgccttgttttataagggggtgattatgatccaggaatggtgcactgtggtgagttgtgttgtgcaaagggtattgtcacagcctctattcgggtactttccagtatcgcgacgcatggtagacatgatattgaggctgtgtcttgtgggtacagtggtacacctctggccagagtaaaactattcgaatagccgtgcccgcggttatgggcgagttgagcaatgtttttcgtgattagtcccacacctctcacaataagtattgatgttataactggtaataatttgcttagctcctggtttggagttagatctgtacagccgggtatggttgttcaggatggttgggcctgtacagcatgggtatgctgttcagtgttgattaaaatttctgattaattactccactgttttacttctcttaatgctttgctaaatgctgcttttgcaaatgagccaatattatgccatcctttggtatccttgtgcacttgcatatttgctgtgtggcttgctgagtatgtcatatgctcaccttgcaataatcaatcaacctcagttgaagaaaaaggatccggaaggagaagacgtttggcttataccccagttgagctgcctgtgggagtggagccggagcttcgctagattttattttccgctgcagttttcttcttggtgaggactaagtgcctcttaagtaagtatttatcattttagttaatttgattgtcagtttgtgtacctcggctgattcctggacgaggattttatgcacaaataagttcggaaattactagtgaatttccgggcgtgacatcctccaccgccgttgcctccctcttccgtctctcttgctcctccttcccgtcctcctcccaacgccgctccaactcccgacgcgcgcctccgtctgccgtcccccgtcctccccccgacgcttccggccatggccgccgacgcccgcctctcccctatcccctccaccttccggcgcgccgcgtgcgcgctgattgccggcccacccccgcgccgccgtccattgcccttccccacgccgcgccatgcgtgccggccgccggcgtgagcgccgctgccgctgaccgacgaagagagagaaagacagagggaggaagagagaaagaggggtctgacttgtgggtcccaccattaaaaataaaataaaatgctgactggattaccacgtgtacgccacgtaggccaaaaccaccgcggattgggtcgacgggggtaattcgtccggtttgcatagttgggggtgaagaatgtccggttttgtggttcaggggggtaattcggacgaccgtgatagtttgagggggggtgtaattcgtactttttcctttacaatatgcactatcaagtgcagtagtaagcatatttattagaaccggaccggcgggttgcctagaaaaaaacctgaaccaggacgttggccggttcggcctagctaaaagatcggtcagcaggcggtttttttgccgaaccgcacaaaaacccggaggtggttcgaccgctgagggggcgaggagcagaaactacagccatcacgtgaggttagagaaaataaggagaaaaccgctgcctcgagggatcgaacccaagacctccatgttcccgtgaaaacactaatccatagcctgttgatgtagtattgtaacacacatttatttaaacaattttaaaccggtggtttgaccggtcccacctacagaccagtgaaccaagtgccctaaccgttcaatcaccggtctggtcttaataaccatggtagtaaggctgtgtggttaactccaaagtttcgtgttcaattcctaacacacttatatttttttcttagaaaatgtttgaagcgacgtctctccttccaaatctcctttctgaaaggagctttacattattttttaaaaaaataatggaaattgatgaaaaggagagaggtttaaatggtttagttttacataatagcacaaattagagaatacccattggcttctcccactaaactagtactctttccttttcttttctaatatatatgacattattgatttttatcataacagtagaccatttgtgttatttaaaatattcagtatgaatatataaaagatataagtaatgcttcaagtttctttaataataaaccaagttacaataaaatataatatatttagctaaatatttgaagtatgacaactaatcaaatgtatgttaaaagtcaacggtgtcatttattagaaacagagtgagtagttgttaaaaagaatcaattacaacactctttcactcattcatgtgcatgtggcacacatatgcctattcatgttatactaaaaccaatatattgacatgatgtttgattaattcttggggcagaaagaaaacgaaaggagtgttgctgcatcaacgtgtttgaactaacggctcatagagataaacttttgcttttaatggtagctagttgtatgcattgttcaggaattgatcagtgaatgggcgggcccagctcaattcaagggtattcaaatgaatacccaagatttttagacaaaaaatacatatacgaggtatatatttcttatgtacgcagagaaataaagaaaaggaaaaagtacgaattacccccctgaactatcgcggtcgtctgaattaccctcctgaaccacaaaatcgggcattcttcacccccaactacacaaaccggacaaattacccccctcgacctaatctgcgatggttttggtctacgtggcgtacgcgtggcagtccagtcagcactctagttattaaaaaaatgtgggacctacctgtcattctcctcttcctctctctctcaaacaggtcagcggtggcggagcgcggggaggacacggcggcagcgggcggcgccgaggagggggacgcggcagcaggggaggacgcggcggcggcggctacggcaggtgacgcagaagcggcggcggtggcggcgggggacgaggaggacgacgaggatggcgacgaaggagtggagacgacgctcgggcgctggctgcggcggccatggcggagaggtagaccgcggggaggaagc

SEQ ID NO: 27072 - DNA, 5030 bp, Oryza sativa
gatccgtttgagagagagagagaaaagagagaggatgaggagtatgacaggtgggtcccacatttttttaagtaactagagtgctgactagactgccacacgtaagccactagatcaaaaccaccgcggattgggtcgaggggggtaatttgtcgggtttgtatagttgggggtgaagaatgccttgttttatggttcagggggtaattgagacgaccgcgatagttcggggtgtaatccgtactttttcctaaagaaaataaacgttattgatcaaaagaagcccaaaaaaaagcctagcaggctggctcgctcaaatccgaacccaatttgtatggttgcctaatttgtgcattaactgtgttgtgatagcatgatgctaatcgatgtatactttgttggtagattgtacttcatatgttttttctcaaagtatatcacaataaatcaagaaaattgctaaaaaccttgtcgcaagttttaattcaataagcagtactaaaatactatattgttgatcatacataccaaatattatgctcgtgttgtaaaaattttttttaccctatttccatttcgaatacccaatcttaaaaatcctggacccgccctaataatgcattcaaaacgtatatgcaggtccatgaatgcacggcaaaatggcaacatgccaggttttgtacacctggtaacttcaggtaaattggtaaccttaagttggaatatatatttttttcctttctctttggactcgaaatgtacactaattttcttactttaatgagagacctccttttcactggctcttgtggacacaacagatagaaaccaacatcaaacggtttcccagttaccctattaaaaatgtgaagttcaattttagtcaataacgaaagctctattgttgcttcgaaaaaggttttgaggcttccttgattaaaaatgtataaagtcactcaggcccctttgatttgtatgtaaaatataggaattttggaggattttaatcctatagaaaaatttcatgcgaaatcctttgaaacaaagggttaaatcctatcatatcctttagaattcttatgtaataatgtaatggacaatcaaatagggatttcagaggaaatttagcaaaaactctaacctcttcatttttttagtctctctttcattcgattcctatatttttctatatttttcttgtggtccaatcaaatggctatttttcttaatgtattttatacattttgcaattctctgtttgcatttgaatttatatcagaatcctttttaattgccctttttccattcatacgattcaaatgggcaaacaattacgattaaatcattggaatcgattgacatttatgtaggctgtagctagcaagctactggataaggatacggattcagagaagactaaatattttaaaaagatccaactttctactgactttaataaagcatatattaatttacataaaaaaacttaaaaaagaaaagaacaaaggtaaatgcaagggagaagtttttttgatttggacaaccggccgttaaagaagacaatgcgctctgtacagtactgcccctgactacagagatgaaatttatccttctggaattagatggcatgacgacagacatgtgacgttaacgaccaaatttggtaatatcagtatcggaaaagaagattagatcgaagtggaatcagagacagagatcaatctgggaacagaacgggaatcggctagagtccggatcggctacagtcaggatcggtagagtttgagtcagacagggctagccgatacagccgatttcaagaatacgacttggtgtacatcatcgggttgagttattatgcttcaagatgattgccacgcatggatagagtcctgagaaagcaattgtatctattaattaggatattttatgtaatttcattagagatatgtttaggcaaaagtctaccgcaaagacttatagtatcttagggttgttagagacaatagtcatgtccggtatggacatatcttgtaattctcgggtataaatagaccctgagccctatgtaaaagaacacacacacgttcaatacaatttcggcgcatcgccaccctttttgcttttgttttatctcgacgagttattgctttcgggttgagctgcattggtttcgatcttcaacaagaggtaaaacttgttttgacggcttgtgttctcgaagattagtgcttccatctttatgatactctaatcttgtttatgtaatccgtcaagttatcatatatcttgcataatccttgacaatatcattatttaacctacaatcggctaacatctgctaccagaaagcaatcagttaggttaaataacgatgttggcttagattatatgagatatccaccactttatgaaacatccagcagcttgattgtctagatgttgttcttcttttcatacttaatgttgtatcagttgagtttgatctattaagtcgtgcttagaatttcaatctctagcctgcctactggttgccgattagggtagtatcggagtttcagccgatcttatctgatctaattgcttttgctctatatgctcaattaatatgttaaatctgccattcatattaagatcttgttgcatttaagtatattagatttctgtttagtatattctatttgctttaatatcttaatataaagtagtatcggagtattagccgatacatgctagatatatttgatcggctatgctatgaatatgtataatctcattattaatatatatttcaatctaagtgatttatattgtctcggcaaggtgaccgatgtatcccaatcacttgattcaagtatatgtcgatataaggattatatatcattgatatctacagccgatcgagcagatttagttctgatttgtttccttaacaattaccgatagatttacatatgacatcggctcaaagataaatgatatgtcatcggcatttagccgatcggctatcatttatggatttaatcacggtttctttgtctttgtttcttgttgattgcaggatcaaatcaactagcacgctcatacatccgaaggcgagttttggacctacactggagttaagcagatctcccaggcctcgtgttttccatcaacacgcttttggcacgcccggtgggactgatcagaagtcagaagaacagcttccttcatggctgagaaaccaccactgtctccgtcgtcggccagcctgggtagtggtaaggaaaagacccagaaattcggtctgactgacgtccatgaaggaaacgttgtacccatcgatccagagaagttcactcctgaacagaagaaagacttcaatgcaatgatgcagcaagcacgagatcaattttaagttcattcatgcaaacttgtaagggcacatttattcagaagtacaaggtgaaggtggttcctgaggattttgggatcggttcttctaaagagggagaaaagaaacaaattccagacggatcagcccagccgagtaacaaaggtgctactgatggctctccaggaaatcaaggcgatgaccctcaaggggtccatagagtgcaaggtgacggagttcacggagttcaaggtgacggcactcagggaccgcaagggggaaatcttaatcagaatgacaatgcattccaagattttttcaataactttcaagatcgagttgactatgctgtgtataatgctttgattaatcaatctggagtgttgactaataccttgtcaaatatgatgaaatcggtagccgatggttcaatagctgaacatcaagctgcaggcctagtttacttgcaaggcggtacttttccaaattattgaactttgatcaccgatgttcatccacttactcagggagttcctcctgttgcatcatcagctcagccgacggcgccagcatcagctccagcacctgcagcgccatcgtcggctccaggccaattaatcaatcctcaattattggtaagagagcaatcacagtatcctggaccgaatgtgactcagctaacacaagaccaggttgcatctatgtttctacctcctcagaatgccattaattcggctcagcagcagccgattcagcaaacaccgtccaggcaacaggttgtgcagcctattcaacaagcatccccaattcagcaggccgtgcaaccagttcagcagacgccaccaaagcaaccggatttacagccgattcagcagacaccgttgagacagcaggtcattcagccgattcagcagcaagcctcaatgaacgcatcggctgggtttacaatgcctggtggccagcctgtgcagtacattgcaaatcaggtggtcccggaacacttggttcatcatgtgcaaccggatggttcggtggtgcctcaagttattcctgagcatttggcgcgtggtattcggccgaaccttcacaattgccggggggtaatttgagttatcaatatcagcctccatcaccccaagttcagtaccaccaggcaggatcggtgcagcctcaattctacaaccagtttgagcctacaccacaacaaacacctcagcagcgaccatgggctgacgtgatagctgatgtaatgagggagcaatttgggcttaaaccaaaagagactgggaatttgtaccgacaaccttatcctgaatggtttgaaagagttcctttacctaaccggtttaaagtaccagacttctcaaagttctcaggacaggatactacatcaacctatgagcacatcagccgattcttagctcagtgtggtgaggcatcggctgtagatgctttgagggttaggttattccggttgtcattagctgggtcggcttttacttggttttcttctctgccacatgggtcgattaacagttgggctgatttagagaagcagtttcacagttatttctatagtggggttcatgagatgaagctgtctgatctcacgtcaatcaagcaaaagcatgatgagccagtgcatgagtatattcaa

SEQ ID NO: 27073 - DNA, 1856 bp, Oryza sativa
ggattcatgctaattgttgtattccttcacccatgcaccaatgtttgattcaatggcaaggcgacaagatagagatcgtgccagtcgacaggtcagttaatgttgctagtgccgatttagctctttgggagatggatggccttgattgtttatctggaaaagtttgggatgaagattttttaagagtatccgattctgatatacagccaattaaagatgaagaacccaagctattattttgagggcgtcgtggagggttcgaacgtctacaccaaggatacagtagatgatctcgatgacaaacaaggtcaaggttttatgtcagccgatgatctggaggagattgatgtaggtccaggcgatcggccaagaccgacatttattagtaaaaatttatgtgcagaatttagaatcaagttgatagaactcttaaaagaatttagagattgctttgcttgggaatattatgagatgccaggactcagccgatcgattgttgagcatcggctacctatcaaacccggggttagaccacatcagcaaccgccgagaagatgcaaagtcgatatgctggaacctgttaaggctgagattaaacgcttatatgatgctggttttattcgtccttgccgatatgctgagtggatttctagtatagttcctgttatcaagaaaaacggcaaggttagggtatgcattgattttagagatttgaataaagctaccccaaaggacgaatatccaatgccagtggccgatcaactggttgatgctgcgtcagggcataagattttgagttttatggatggaaatgctggatacaatcaaatttttatggctgaagaagacattcataagacagcttttagatgtcccggtgcaatcggattatttgagtgggttgtaatgactttcggcttgaaaagtgctggagcaacatatcaaagagctatgaattatatatatcatgatttaatcggctggttggttgaggtctatattgatgatgtggttgttaagtctaaagagatagaagaccacatagccgatttgaggaaggtttttgagagaaccaggaaatatggcttgaagatgaatccgacaaaatgtgcttttggtgtgtcggctggtcagttcttgggatttcttgttcatgagagggggattgaaattacccaaagaagtatcagtgcgatcaagaaaattaagcctccggaggataaaacagaattgcaagagatgatcggcaagattaatttcgttagaaggtttatttctaatttgtctggaagattagagccttttacgccattattacgattaaaggccgatcagcagtttacttggggggcagagcagcaaaaagctagataatattaaggaatatttgagttctccttcagttttgatttctccacagaaagaagttccttttcggttatatttgtcggccggtgagaagtcaatcggctcagttttgatccaagagcttgaaggaaaagaaagggttgtgttttatttaagtcgtagactcttggatgcagagactagatattcttctgtggaaaagttatgtctgtgcctatatttttcatgtacgaggttaaggcattatctgttgtccaatgaatgcattgtcatatgtaaggccgatgtggttaagtacatgttgttggctccaattttgaaaggaagggttggaaaatggatattttccttaactgaattcgatcttcggtatgaatcaccgaaggcagtcaaagggcaagctatagccgatttcatagttgactatcgtgatgattcaatcggctcggttgagattgtgccatggactttattttttgatggatcgg

SEQ ID NO: 27074 - DNA, 4878 bp, Oryza sativa
tgtgcatcagtatttacaaaatccatctcaatcggcttctaggaaattaagatataaggcgttgaaatatactttagtggatgatgagctttattatcgaaagattgctggagtattgcttaagtgtttgagtgctgatcaggctaaagttgcaatcggcgaagttcatgaaagaatttgtggtactcatcaatcggctcataagatgaagtggttacttcggcgtgcggggtatttttggccgacgatgttagaagattgttttagatattacaaaggttgtcaagattgttagaaatttggtgcaattcagagaggcgccagcgtcggctatgaatcctatcattaaaccatggccgttcagaggatggagaattgatatgatcggcatgattaatccaccatcgagtaaaggacataagtttatattggtggcaactgattatttcaccaaatgggtagaggcgattcctttgaaaaaggctgattctggaggtgcaatacagtttgtcaaagaacatataatctaccgatttggtattcctcagactattacaactgatcaaggttcaatctttgtgtctgatgagtttgtttagtttgccaatagtatgggtatcaaattattgaattcttcaccgtattatgcacaagctaatgggcaagctgaggcatctaacaaaagtttgatcaagttaattaaaaggaaagtttctgattatcctcggcagtggcatactcgtttagctgaagcgttgtggtcttatcggatggcttgtcatggatcaatccaagttcctccttataagcttgtttatggacatgaagccgttttaccatgggaagttcgaatcggctcaagaagaacagagttgcaaaatgatttgacagccgaagagtactatactcttatggccgatgaacgggaggacttggttcagtcgcgattacgagcagttgctaaagttactagggataaggaatgtgttgctcggcattataataagaaagtggtacctaaagatttttcggaaggagaacttgtatggaaattgattttgccgattggtactcgtgatagtaaattcggcaagtggtcgccgaattgggaaggaccattccaaatccataaggttgtgtctaaaggagcatacatgttgcaaggacttgatggagaagtttatgggcgagcgcttaatggcaagtatttgaagaaatattacccaagtatttgggttaacgcataatcggctagtattgccgttacatgatagccggtgcgtttgcatcgccttgagatggccgatattgttatatcgcctttagttgttttattgtaatcggttgaggtttgccgatgtacaatggccgatattgttatatcgtccttagtggtttcatatttttatcaatgcttttgacattgtaaaactaggtgggcatatatatctatcacaatacagtgcaaaatttttgagcttctatcacaatacagtgcaaaatttttgagcaaagtgatattgcatattaatcggaatattttagccgattacaaaattatcgagataagtatcgcaggatagctgatatagctctctgcctaatttgttctacttcttctatggcttgggcatcttgagcatcggttctaggaatgaccttcagagatttggtcatatcagcaacattcttgatagccgattttaacttcgctttttgttcttcgatagaccatgggagatcggctaatttcttgttctctaaatccggttcagcattggattcttgaagttgtgctaagagttcgatcttgcgagcttcaagccggtcaatattggatttgatcgggccttcagataattgatcaagcttggatttttcttcatgaacaagttgccgattggcctggattgttgcttcgatgtatttgcgctcttgacgatcggctaatctgagcttggccttttccagcttaaattggtgttgctcaagataaaccgctggagtaaggatatcggctaactcatcggggatttgagcctggacctcatgaagccgagtcctaattgatccacagtcaactaccaagctgtctagtgatgatgtctctagccgatgagagatatcttcaagagttttcttcacatcatcagacaaaggagctagagccttgctagtagtgtcaacctctgtctcctcataaagataatctctaatatcaaaagagaaaagatcggctaagacctgcagtaatgatttgaagagagttagagatcaaataggcatagtcgatctgcatatgttagttataagaaatttactggaatagttggagcagttggttgaacttcttcttctatgtgatgactccctacagctgatggggttcgatggcttgatgcttgttgaataggaggggaaggaggctgaaaatagacaagtgttatataaaatcggctgaaattaattaatgaaagaagtaagattattgtaccggtggagctggtttagatgtcattggagtcgatttcttcttcacagcagccttccttttctgcaattaccaagtatgtgagcaatcggccataaagtgagatgattacaaaaatggttaaagaagggtgctttctcttgtaaaaggagttggagtagaaggagttggaggggtctgcttaggtgaagccgatggtgttctttcagtatcacttacttcggctacggcttgatcaacatcttctgcgatttcttcttcatccagagcttgttcaatggatggatctaggacaagcagatcatcagctggtttagctttcttttttattttcttctttggagctagagctgaagtatctacagccaatgatctggttttccttttcctaccagcatcgactggttctctgataagcccttgaagaagagctgaagtcttgggggcatcatagccgatgacaggaggagatggcccacgtccattaggaattaatcctggggcgtaggtgatatccctgccactgttgctttgacgaggaggagaggattatgttgtctacaaatcaaagaaaagattagttaagataaatcggctaggcagttattcaaatgaaatcaagtagagtcagagacttacttgagggacaccatctggaaagaggtcttgtcatgtacattgaagctggttggtggaatagatgcaacttccattcaccccaccatctatcaaagtttttgctcctgaacattgctagctctaggttttcaatgctgcccagagggggtcctggaaggttgagcagccgatccatcatcaaggttgatgaaatttcacctcggcattggatcttgtcagcaaagaataagccgattgggagttggcccattccaagctgtctagctgaactcattgggtgatagaattcgtaagaggcttggatgtttcttccttgatggatgccgactggaagaatgcatgggttgattgcagctgtgaagatttctctggatgtttgaaatctttcgtgattaatgtcttcaaatctgaaatctgatgggagttcaaggtctgctgaattttcatagggaaaccaaactcgagcgtctttttgaaagccttcatagaaactacagaaccaatctttgagcagttcggctgataactttgctccagcatcggccggtgtggatgcgtattctccatatgacatacatcggcgatgagtgcgttcttcgtcatcttctataattggctctaatattggaaattcagcttctgtgatggatggccgattaacaactttcatgactattagattcaaccaagtctgcagcagccaccatggtccacttgctccgactactgagccgccggctaacttagctgaagcattattcagcatttgatacaagtagccgaggaggattttgcctaaaggaaattgtttttttgcttccaaggcctcggctacgaactgccagttggttgtagggccacagcttgatccacaaaagaggaatttttccagccacatcagcagaaaggctacatgctctcgaggagtgacgggccctttacccatgtatgctgctacatagcctgaccaaccgcctatactcttggtcttgaaatcgtattggttcttcgtgtttaggctcatagggttagccgatgaggtgacatctagacccgtggtcataatgatatctatgagagttggggtcatcggcccttggttgaataagaaggcattgatagtgttggaccaaaagtaagaagcagctgccattagaggttcatctttggctgagtttgctatggttaggtcaagtgcttggctgattccgatttcgtcccagtgaactcttttgctagccgacatgcgcttgaaccatgtaatccaacttttctcgggtgaagttttctcaagggatggccaagatttgaaggtattcttccaatgattcagattagggttggctaatctaaaggggattctgttggtttcaccagtgataaaatcagtagggttaaggttgccgattgggccgagaaagtaatggttctcatgcgacaaactcggaatcgcaaccaggttggacagatgctacaaatgcaagtagggatggaggagaagaaaacaagataagacgaaagaaaatcaatctgctgcggaagaaagagatctagccggtgggggcttacctttacgtattcggccgatggcgcggcggatggattggcggaagtcgacattgccgcgggcggagatctggccggggacggaattgtcttgaaattgcctgtgcggtgaaggggatcgccagaggaaaaaggaagacgtggttcgcttcagcgatgaaaacggaggaaacggtgtgggg

SEQ ID NO: 27075 - DNA, 8806 bp, Oryza sativa
  unsure (1)..(8806): unsure at all n locations
aattcgttgcggagcaagcttctgattgcagggagttgcgtggactgacgtgccggcagctatggttctcggttttgggcacttgtcggcgaaatgacccattccttgacaattgaagcaacagatgtcttcccggactcggcattttcttttctcatttcgattcctctgtcctggcactggagttaggctgaaacggtaatcttggcggggatttgtgttgccttgatgcttctctccgttggaactggcgggttggttggccatcttcttcgtcagcagaaaactgaattgacaatcttttggtacatgatcagttccttcacaaaagaaacaagtgatcctgctcatggggcattcaccgggtggatggtcttcctcacaatgaaagcaggtagtggcacacgagctggcaacatgaccgacttctccacaacgagagcatgccttacgttccatttcatcttcatcatctgaggagacttgatctgaatcttcactatcagacactctacctccattagctaaaagatgctctgtcaactgttgtgcacctcggaaggaatttcttctctgatgttttgtcattcctggtggaggccattctgtgctggtaatgatcatcttacggacttcatcttcggttcgcattggtgcttttcttttctgctgaggacagttccttgcgtagtgcccttgctcatcacacataaaacagatgatacttgcttcttttgggtcaacatgtggcatggcatgaggggccttttgggatgttggcggtgcgctcactcttggggtgagagctctggactggcttcaactgcacttgaaggtgcatttgacttcggttcaaaaatggcattccaagcctgtgtgaaatctttattaaccaattggtcttggtaaatcaggtgttggaccactgccgcacaactggtgtctggtgcttcattcactcgggagcttgaggtaccaatgtcctgacttctgaccttattgcctttctcattgtcagccatctgttgcaaaggtttggagagggagagagggaaaacaaaggggagagacagattagaaactaaggataggaccttaacagatctaagtcttttgctgttatgatgtatgttaggcttattctgcaagttgattaagcaaacaacctagcatggttacatcacaccccactgatgcaaaccacgcgctacacacacaaacaaggaaacacacgactaacgactctaccctagagggtggcttaggttctgcgacgggttctccaagatcttcactcctgcttcacagctggcttcactgcttcctccacttcactagcagatcctgcagtcttctggagcttcggcaaacaactgacgatgtcctcttcttcactgacctgaccatctagtactagttgaaaatccgaagaaggaagaacggagtaaacattttgcaaatagcattaggggaaggagaaaaaaggaactttcacaaatagttttatttataaaatatgtccttaggttttatccacttggcttatcctacagtcgagatggctctgataccagcttgtcgcgaccgggaaaattgccttttcccgctcgctagtgtattaatccccgtcccaggaaaagccggggtacaccacacaaacatgatataaaagacacatctttattatatcgataatatttacattattacaaaggcacttaaggcctgacaatcaaaaataaacagcagcggactagcgggcctacggctccatcttcacaggcgctcaactggggtataagccaggactccacctaagacatcttctccaaagcttctcttactgaagaggggaaggattgagcaagaatgagtacaaccacagtactcagcaagccacaccggcagatgcatgattaatgcaagggggtacaaggggataataataggggttaggttttgcagtaaacagcatttaaaagtcacttagttgcccaaagccattttgtaaagacgatcctagagctacacagtattattaaacaaggccgtgaaccctcacgaacctgccttaacccaaggcctacgttaatttggaccgaactggcaacccgacctgggtcccagctcgtcccaagccaacccaggccaaccattccatattttagttgttgagcaaattttaagaattaaaacactgacttgggtacattgctcggcttgcccatatccgagggctcggctattcgaatagatttactctgatcagaggtgtacatctttacccacaagacacatctttactccgcattccatggccttggaacccgtcgtaaagatgtgacatagtttccaacccatcctagccttagacaagagtaccgacccaatcctacctacggccgggatacccgggacaggcaggcagaactgagcccctagcattgggcaccaaccctccgccgtatgacatctcgactaccgggccgcagctcgtgtagccttcatttgccctggagaatgtccatcgacgcccgacttcatccatctccaatccgtgtacctttgtttaagactagactgagccacaaactaagccttacccattagacatgtggttagtacggtagtgctttgcaacagaggcccgagcttaatccttatagtggccggggtgctacttcccataactggcatgcacccaaaccccaccgaaaacaggttttaggggttttgaaagaggaagagaggtgtatgtccaattccaccacaaaccaataattccatagtgtccaaatgagatgagaattcccaaagtctaaagttataaaaccacctaatgttgcctaattaatcagcgaagcatctacctaaattcatactagtggaaccaggaatagagtacccactagttggggttttgtttattctagggtgaacaaggtactaataacaatagcaataataatgtcataacaaaggtaaataggcatggctaaataaaacagtgataacgcgggaatttaaacaaagcgataatgcaataatttaaatcaaaataattttataaactgggattcaatatgctcaagggtgatgtgacttgccttgctcgctttcccaaacgccggcttcaacttccacgaagagcggatcgtccgaagctgcagcgtctacacgaccaacggaaaagaaaaggcttttactctaataaactccacacaacaagcaggaacaaagcacaaaaatgggttcttgacttcttaaggaaaaattagagacttgaacggtccaattccgagttcaaatggccaagttatggccatttgaagtttatatgctctttaaatggatatttacgaatttcttcatttaaattttaattaaaaatcggattattgcgtcagccgagggggcgggcgcgcggaccgggtccacgggagtggggcccacgcgtcagcctctcggtccacggtggaccgggagcacgcggctggcggcggtcggcgccgtgggtcccgcgcgtcagccgcacccgcgggcgcgggcggctgacggccgggcccacttggcagccgcgagggcgcgcccgcgccccgatggtcaccgccggcgaccaccggcgcggcggagcggcgcccgagagagcggagagaagggggaaagcgaacggcggtcttcggctcaccccgggacaacgacgacgacgagaacggcggccggagtgaagggaagcggcggcgcggtttgggaatgacgaatgccgccggttgttcggccggtgcgggcgaaagcggagcggcggacggggttcgngcaacccattcgggcgaaagcttgaatggaaggttggccgcccaatgtccgggaaggaaggacccgggaagctgacgacgggcgggcggcgaacggagctcggcggcgacggcggagagagaggagcacggcgcgggcacgaaaccgacggcgagagcgagcggcgagcggcggaaacggaagagcgaagcacgagggacgattttatagcaacgggagggggagagacgcggccggggagaagaggaaagccgcgcgacggagatactcgggcagccattaaagacgccggcgaacttcgcgggatgaatccggacgaatctgagggagagagagagggaaaagaaggggaatcgggagagggaaacgcggggagtaattcccctctctttaacgcgcgcggggacggcgggatgcggcggaatccgcggcggcggcggcgctagggcacgggcggcggcggcgggcgcggcgcgaggagggagatgacaggtgggccccacccgtcggcgagagtggcgggcgggcccgcctgtcagcggcgcgcgcgcgcgggggagaccgatgggccgcgggggaagagagagagagagggactgggccgagccggcccaagaaggaaggggggggaaaagaggacttcttttagggtttttctttttataaaccttttcaactttgtttatttcttttcaattattatttgtgctctgaaaattccactaaaatttgagggctccttttagaccaaggagaatttaacaaaaattctccgggtcacatttgaatttttcttgtacgtattttaaggtttgccaatttcttttcgaattttaattaattctattattccttttagcgaatgatttttatttcgggatgaatttatcaggacgtgacaacccccgacttcatccatctccaatccgtgtacttttgtttatgactagcctgagccacaaactaagccttacccactagacatgtggaagtacggtagtgctttgcaacagaggcccgagcttaatccttatagtggccggggtgctacttcccacaactggcatgcacccaaaccccaccgaaaacaggttttaggggttttgaaagaggaagagaggtgtgtgtccaattccaacataaaccaacaattccatagtgtccaaatgatatgagaatatcccaaagtctagagttgtaaaaccgcctaatgttacctaattaaattgcgaagcatctacctaaaattaaactagtggtgccatgagtagagtgtccactagttgaggttttgtttgctctagggtgaacaagggaataataataacaatacaataataatatggtcataacaaaggtaaataggcatggctaaataaaacagtgataacgcgggaatttaaataaagcgataatgcaataatttaaatcaacataattttataaactgggattcaatatgatcaagatgatgtgtcttgccttgctcgttttcccaatcgacggcttcgacttccacgaagagcggatcttccgaagctgcagcgtctacacgaccaacggaaaagaaaaaggctttaacactaaataactccacataacagcagaaacaaagcacaaaaatgggttctttacatcttaaggaaaaattagagacttgaacggtccaattccgagttcaaatggccaagatatggccatttgaagtttatatgctctttaaatggatatttgcgaatttcttcatttaaattttaattaaaaatctcatttattgcgtcagccgagggagcgggcgcgcggaccgggtccacgggaagtggggcccacgcgtcagccccacggtccacggtggaccgggcgcacgcggctggcggcggtcggcgccgtgggtcccgcgcgtcagccgcacccgcgggcgcgggcggctgacggccgggcccacttggcagccgcgagggcgcgcccgagggcggcctcgccggcgcggccgacgggagcggcgcgcccgcgccccgatggtcaccgccggcgaccaccggcgcggcggagcggcacccgagagagaggagggaagggggaaagcgaacggcggtcttcggctcaccccgagacggcgaaggcggtggaaacggcggacggagcggaagaagacggcggcgcggctcgggatgacgatgacgacggtgctccggcggtcggcgggcgaagcggagcggcggacggggtcggcaaccactcggcgaagacgatggaggtgacgccgagtcgggaggaggaccggagcgacgacggcggcgaaacggagctcggcggcgatggcggagagagcggagcacggcgcgagcacgaatccgacggcgagagcgagcggcgagcggtggaaacggaagagcggagctcgggcaacgtttaaatagtgccgggggaaggaaagagcggccggagagggaggaatcggtcgcggagatttcggccgccatagatgcgccggcgatgaatgcgggaaggaaatcggacggatccgagggagagagagaggggaaaacgggggaaacgggagagggaatcacggggagtgattcccctctctttaatgcgcgcggggacggcgggatgcggcgcaatccgcggcggcggcggcgctagggcacgggcgcggcggcgggcgcggcgggaggaaggcgatgacaggtgggccccacccgtcagcgagagcggcgggcgggcccgcctgtcagcggcgcacgcgcgcggggaggccgatgggccgcgggagaggagagagagagggagagagaggtgggccgagccggcccaagagggaaggggggaaaaagaacttcttttaggattttctttttataaaacctttttaactttgtttatttcttttcaattattatttgtgctctgaaaattccactaaaatttatttaagcattttaggcttttaggaaatatacaaaaatcctctaagcctcatttgacttttttctttgcacattttaattgttggaggctttctcatgaattttaattattctttgcacaatttcgaggatagattttagagtcgttttgggacgcgacacatgccgtgtgggtatggagtatccataatctccacaataccccacctaattgcttcatgtatctataatatatacctcctgctgaattctttattgatttgatttatcctcatgcccgatggtcatacctgaacggccatgctgggctgctcgcaagcgtacatatatgtcatgtcaagccaaatccaaatcatccatccaagggtgtggtaagtggtagcaaagatcaatattctaccttgtactaggtagtatatatctaaagtacgaattgcccccctccccccccggaactatcgcggtcgtccgaattagcccccagaacaacaaaaccaggcattcttcacccccaactatgaataccggacgaattacccctctcgacccaatccgcggtggttttggtctacatggcgtacatgtggcagtctctacatgatcttcccacgggataaaataaatatgatacccttggaatactctcgggtgaaatgctacaatggtatatccgtgcgcttgcggatgaactctgtaaccataatataccagaagtatttctgcgccattgctgggaattatatttctagtaatgtcattaagaaataccaacagcgaggacgtggcctccagcgtagcggctggcacgacgacactcctccttcaggctgatgtcgatacgctgtcctataccctcgagctgagcacacgcccccctcatccaaggcaagtagcccgtcgtactctcctcgggctccgggcggtcaaccttcaactgacagcagatatcagccatggcactgcagcagctcttgagatacgagttcacccagacctcgcgacctcggagggcctccatggcttggtccttcttcacaaccacgagtgatcgctccagttcggtgatttcaaacttcatcctccagtagtcgatacgcctatcccgttcagcgatgacactgtcaagatctgcaaagggtagaagatgtaagagatgctacctcttaaaaaaaactcgcaagtttaaaagagggatttctctaaaacatcacacccggattctcacgtgggagtccgacttcgccagcctcaggcgggcagaaagtcgcatccaatccaccgtccttgacggcatcgctcggggaaggcaactcgaccatctcgacatcaggatctccgccttgctggacgttctcgggatctacataactacgggagacaaaggaatgcgatagatcaacaaatgactcgtaagaggaatctactgcgtccataaaacaacgaaagcgtttttacaaagaccataacacaagacggagaaaaattactcctcaaaaagagggagaacactctccccgagatccgacacgctctccatcacactctcccgcgtggcattagctgcccctttcgccaagatgtccttgaggtcagcgtcgggaaaagcgagcttcactcacgcaggacgtgacacgcccccatgtggattccgttggagatctcctccgcaatatgggtggcgtgccgtgatgggatggtctccatctcgtccacaagctctgacaacgccgacgtcagcgacttctcgtcaggatgcgtcgggatggaagacttcgccccgcacgacaaacgccagttggtgcagccaggtgaaggtcttgcggagggagtcgcggatggaaaagaggttgtcctatgtatcgttcatcctcttctctagaccttggcgctgcatctcgttgccggccacgagttccatcatcttctgaaggtcctcacgggcgacttcgagctccgcctccagttgcgctaccctttcgtctgccgccgtcggacgggcctccgcccgatctatctgggccgccaccacccaagagctgttgtcgaggaggcaatgg

SEQ ID NO: 27076 - DNA, 6523 bp, Oryza sativa
tgactttagcttcagcttctctcaggatatcagtcccgaacacttggctttctccagcttggtcccacaagagtggtgtccggcatttgcgcccatacagcgcttcataaggtgccatttgtatgctggcttgataactgttattgtaggagaactcggcataggggagactcttatcccaagtcttcccgaagtccaggacacatgcgcgaagcatatcttctaagatctgatttagacgctcggtctgtccatctgtctgcgggtgatacgcggtgctgaaatttagtcgggtaccaagctcttcttggagcttcttccaaaagtgagaggtgaattggcttcccctatcagatacgattttcttgggaacgccatggagactcacgaccctagcgaagtagagctccgctagtttattccctccataggtggtcttcacaggaatgaatcgagctaccttggttaatcgatccactattacccatatagaatcatatccaccttgggtttttggaaggccggggatgaaatccatcccaatttcatcccatttccattccggcacttggagaggctggagaagtccagccggtcgctggtgctctgccttgacacgctggcacacatcacatagagccacaaactctgcaatttcccgcttcatgctgacccaccagtatttctccttcaagtctaagtacatcttggtactgcccgggtgaatggaataaggactttcgtgagcttcctgaagtatcagctgtttaagttctctgctatctggaacgcatacccgctttccgttccataaggttccgtgttcatcctctgtgaaaccagcggctttaccctgtttcatattcttgaggagtccatgcatgtccggatcattcttctgagcctcgcggatttgatcgagcaaggtgggcttggcttccaacgcggccaaacatccacgaccaactatgtttaggttcagggcttccatctgttgattaagctcgggtggaatgcctcggacgttgagagtattgcaatggctcttccgacttagagcgtcggcaaccacgttagccttaccaggatgatagtgtattcccacatcataatccttgatgagttctaaccatctcctttgccgaagattcagatccgactgggtgaagatgtatttcaagctcttgtgatcagtatagatttcacagcgattcccaatgagatagtgccgccagatttttagagcatgaaccactgcggctaattccaagtcatgcgtagggtagttgccttcatgaggacgtagctggcgtgaggcataggctaccacatgaccgtcctgcatgagcacgcaccccaatccttggcgcgaagcatcacaatacaccatgaaatccttgcgagtatccggcaagattaacactggcgaggaaaccagcttttctttgagagtttggaacgccttctcgcattgcgggctccacacaaatttctcttctttcttcaacaactgtgtcatgggtcgggcgatcttggagaagttctcgatgaatctccgatagtatcctgccaaacctaagaaactgcggacttgagtaactgtcttgggttgcttccaatcggtgacggcggtcactgtttcgggatccacagcaactccttttgaagatatcacgtgccctaagaatttgacttcggacaaccagaactcacacttgctaagcttggcatacaattgatgttcccgcaactttcccaacacctgacggagatggtgctgatggtcttcctctgattgggagtatatcagaatgtcatcaatgaaaaccacaacgaacttatccaagtattccatgaacactttgttcatcaagttcatgaagaaggcaggagcattggttaagccgaacgacatcaccgtgaattcatacagcccgtatcgcgtggtgaatgcggtcttcggaatatcttcttcacgaatacgtaattggtgatatccggaacggagatcaatcttggagaatacagtggcacctttgagttgatcgaacagatcatcgatccggggaagagggtacttgtttttgatggtgacttcattgagagctctgtagtcaacgcacatcctcttcgttttgtctttcttctccacaaaaatcacaggagcaccccatggggaagtactcggacgtatataccccttttctttcaactcttccaactgtttcttaacttcggccagttcatttgctgccatacggtagggtcgcttgtacagaggagtggttcctggagcaagatctatccggaactcaatctctcgcttgggcggcataccaggtagttcttccggaaacacgtctccgaactctctgactacggggatttctgacagttctatctgatgaagttctgaacttctgacagaggttgggggtgcaaagaaaacaaccggttgttctggtcctcggtacagagtgacagtgcgcctcgcgcaatccactaccccttggaattgggccaaccaattcatcccaaggatcacatccaagttcttggtatctagcagaatcagatccgagggaaaaggaatcccctgaatttctatagggacggcagggctataatactttgctgtcataacccctccaggggtggtgatgagcagagggtttctaagcctttctacccccaactgatttctccccacgaatggcacagatataaacgagtgggaagctccagagtcgaacaaaattgtagcagggatggaatgaacgaggaacgtaccaacgatgacgtcgggagttgtcagcacgtcctcggccgtcacgtgattcacacgaccacggatgacgccctggccaccgttgttggggcggggaggcgcttggccttgctgacgccttggcttcgggcatttgtccgcaaagtgcccgggctcgaagcagttgaagcacagacgctgcggacctgaagcgtccctgcggccttgaacgggctgcccagctggcgtaggaggacggggcgcacgagtcccttgttgattctgttgctgctgcggctgtgggacgcgcaccacgaattgaggtcggggcgctgggcggggttgctgctgctgttgctgcgaggaggatccccctgggtagggattggtgtagcgaaccctctggttagcaccctgttgattgcggaaattcgccaagcggcgcttgtgcgattccagctccttgtgcttggcttccaagcggatgctcttgtccaccagtcgttgaaaatcaggatagtccccagagactagacggacggacagctcagggtccattcctgccaagaacttctcttgcttctcctcatcttcccgcacatcctcaggggcgtaccgggccagattgttgaactcgtgcaaatactccatcacggagcggttgccttgcttcaactctcggaattccctcttcttgagagccacgactccggcgggcacatgggttctccggaaagcggcggtgaagcgagcccaagtaatcggttgtccctctggctgcgtagcctggaagtggtcccaccagagagatgcgggtccctgcagctgatgggcggcgaagacgactttctcctcatcgctgcactgcaccgtgtctagctttttccccacggcatgcaaccaatccaacgcatccacggggttgttggagctagaaaaggtaggtgggcggatgcggaggaactcggcgagtttagagtgttggggagggggtggtggagcattctgttgaggtggattctggaggtggtggaggaaagcattcatcatgttggcttgttgggcgaggatttgggtgagaatggcgttggtgtctggtggtggtggtggaggtgggttgccttgggggttggggttgctgccctcgggttggttgccttcaccggtgttaacatttctcctggtcgtcaccatctgaaaaccccacacagaaccagcaaacagagaaggagctaacaattaaaactaaccacccacgactaccattattcttaaatttatcactgctattaagttggttcattaatgttcaagttgcttaggcaaacaaataaagacaggctccgacatagttacaccacacaccggtgtaaccatgccccacacaactcaaaaagacaaacgaggaaaaacacacgcgcaagcctactaactgctcgtctaccgctgcgacgggccaggacggaaggtgagcaacagcgcaccctccgagctaccaacgccggaggcttccccctcctggggaaccacgggcgcaggctcggcacgaggggtctcgacgaagcaggtccacgccagggactgacgaacaagctcgggcctggaggtgctcttgcgggcggtgatcttctggctgcggcagacgcggcgacgcttgggacggctgtcctctccctgggcgatcttgagctgatgcagctgcgcctccaacgcgtcgaggtccttcttgagctgcaggttctcctgccgcagctccaggatcttcatgttgttctccaccatgccacgacgcaccatctgatggaagtcaatacgagctgcgtcgtatgcctccaccatgcgtgccagatgcacgacggtggcgtcatcctccgagctagcatctcggaaggtggcgaagtcgcgggctcctccgcgacgagggtggtagcggtagggcgagtgctgcaactcgtccgggtagcgctggtgaagggtgccgatggcgaggagagcggcgttttggcaagcggcggggaaggagtctccgcccgcggtgactgccagcgaagtccgctcgggagagccggagaggatcactacagtgacctcccaaccagcgtgaggctctgcatcctcaccctcctgctccgggagcggcctggcctggtaatccactccatgtggataccccaagaccacgcacatgccccgcagctccaagacgaagccaatcatgtccaaaccacgacgggtgacgctgccggccatctacaaacaaaaacaaaagaaaagcaacattttaaaggccagattttgatgataagtgaagcagcaagacaaagagagaatagcgggttttcacaaataataaaggatttttatttttgaaaatattgctaaggcttgggatctacggctcgtcctagggtcaagggaggctttgataccaacttgtcacgaccggaaatcacccaacaggcgctcccgacgtgcgtgtattattccttgtcccaggaggcaaggtacaccaaaagttgatacaatacagagtttaacaagcggaagcgtatataaaattattacacgggcaacaacggcccagcacactcaaagacaacgaaaaacagcggaagactagggcgacgaccacaggcgcttgacggcaggcacgagctagacaccaaagccttcatcttccaggaactcctcatctgggcttgggaaaattaagaaagactgagtacaaccaccgtactcaacaagacacacccacaaatgcagaataaatgcacgggagtacaagggaattataatataaaggggtagggttgcagtaaacagcatttaaagacatttagttgctcaaagctattttgtaaacacgatcctagaactaaacagtattattaatcaaggccgtgaacccacacgaacctgccttaacccaaggcctacgatgattcagaccgaactggcaacccgaccctgggtcccagctcgtcccaagccaacccaggccaaccattccacattttagttgttgagcaaattttaagaattataacactgacttgggtacattactcggcttgcccataaccgagggctcggctattcgaatagattatactctgatcagaggtgtacatctttacccacaagacacatcttcctcacgtgtaaccacgtgccacataccaccacggtatacagacggaagacgtgacatagtttccaacccatcctagccatagacaagagtaccgacccaatcccgcctacggccggaacccccgggacaggcaggcaggactgagcccctagcagcagggcaccaaccctctgccgtatgacatctcgactaccgggccgcagctcgtgtagccttcatttgccctggagaatgtccatcgacccccgacttcatccatctccaatccgtgtacttttgtttatgactagcctgagccacaaactaagccttacccactagacatgtggaagtacggtagtgctttgcaacagaggcccgagcttaatccttatagtggccggggtgctacttcccacaactggcatgcacccaaaccccaccgaaaacaggttttaggggttttgaaagaggaagagaggtgtgtgtccaattccaacataaaccaacaattccatagtgtccaaatgatatgaaaatatcccaaagtctagagttgtaaaaccgcctaatgttacctaatttaattgcgaagcatttacctaaaatttaactatggtgcc

SEQ ID NO: 27077 - DNA, 3181 bp, Oryza sativa
agcgaagcagaagcctggtgatcgacaaatggaccgattacatccatcaacggccaaatctgcaagggttgaagtcactttggcccttcaaaggaatcagagatacgagatgtcccggttctcgcttacattgatggcggcagccttctcggccgctgacttatcgcaaagcgaggccggcacctcttcggccgtggaaagcgcgctgatcaggacctccctgactcgctgcgccaccgtgtcgtcaggaagatctgaaataaaaaagatgcaaggaagtacggttagatctcgtctatgttttcaacatcaggagcaagaataacgtgcaacgcaaggatgaataccccgtgaagaaatccgagttacgtcctcggttcccgcgtagtcgaatgcggggtgagtgcgggcttgcagcggttgatctgacgactaacgaagtcgtcaacgacttcatagccagtccatcctcgctcgcgaagaccgctcacaatatcgacaaaggcttggagagagggcgtcatcggaggtttggaggtctagtcctcggagcgatctggttgaacctcgggtacgataagaaccgggtcgagttcttttatttcgaggtagaaccatctcgtcctccactagctccgggatgagtggcattgaagtgggatgtatctctccttcatgccatcacgaaggcggaatccacaacatcctgaaacccgattgggttccatccaccagagttcatagaaaaagtggaaaagatcaaggaaaggcactaccccaatgtaggcctcgcaaagatgaacaaatatgctcagaaaagcgatggagttggggtttaggtgtaaaagagaaatcccgtagaagtttaagatcagcaagaggaattcagaaggaggaggtagaaagccacatcggatgaaatcctctaccgctaccatgcgacctaaaatgggagaatgaacagtacctcctgcctccctcgccatggtttgctttggagggatggctccttcggtgtacagcttcttcagtgtggcggcatcggaggaagattgctcgaggtccgccattgggggaggatcgccggaagaagatcactggtgaagggcgcaggagattagggagacgtagagtccggggaagcgggggaacaatgagagttttttggtaaacggactcaaaatggatcccaaaatcccattaaataagcgcactacttgacggttcgcatttcgaggaaaggggagagattgccaccgaaaatttctgaggcccattgaggaccattgttcagacttcaatttaaattcaaaacccgcatagataggctccctaagagcgttatcgataactctatatctctacggttatataaccgagattgatctaacgagtacgacaacgctctattaggagaagtcgcatgcgaggacatgaattcatttaagttgaagtcgggggctactgtcagggttacggataaggcataccttctatccaacaatttatgaaatataccaataaggtataccttcaagtatacggttggttcccatatacactgttagtaatttacctcaaattatggaaaatatctccacgaagttaagggattagagaagtcctacttggaaagggtaaaatctctagtatatcgtgtcggtttacatatctccaagtcttacttgagggtcaaggtatcccacgatataaaagggacccctagggagaggcgaagggcatcgcacctcatcgccaacacacccaccaaagtttacgaagccggagtccacggagccaactcgccgagagatgccgtcgaattcctcgactacgatctcatcggcatcgcgtattcagttactctttttgtaatctgttctcatcatcatcaatcccatataaactggactagagctattacctgataaggagcatgaactagtataatccttgtcttttgtctgttttgatgtcgtactacgtagatccctgttccaacgtaccccaataccctattcttccgatccgcgagtatcactcgtcgacaaaagcttttctgccagattatgcacttgatgaggctccatgggagataaggctacataaatggtacatggaagccagcaagaaaggcctaactaatctaacaattcgatcactggcaaaaactttagcctgtgaaggattcatttggcttgatttcaatgatctgcacgccatccatcgtcgagaaaagatggatgtaaactacgttgttgcatggtgcttgtgagtatgagtgtttatttattgcatgaataagtatgtgatcaattattaacaaattgctattatagtatgcaaaacatggatgctgagaatttagggaaacctatcggatttctggatctaacaaggatctgtcaaactcagcataccgtgagactatcaccaaactccgagcagctcaaggacaagactcctacagagatagcggaatacaagaagagcttgcacaagtagaagatgattattgtcgtacagtatattggacgagctttcttgcacttccaaaataagagtcatcatggttgcgtacaacttcaagtaagtcaagtatatttcattgtacatacctgtgttatttcatatgtgactaactgcatcgccattatgtagcgatcattacatatgtttcattatctacccgaagaccggcatagtgacagtcttggacccccttgattattctcacaagacatataaataatttctacaaatcttacaatagtaagtgattctcatacttgcatgcctactattaatgtattataattaaataacggtccttaatgcgaaacggtaaaaaattccatacagtgcgtataactactacaagttcaggggtggagaacaaacaaaaacaagggagaagcttctagtatatatgtattggccggtacgtaatactaactcacttaatgcatttcaatagttttactcatttcaaaatttaactactttcttctatctcatgaagtgtcacaagcaacctaagggcactatcatctacgggtactacgcaagcaaattcctccgggttaatgggaggtacagggttaacgcagaggatgtaagtctctcaactcaacgtacaagtgtattggagaactacacttctagatcgtactaatgtact

SEQ ID NO: 27078 - DNA, 5160 bp, Oryza sativa
agcaacctaagggcactatcatctacgggtactacgcaagcaaattcctccgggttaatgggaggtacagggttaacgcagaggatgtaagtctctcaactcaacgtacaagtgtattggagaactacacttctagatcgtactaatgtactatcgttctttcagttgcctagaattgaatgtcgaacaaggattcgacgatatgagtattaaaaatgtgcaacgggacctttgccaattcatccaccatgagtgttgtcatgtcttaggcaatttatctaccgcgagtgttgtcatgtcttaggcaagtttttcgacccagacagcatcctggtttcaagcgatgaatataaggttcttcgggagtggaataacgcgatgccatgatgtgtttattagttatagatgatagtgtgtattcgaagtggacaatataaactaatgtacaaatttttgtatgatactttgaatgcaatacatatcagtattgaatgtttattagttactatcattaattatgaattaattaattacaacattattcaaaaaattattaatacaatattgcggctattttcaattcttattgctaatttcccaggcggtcaaatcctatcttcgtgggcgggttttttatatcttcccaagcggtcctcctagctcccttccgcttgggaagatgacgttcccaggcggaccggccacccgcctgggaagataaccgatcttcacacgcgattgcctacaggcggaacaccggcccgcctgggaagcccattttagcccgcctgcaaatattccagtagtgttagctcgattacaaagcacacatacacaaatcaacctgcttatatccatgttactgcatagactttcttgtatttctgcaaaacgcgatgtgttttattacaggtggttatattactatgagtgaatattatcttactgcaaaacatgattttcgtcgtcacttcatgctaaggccattataatagatttgtaaaagtattattgctcaacatatttttatttgataacgacgatggagtatgcattaaaccttcttaaaagaaaacacgcgaaacttattatcatcgttgtaacttcatcgttgtaccttagcataatgtcacgatgggattgtaataatgtgacaacttgattgttaccacatgtttttacatgtttttacagtaacactcttaagaaaagaaaatatgtaacatgctatgttcctgtaaaccttatagtccgtactgcactcctgtagtaatatcgcaatgggattgtagtaacgtataatagacagtactgtagagagtataaatttttttaaaaaagaaaatctttgaagaacaatatctctcacatgatgtactaattctttaaaggtttgcaccatgttgctagaaaaaaaatgtttatcaaaactatattcatcatgactatatttgaactatagtttagcgtcgttactgcaactcgaataatcaaagtttcaatttgaatttgaaattaacttcaactaaaaatcttaaactttgaatgaaaaattgaaaactttcaaccctaaatttcaaactttcaacttatatttaacaccttctcagaatgtttatttattattgtattataaaaaaaagtatgcttgatattcatcattagcgctaagcacgattagtgctaagcacgtcattagcgaacgtgcgcgacaggagagagcgcagaccagcgggaaaaagaaaaaaacgtggcagcttattgggctttgtgtgggtcgtgggccggcagaaatgtagcgcccggcctgcggagccttgccataaaattgtgagttttagggttttgcacttttgctcctcatctcgacgccgccacgggagctgctcccgcttctcctccgtcgctctccgccgccgccgccaccgtcaccctcctcggcctcccgctggtctcctccgtcgtcctcctctgccgccgccgccaccgtcaccctcccttcgcatggcgatgtcgagcgtgaggaaagccttcgtgcgcgccgcaggggtacctagatcttcctctcctccctccctccctccattcttccccctcaatccactggggagagacctaacttaatttctaatacctttttacaggggccgatctcctccttcgctgagaaacggggctcgttcttctccgggccggactgtggaggaaaatggctggaggtctgcataatatctttctctcttttgcataacaaaggtcgatttgcttggagattattcagtgagtaaattgcatcttagaccactttttcttgccattgttgcaacttggactagggaaaaacaaacattttcactttaaaccacctatctttaccggttgtgcaagttaggctagttcttctacctcctgctaaccagctccctcttctcctcagttctctccctccaagggcatttctctctctctctctctctctcttctcgtatcaccgaagccagcgagcggtaaccccatcatgaactgcgccactactcctataggggttgctgctgttggggtgaacacagtactacatcgcccccaattagtacatggtttgacccttatagggggatgatgcaggataagctaacccagccatggtgacagccatctcgtggtgttgcacaaattggacgttgtcgggcatcacaacgatgttttccttgtagatgactgttaagatcgtcatcctgctgtggccctgaagcaatccagtcgatggcagtggacaacggctggaagaataaaatccgtttggagtttgttatgcatgcacgagggatgtggcgagctgcaggttgtggcgactgcgtcaagcgtgcgttgtgggcgtgagttttgtgcggcatgcgcaacgttgagtccaggagttccggatcgtgggatggcacgatttaggcctaggattcttttttctgttttggagtataagtagatttccatttttgtagtttacagataagttcaatgagaaaaccccagaaaatcgccacacaaagctagtgcgtttcgttgtttctctgaaactctccatttcttgttactctctgttcttctcgtttgcttgccggatttaacacagtgctgttcaatactggttcttctccaacaatgacgtgctccagcaacatcacatatgaattcacggcgcggtagttgagctcgatcattacatccacatggcaatgaggaatttcttctgccctttttcttctttttttctgtcaagtgcaaccattgtgccgaagctggtgccggcgttgaagctggtaccggcggagttccagcgcaagcacagcactggtgggtggctgctcaacctgctcacttgtagtggtggttcttcctacccatgagtggagagagaggagaaagagggggagctagaggtagaagaaacagtccaaactgaaacaaccggtaaagataggtggtttaaagtgaaaaaaaattgtttacccctggtccaaattgcaacattggcaaaaaagagtgccccaagatgtaatttactcttattcagttcattttcaaacaaaaagaaaaccccccaatgtgaaggtgttgtttagtttgacaccttatcaaatttgcaagctcttgtagctgagaagaaaataaatgaaaaaaaaatcaaatacaacttgggatttgatgatagcacttgaatacaaatgttttgttaccaacatacctttgatgtttttatttgccctgttctctcccttgtggttcttatcaagccagtttctttgatgccttgtgcgtctcgtgcgaacgtcctttttctttaagcgtgcatcacttagcatttcaatctgctgagcatcctctaggttaggacttcaccagaattttctaggattacttatgtgggaaatccattttttcttcaatttcctttttaaggatgttcagtgcattatcaactagcaaacaacattctggaaaactggccgcttgatgcgccaaagtgagaaatttatgagatagggatttgtagtgaagcatagcttccaactttggattttcgattatgtcgttcctgggtgtcccttatagttacatggcgtgcatcccatgtccatcgcttcaatatgtaatgtgttggcaatatgatctcttctttcaggatgccagggaatggtgcgatcgctggcaatctgttggatgggcaattggctcattgtgtgcaggcgcaggagtggttggtgggattgccgcgaggtacataaggcatgatgtcgaggcatatgttgatgggaagatagcgcaggtcgtatcaaaaaatgatgagttccgtgtggctgcgacaaaaactcattacgactttcaacagaagatcagtgacctctttctggagtatcaaagggagttaaacatgttggctaagagtcacctgcagtttcagagagacatgatgaagctggagcattccatattccttcttcccaatgtaagcaatttttactgttacttctacatctccttttactaaatagtggcaacactttactcgagcacaccacttttagcaatacttgttttcctctccttaagtcacatcaccctttactaggaaatttaactatttgccacttttacgtttgccaattgttcaaataccccttttaggtttgcaattaactatatgccactagagagaagattttctaattttttttgccacttttcgcactgtagacagccacatggccttgccagcgtggaataggcacctgaaatgacaagtatacccttggtagcaattggctgcaatatagagccgaatctgaaacaatatttgggcaaaatgataaacttattactactagctaaatgtataattcatttgactgaaaccatacatatataggactgcaagaacaatgacatttttttgggcaatgtataacatatacaagttgatgacaacacatatatgcacaaggattaatatttgtcagcatacatatccatacatatatctcaacaaactgaacatgcacacaatagcagaagtgccttaattcatcacgtcccatccaaatatcttaattcatagccatacaattcctaggttcattgcaggccacacattatcccaaaagtagg

SEQ ID NO: 27079 - DNA, 6895 bp, Oryza sativa
gtattcgcttgaacatcaactgcagtagcttgggcatcaatggcaccctttgctctcttccttcctacatttgtttttgtcttcttgtttctcttcctgcaaaacattggttaggttaagcaatacattgtacaatagctaaaagaaagtaaatcatagctgaactaacctcttcctagttccagtcagttcacatcttacactacctttcctatatccaaactgttggcagtctggacattgaacttgccttgtggcctttcctttgcccttttcaagagcagatgggatcctattctttctctgcctacccattcctctcttcttgggcacaggtggcaggagcttgaaacctttgtcaacttttggccactgcttcttgtctgtgatgttagggataacacaggaaatttaactatttgccacttttacgtttgccaattgtcaaataccccttttaggtttgcacttaactatatgccactggagagagaagattaatgtgtattcagtggcagctcataatgtgtattcagtggcagctcataaaattttttgaatccgccactaatcttaggtcacatgcaatgctaatctgttatccttttcgtttcagtttgctccagaagaaaagggacctgtgggtgctgtgggaggtgacaggggacctgtggatgctgtgggaggtgacagggaaccagtgggtgctgtggggggtgacaagggatctgagggacagctgaacctgtaacattcaaaagctgattttggtggaggggacttcaactgatgcaaggatggacctgagtgtgcttcttcaactgaagcaagggatgacctgagtgtgttttttgggctgcttaaaaaattaggcagttatgtgacctagactctattccagctcacgtatgtgctctgtggttgctgatctttggacccaatttaaacaatgggaatgtgggatggtcaaaagttaacttctatttttaacaatcaagctgtatcgaaaaattcgcaggttacaatacaaagagaagtacaaaatctaatttgagaaacctctcagtttagatttaacgagcaggaaatattttgtgcactcgagccctcacgtgtacacaccgtgtacgtcaactaacaaacgcttccaaaatatctagaaaaaaaatatacatatactttcagtagcattaggtgtaaaatctcaacctaaaatttattatattttggaaaaaaaagaggcagttttaaggttataattctatcaaaattttatctttttttttactctctatatagaatgaacttgatgcgattttacacgtatatataatactattggaactacatatgtatttcttttttaagaatttctggtgatattttttagctacggcgtgcacacacgagagattgtgtcataggatacactctaacgagcgacactcatatgtgagaggagtactaatacacgtgcatgccttttttttattaggcatgcatgtcttttttttttctttctataaaattttctcttaaattacatatccaatctacaattcgattacactattaagtttgtaacaagatattacatgatcaaattatgatgaaaatatatttatatttgtaaataaattttattatatttttaagttacttttaccatatatataaattaatttaagatttgattaaattacttcttatacatttataatgctctaagttgattatgcttattattatttttagtcaattatataatttgtggactctaaatttaatttttagatataccatatttttctccctacaacgaatttacctctaatgtgtaacaacttacttccattttgtgctaagttgtttttatgatttatgtaaattacttttatactttattgaatttactttcataaatgcatttacttaaaaattttctctgcactttgcttgtgaatttactctacatagttcttatttcaactcagtcataatgtaattatttctaggaaaaaagtacgaattaccccttgatctatcgtggttgaccgaattatccctctacacttaaataccagatattttacacactcaactattgaaaccgaacaaataatcctcctaactcagtctggtgtggttttggtcctacgtggtaatccagtcagcatttttttattaaaaaatcggtagggcccacctgtcatactctccctcccctctctgtatatctctatccctagcttccttgatccctttgctgaagcgcatggctagatgcatcaagcccgtcgagctcgctagccgggtgtaacgtcccgattttcgttcaggattaaaaatcattacataatgcattttctagaaattaaataaaagttaaagcaatttgatcaagtgaaataatgggagaattaaaattttctttcccttctcgggccggccattctctccctctcgggcaggcctcccctcccttggcccgctcggctccctctccctcaagtctgcaatgcctcccccttggctccttcctctccccaagccaccgacagtcggggcccacatgtcggttcctcccccaacctctagctccccagccgaaactgccattgccgcccatgtcgcccccgattctggcctctcccgctcgcgcccttgcgcccaaaccacgtgggatcagttcccctccaccccctccaccaaatcccccacttttccccaatttttggcgccaaatcgagcccccactccgctcacgttgagctccacgtcgccggctgttgccgccccaaattcgccgctccccggctccccgttgctccctcgcgctataaaaagccaccccgtgctgtgcctcttctgtttccccctcctcccccgaggtcctcgcgccctctcctgtgcgagcccgcgctccgccgctcaccaccgtgcctcagccgccgctcggttgtcgcctcccgccaccgaaatcaccccttcaacgcgtacccgaggcacctccgccattgctgcctccggccgcgtcgcgtcgcctcttcgatcgacgccgacccatgccaccacctccttcggcttcacaggagcgagagctacctcggcaaccactccccgtcaccggaatcccaccggaacttggttcccctcgctcgccgatgagtttcaccatctcttcctcctctggtcggcgtttctcgctgcgccgcaactccctcccctaccctaaccttccctccttgttccccaggtccttccggccgccgtccgccggttcccgctcacggaataccgccggaccgccgttgccgtgccaccccgaggagccaccgccgccttcccgtcaccttctcgccgttgcgtgagcacggtgagcactcccctccctctccctctatctccccttcaccggccgtcctatgccgtgtcgccgccgccggtggccgtccggccaggccgctgccgctgttagccgctgctcggccgggccggtctcggccacacccgtgccttggctaccctgcccatggccgcccgtggaccactcccgtggtctcggtccatggtgccgccccgaccgcggtggaccgtgtccaccgtgtgccctccccttgtgccgctgacgcgtggggcccgtctgtcggcgccggtcctttgcttacgtcagcgcttaacttaccctttgagaaaataaataataattgcgcaataagtcgagtttaattctataaatacattaaaatggctcaaaacttctaaaattcgtatctaattcatacgaacttcaaattgggccattcaacttgcaaaattcatccaaaattgagctctacatgtttgtttacttcttatgtactatttacttggtgtttattagagtttttcctagttttgcatgccagcgagtagattccgccatttcggaagtccgcggtcgcgaggaaaagagttcagaagattgtttgaagaatcaaggaaagtcacacattccccttgagcattttgagcctaatttataaatgttgtatcatttggaaataaaattgcatgtcttgctaattacatgggatccgggtattacctatctgctcacttgtgccatgtttacttgatatccgtcctttgctaaacgtgggtgataattcaactagcttgtgttacttatgttgacctagctagactcatatatgcttagccatgcttaattaccactagctcacaaaatgggataattacatgattagacatctagtatcttgatgagctgcgtgctcgaggcatccggccatgtttcatggtcgtaattattcaactaaaatgcgactgaatggtgggctgtgggtgcatggttttgcttgtcgcacccatggcaataattaaggaccggttcacgggaaaccctggaagacatatagtgcttaccataagcgggagtgggtaactgcttgatctgaagtatagctcgaccctttcctaggcaccagtggcgagggtgggcgtaatggagttgggtcgcccgaggtgtccggttgtccagttgccggattcaccgcggcgcacgaggggactgcccacctccggggttgggggtgggggtgaaactttagcgtggtgtggatggttatgggagggttatgcgaagggtcttgtcacaatcactcgacattgtgacgtgtctgcgcaggcatggtgacttgccggtggattgtgtcttgtgggtacagttgtgcacctctggctagagtaaaactattcgaatagccgtgcccgcggttatgggcgatcgaccagattcaccgtgattagtcccatccttaataattggttaatgaactggtgtagttcaggtggtttggttgggcctgttcaacgtggtgtagcgttgatcggtggagatccaatgttactttgatcactcaacagttttactgttttactcaataaaatgctttacatccgcctctatgcaaatagtgacaaaccgttcttgtatctccttgcacgtctacatcattggtgtggcttgctgagtactgtggttgtactcagccatgctattgttccccctttttagaagtgtagtgcttctgagctgaagacgaagttagagtaccaaggcttagaccccggttgagttttgcctgtggagtagagctgaagccccgctaggatcgccttttttcgctgtcgtcgttctctttcggtgtgaggactaagtgcctcttctgtaagtattttacgctttatttatgtttggaactgtatattacttgtcgttttgtgcaccctggctggtcctggatagggatttaatacacaaaatagtctagaaatttgggttaaatttcttgacgtgacaccgggccacctcctcctcctcggcatagcagcacatcgtgtggaaagtattggtggaaacgatcgtgtggaaagtattggtggaaacgattgcactgatcctgtgtgtcgccttcgtgttgatatatatgacatgaaaaaccatgccgtggcaatgcaaagaattgcgcagctaggcaacaaacctagccgacttacaaggagatggattacaggcgataatggataaggcaacaaactctaacagatcagccattatcgcatgtgataggatcggttaaaccagatccaaactaaccttatcatctaacaccctctctcaatccaaaccgtgcaaggttcaggttgctcttgaaattctccaacagtcgcacagacaaaggcttggtgagcccatctgcaacttgatcattagttgatacaaaatcaatttctaaaagcttttgacttacccgttctctgacgaaatgatagtcaacttctatatattttgttctggcataaaacactggatttgctgacagatacttagcaccaaggttatcacatcatatcttagcagctctaggcctcttgactcctaactcagtaagtaaggttatcacacattatttctgctatagcatttgcaatggctttatattctgactttgtactatacctagacactgtggcttgttttctagcactctaagaaaccagatttgaccccaagaataattcggcctctgaatcaattgtaacgtgcccccagcttcctatctgggaccagtcaaaccggccacgcaatgccggtcagactgccctgtctgcacggtcggaccggccacgcaataccggtcagaccgccgcgaccaccggtcagaccggccgtgcaatgccggtcagaccatctctggtctgtggttttgccaattttgcccaaagatttaaagtcaagcaccggcttttctaatatcaaaaataccccattcttcacattatagccagatgcttgttatatcaaattattggaccaaacttccttctctctagacatatgaaaattttaatatccaactaatatgactagatgaatactaattcaagtggcttttgaaacaataataatcaaggcataaaaacatttagccacttgaagtataatcaataatgaaccaccaaagtcatatgtttcacatgcatagattccataaaactaaaaatgtcagtaatcggcttgagcatgtatgcaaaatattataacaatgccaatattcctaaagataacaactctagatagtattaaaacaaatcattatattggccattgacataagccgaattacaaagaagcaaaatttcatggtgcaataattatgaaatctatatcttgtatggtgatccataaaaacatacatgatttggcttttaataaatatcaaataccaataagccaaattatacttaaataaattatatgcccactttctaattccaccacttaaaactggcatttgcaacatgtttgtataatatctaattaataagc

SEQ ID NO: 27080 - DNA, 5529 bp, Oryza sativa
actctaggaaatcaccagtctcttaactttttattccttaggtctccacacttgcttatgtactgctcaaggttctaaatttttacatgtttggtccctcatgtcttcggccttcttttctttttgacctatggctcgaagacgttgtagcctcctcttttgagagcgagataagtcggaagtatccacttcggctgtggttgttttccaggagctaagctatgattcttgatatttttggtcgaagtggaagctcctgtgttgccctcaattttctcaatattctctaatgccacccggtcaggccggtctttgggcccgatcagaccagctacaagccatcggtcagaccggccgtaggccggcggtcagactggcctgttggcctggtcagatcgggcgtaggccagcggtcagaccggccataggccggtggttagatcggccagatgtcccagtcagactcccgctattggcagtcatggtgtcggcttcaaccttttctgcttgtatagtttccaccgcatctccagtaggaacatcttgagactcttccttgataaaaacgacctccggagttttggcttcttttctcacccacaccttcttcacctttttaacctttgatccaccagaccgattcttttgtgagaaacggtcttgtcttgagttagatgaatgacttggtactgtcctaggtgatcccttccatccttgatgaaacagcgtagagaattgaggcatccacggcatgtaatacagaaaaggataaccgaatggtggcattggatatggataccatggcgtcacaaccggaggtttgtatggagttaatattgttgatgactttgattgctttggggttgaccaaatctctttctaggaagtgatcttggtcctcttaaatcactttaggccgatcatcaaatcattgatcggccaatcccttattgtatttagccataagcatctcaaaagtgagcttcggctttttagtcttttgggaactagatgactcatcttttgcaacgttacgatctttggccttagaattattgatcataattgtctcaggccgaagatatctaataataacatttttccctttcatggattcggcttgactaggccgaatcaacactttcttcttgtcaaagtcaataggagcaataggaagggaattactaacaattccggtcttaggcataggtgtaaccgaaataatttcacaagtgaccgatgaatcatcaaccggcctttgctccatcaagcttgcatctttaaaatatcatgaaactcatgctccatttgtgaccaagtagaaatcgaactaggagcaagtaaactaaaccatatagatgcaaagtttaacaaagaaagaggaaacaattttaacttaagcaaatcatcactaccggccgtaccacattgatcaataaagtggctgatatgctccattgtagtcatagtattctcacctgtaaatttcgtgaagttgggcacctcaaatccttgcgggtatgggaccgaatctacgtgttcaggatacggcctttgatatgtacgcatagctacttatttagactctatttcactactatcccgcaagacattgtcacaatcttttccaacatcgacatgaccgatttgcgactcggtcttagatgacagtactatttcgctttcgcttctgacacaatccgaaccgtcagttagttcggctatattttcaatggcactactgtctaagctaacaacataatccgaaccatcacttggttcggctattccattattgcctaaactagtaaacaatccgaaccaacacttaattcggctatacttgttattgcactattttccaaactaataacacaatccgaaccaacacttggttcggctatacatgctatttcattatcatcttaactagcatttaagctattgtcatccactcggctttcctgagccagagcttcatgcaacacatgatcaacatcaagaaatatctggccattcaatctctctttaatataatcaagcaattcattatatgcaatgtcggtcaaatccttttcagctgtattcaaactaaaacatcggcttttagcatctctaaacctctcaatataatcagtgacagattcatcgtgtttgtgcctaaccgatgttagaccagacaccctaaactcagtttcaccagtgtaaaaataatcatagaatttttgttctaattgagcccaagtatgaatagaatttactggcaaagaagtaaaccaagtaaaagcagtaccagacaaagagaaagaaaacaaacacaatttgagaacatcattagtactagcttcaccacattgtgcaaggaactggcctatgtgtttccaagtagtcctcccatcttcaccactaaacttagtgaattcaggtactccaaaaaccacgagggtatggtatattatcaaaataatcaggatacgacttttggtaaaccttagcacaatttcttggctcaattccaaatgcttttctaatgatgttactaatttgctcttccatattctcaggccttggttgtggatttggtggcctaagaattggtggttgtggcggcacaatatgattatactggccataatgcgtgttttgtgccaatccatccacttgatgattttggactagctcatagcaactgttggcacaaatagcatgggtatgtggaatcagggtttatgattccgacgaaatccgaccagatttcacgaaatttcgacgtttcgatgaggctcgaaagtagaaaccgattgagatttcgagatgtttcattcaaattcaaatttgaattgataaaaaagagaaaaaaataaataaaatattataaatactatgatattcatagaacctattgggatataaattttcaaaaaaatgatgtattgtgtgtatttactgaaacttacatcaggaaagaaaagaataaataaagaattaaaaaaggaaaacacttacatgggccaaaaccgaccgcaattaaaaaaaggaaacacttactgatcgaaatctcgccaaaaccgatcggttttcgagaacttgtcggcaaactcagggaatttctattcaaattttggtttatgaaatttgttcggaatttaccggttttccaccggattttgtgaaattccgaattgcgctagtgttcgaaacagaagggattgtcggaatcgtaaaccctgtgtggaatagcatgactaacaacattaacatgaggcaaataacaactagaatcagtactattagtcatgggagaaaatcctggaagaggttccggggcatcggtctgaccggctatagatagcccggtctgaccggccaagcacccaatctgaacgggggtcagtgatgcagccagactggccacaggaggcatgatctggccaagataaggcacggtctgaccggcatatggtacggtctgaccgggcgtcatgcacggtccgaccgttggctaggttctttgtataaccgattcctgtggaatcggctgtgtgaacgcccgttgatctatccattgtattataggtacattgtatatatgcaaaagtagaagtagcattatattgttgataactggctattttagagccagttttcttaatagattcatcaaatgtggttttaaaaacatcttctaacatatcatgatttttatcaatataagcattaatagatgcatctatacaacgttcaacatgttttcgaataacaagagatggatcgagcggattggaggttaccttatcagggacaagtttgagaggaggaccaggtttgagaaccacaccttgatgcatgggtcctgatgagcgatctcgccgggatctcctccattatcgcctttattcgcttctccatgacttgacgctgctcctcatcaagatcctccaatgtgatctcatcgatctcgttcctgctcgtcatggttgatgaataaattccttgattaatttcggccatatatcttatagccgaaacatttgacccaatagattaatatacagtcttaatttccttggtatgttactatgtgtatgtagcaaaaatatccacaaatcaagaaatcagtagccttggtcggccgatctcttgtgtattgtgggatgtgtacacctagcaaagatatttgatctcttggtaaacaactgagtaaacctagcaaaaatttggaaactaatctaaagccttacaggacagccgatataattgaatcggctttgattgattttttttattggaaaccgatcttgatttcttttctcgggatatgtgctaatacatgcgacacaggatcggtattgctcgctgtctattgcttgctggccttgatgtatgtgtgtacacagaaagcacaaaactgaagcaccgcatccttgatttgccactgaacctacattgttatagatatatgaggatccggacccatatattatagacagtaagtagcaaataattaattgacacatcttaaaatgacccaaagttaaatgttccccaggcaaaaactcgtcactgctgctcgtctttgaatcggcttcggactggtaacagccaaacgccgaaactttgtggcgaaggcaaggacggcactcggcgtagattgaagcagaaacgatagcagtggccgaagtatagattaattccagccgtatggccgaaaatcgaaacatttgattcgacgaaactatatctgaatatttaaataaaattcggtcgtaatatggccgaataaatcgtttcccagcggagtcatcaaaaatcatgttagcaacttctttggtaagaaaacaatcacgatcgggacatctaaacgccttgcggtaatatggagttgtcaatcaccccaatctagccaaatggtcaaatcaagatggattttgtagaaaaacagctaaaccagctagcggagccgatttagatatcaaaaccagcctctaggccgatttagattgatatgaggataactacccgtcgcgtgggtgaacggaaggtttacgggacaaacctacaaagaaataatcgcactctcgcggtgacggcgaacgatttacgatgaaaatagataaagatggactaaaactaaaataaagtagaaagcatggctaaaaagtaaaagaaatatgaaaaagcgattcaagtaggttgtgtgttgttggatagattacaattgaaccggccttgtcccttatataggggttgatcttaccctctacatgcccttctccacgtccaactcagactagaaaccaatagaaacccgaaacctgccttcccgagcaaggaaacccgagacctgacgaaaacggagtttgactcggactctgccagtcagaccgaccacatgccgcctgtttgaccggccctctggcagagatctgaccggcccacatatggcggtcagaccggccctctctggaggaaaccggcagagccccaaactttaccaatttttcctatttgttaattctagatgctaaa

SEQ ID NO: 27081 - DNA, 5666 bp, Oryza sativa
aaatgagaatggggtgaactttaggtgctattaaagtgaaccgatatcttcgatgctataaatacaaaaacgtgaactttcaatgctatataaccaatttttcataaaaacaacgataactttgcagtgaacctagcttatgccttcaatgacacaatcaactcctagtctctttttgaattgcctttttccggacagactctatacctagtcaaacaaaagggcgattcccgtgctcgccctgcttgatcgagctttcatcaactactggaataatcttgtagctttcatcaactactggaaaaatcttgtccaaaaccccaatgtgaaatcactcaggcctcatttgacagaccgggatcccggcccatatcccgagaaaaagcccgctagaaaattttcctacgaccatatttcctgaccagggtgtgtttagtttacgttaaaaatagaagtttagttgaaattggaatgatgtgatgaaaaacttgaaagtttatgtgtgtagaaatgttttggtgtaatgaaaagttgaaagtttgaaaaaaaagtttggaactaaactcggccttagggtgtgaccgtgtttagtttccccctattcccaactttccatcacatcatatcacataaaatctttcctacacacataaactttcaactttttttccaaactcccaactttcttcaaacttcaaaacttttttcaggaactgtgtttagttcacaccaaaattggaagtttggttaaaattggaacgatgtgacgaaaaagttagaagtttgtgtgtgtaggaaagttttgatgtgatgaaaaagtctgaagtttgaagaaatattttggtactgaacacggcccaagaataagttcatcgaaggttcctcaacttaacaacgagatttttcgaggtcccttaaccacaaaatcaaaaatatatacccctaaacaaactcactgaaaccgttcaaaaagaggtatttttatttggttttgctgacgtggcatcctagtcagaaaaaattacgtgggacccacatattagctgcacaattttttccttctcttttcttctccttatcttcccttttctctcctctcttctccggcagcgggcggagagccaggggagtggatggcgaaggtggagccgggtgtgctactggcgctaccgccgcggcagacggaacaactaaccgaccatcgctgctccgcctgcctgctacgcccgtcgaccgctcgccgccgcgctcgcccgctcccgcccccaccgatgggagcgaggcggccggcctcggcggcgtgagaggggcataggagggccgagagaggggcggaggcgacggcggcggtgctgccgagttcctttccctgtcactggtcgctgaccggtcgagggacaacatcgacgccgtgttcaacccccaatggcgccgtacaattctactgcttgctatataacttaacgattataaagcttgaaggataaattgaagcttcgcttttcttgagctatggtgtttctttgcgttttcttctttgcagcgaggtgaccaggcgctgtacaacgggttcggggccgccggaatgcatggtgacgccgtcatgcagccgccgacattcgggcaggtacgcggccaagaactcctgtgggttcaacttatcccccgattcattctgcttctttaccagcgttggaaacaactgcctgccgccgcgctcgcctacccccaccgctcctgcctgcttcgcctgccgccgccgcgctttcccgctgtcgccccgcccgtctcggtccgtcgaagaagacgacagaagagaagaaaatcttaattttaatcttaactatttaaaagatttggatttttcctttcgtcacatcttcaccccgcgcggtttttagtcggtaaccccttttttcgtccgtaaccctgttttttttttccgcgttttccgtttttcccaccgcagcgtccacaacagcgatttctgctatccgatttgtgatcggatctaatctaatatgacgctacttttcccaccccatcaaaaaaaaacaccgattcctactccagcgcaaatcacgcaaaaaaaaaaatcccataccgattcctactccagtctaacagattaagcccacaagcccaagtttaaaaagaaacaacaccgattctaatccagtttgcgtgcacaggttcagtatcccccacaccgattcctactccaatttaatattacattacattacaggcaatatataagtataaataatagaagcagacaagaaaacatatatcacaaggctcttcctctaaaacatcaagccagctttcaatcaggcaatagaaataatagaagcacacaagaaaatattaatcgcaaggctcttcctctaggacgtcaagcaatctccaatcaatgtcgattccaggttatcaaccaactcaatcctgaatgcaattttaatttcataagataagtcagcttatgaattcgaactaacagtaccatcataaaataaaagaggtcaaccagacatacatgaagtttttatacagaaattaaagaggtcaaccagacatacatgagccttgttttcagaagagaatgtttagctgagcctttcatatgcacaaccaatgctatgtatggttttttttcccgtcgatgcagaacagttagcaagttagcaacagtcaattttttcaagttagcaacagccaattttttcagttgtccagcggcacatagcaacacggaagttccagacgggtccttcaattcagacattcacatgaatgcagaacataaatcatgcacacaacaaaatcatcacaagagcttgcaatcaattaggctactcaaaatgattgttcagattagacatataatgttttggtgttttcatactactattacttgactaactaaaatatacaggatacaagcttaagcttgcagtaagtggaagtgcacaatataagaaccatgacagtaatctgattcctacagagataacatatcaaagacagtaatatatttgatatagtaccagtcataaaccaatcaatctataaccagcaatattgcgcagcgattagaggtggtgtgggaattgaacttaccatatatcttacctattgaccatatattttcttcctgggctcctggtgtactgccatacccaccatcacccccattgctgcccaagtaaccactagcaccaggcatcccattgctacaaaagcctttgggtttagtgaacctagatttgtgacctgcaaaaaaaattttggtgtcagttggaagatacagaattagacagtgtcaaatactgcatgtgtcctgaaactgatgaaaattacagatgtgaatctcatctatgattagttaagatgtatttgtctctatgtgctgaaatgccattgtttcctatttcaacaaaaaatatcacatgaaagcatcggcattcaaccaatatagagtaacaggacaagtttttaatcaatattgttacactactccacctaccttggttgatccactcaaaccaaacaaatcaaataaactagggtctgatctaattattctgacaaaaaatagtgaaaactcaaatcaacttaagaaaactcaccagttcaagcacctctactgcgggggggtcaattgtcactggatccggcggccacagcagcatcctcgttggaaaatccatagaggtccaccttcgtccgacaacttgaaccctcctatccggacgaccgaacagctctgcttgtacaactcgacctccagattcgtccactgcaccatatcctgagacatccaacaaaacaaataccaatcagaccaaatagtgatcatgggggacatcacgagacaagaaaaacccaccggatccggcatccactactcaatcggcctcctcgtctccgaccgctccctccgcctaaagaacgagaccgccccaatccgctcggcaccgaactggaccatcgtggcagctcgatcctacgatgacgactgccacccaacggcgaaggccgatccatcgccagtgagctcgggggaattggatccgtgccggcggactcggtggggggacgaggaaggggagctgaggagagggagaggcgccgtcggtgggtggtcgaggagggggatcggcggagaaggagggcgtcgctgagtggcggaggagaggagagaaaaccgagaggaaagaacgaaaggaaggaagtagcagaaggaggaaggcgatggatccatcgagagcatctgagcacgacgaggagaaacatggagaaagtgacactgccgcctacgggaacccgccgcccatcgagggcgcggccgccgccgccgccgccgctaccgcctccgccgggcaggcgccagcggcgagagcccgttgcctcccctcctgccacatctagcggaggggagggcgcggccgccgccacctcctccgctgggcagccgccggctacgggagcccactgcctcgcctcccaacgccggatccaccgcccaccagcctcgtcgccgccctcgagcctccccaccgttggatccgccgctcaccagcctcaccgccgccagccaacgatggagatgaacatggtggcggctggatcgacgcgaggaagcagcaaccacgacttgggccagtggtggatctggccggcccgtcgccgtcgacggcagaaccgcaggatccaggcgagcaccactgccggccgccttggtgagtagcgagagattaagagagagtgagagatagaacgggagagagaatgatagagttagagagtgagaactgcttggagagtaacgagagagagagagggacacgacactgtgacagacaaaatgggagagagaacgagagagtgagggagttataggataaggatgtcgacagaccacacaaatttatctcctcgctaatctttcttctgtttttaattatgtaattatctaaaatcagaataatataggtctcgttcctttctccaacaagtcttggatgaagattaaaatttccatgacacgctttttaaactgctaaacggtacatttcgtgcgaaaactttttatataaaagttgctctaaaatatcatattaatctattttttaagtttgttataattaaaactcaatcaatcatacgttaatatcacctcattttgcgtaaaaaaacttaatattcaacttcatcttaccgagaaaagaagatgataaaaaaagtatgaaaaaccggaaaataaaaaaacgaaggaaggcaagaaaaaacaattgtttgatataaaaatatagattgtgaaaaaaattgtacaaaatcatcatatgttacgtggccggtctccacgcgagtccacatatgattttagaaactaagacgcatgctggcaacgcgagagtcgacaaagcgagaaagcacacgtgtccactacgaggctataaataaatacccaaaagtattttttatccatcctgattatcatcggtattacgataaaaatgataaaaatacctatttaaaatatatttttttaatcacaacaccgggtacatctataagttcaacttcatcaaccgcgacattaccggtgcatcgcagcattttcctagtaaggccttgttcagttacgcttggattcaatc

SEQ ID NO: 27082 - DNA, 21241 bp, Oryza sativa
ctcttggctagtggattaattggtttccggacccggaataaatcccggtctctcattgtatctatcataaatttcttactatacctgtcattcctagcccggattgaatccaagcgtaaccgaacaaggcctaaaggagaaaagagaagaaagggaaagaaaaaagaaatgtggggcccacatctctttctctcactgacatgtggacccccacatatttattttattatttttgctgattaggatgccacgtcatcaaaaccagccatatatactgccttgggacctaaattagacggttttgtatagtttaggggtgaagatttctggttttgcggttaacggatcataaaaaatctcgttgttaaattgagggacctccggtgaacttattccttcctgagcatttggaagcccacgagacggatttccctgacctaatccacgtgatatacccggggaaacctcccacgcctcacgaggtcgggaaaaaaatcctcgctgcggagccgcgtcacctctgcggctcggcgcctcttcctctcgcgagactcacgaccgcgaaacaacacctactcgcgagacgccggcggcggtctcctctgacgagacgccactgcaggcctctctccttcagacctgggccacggcgacatacatatgtatatacttcgtatatctatatctatatatacctacttaaaaaatacataaggttttcggtggtaattttcatccgtcgttttctttcgcacgcggtatttttttttctcacacgtggttttttttcttggtttttttcgtccgattcttctttttttaggtcgtccgattggtttttttcacgtgcggtttttctggcccagttttttcgtccgattttttttgcctagttttttttccgattgctttattttgtgggcccggttttttccaaaacactgtttttgaccgtgggtctcaaatttttttggtgggcccggttttttcctacctgttatttttttttgaaggatatcccaaatagaatcgtataaaattacatggctcaagaattacaacccaggaattacattcagaatccaagaataaaaattacatggaaggtatgatacaaacatcttctcaacctatataaagaaattgaaaacacaaacaagactcatatatatacacccgatatttggtgtggatattgagcaatctcttgattgacgctactcatatgcgctcaattttttttttaaaaaaagaccaatttgttgttggacgtgattctttaacccttaacaattagatttttttttgcataactttagaagcaattataatcaggatatgaatagcttgtaatttttgtaaattctgtcatattaaatgcatgtaccaggagaagaaatacaacttatttatcatgcataattaaatcattatattaacaagatgatattggcagtaattacctgaatattttttaaaaaaaatccatgacataatagtgtgatagagacataaatatatccaatctaacagtcttaatcaaccactgacaatatttaaaaactgaaagcatgcataaacttcacacaatatccttcagtagagacataaatatattcaatctaatggtcttattcaaccactggcaatacttaatacccttaatgccttgagttacagtagcttgttctgcatatgctactgtaggtggttattcatcacattcatatgccaacatggtttaaaaaaatcaaaacaataatattgactaaatatgctactttaaaggaaaccggtttcagagtttattatttctatttcccctatctttctctgaactcggtgcgcaaaagtattacttaatgcagcaatagaacacaagtgaaataaacacctatggtccatgcagaatcaacagacaataatatagagctcttaaaaattccaaagcattaaagggggcatagcaaatacagtaggttccaatttagccatgcaaccaaacttattttgaacaaaaaaaaattcacctgaatatttttttggcaaccatctcgattccataactccaacccatcaaagtcaacaaatctcatcttctgtctccttgaaaacctggcaacacacctaaacaaatataaaatatggcaagaaatacaacttatttatcatgatgacttaccttgctgcatccagatcaagataaagttgtgctgggattttaaccatgattgtgtggtgacactcaaaatcacagctaactgagtttagttcagagcatgcaagaacaacaaacaggaataggggacagcaggatgaacattacattttttttgtttttttttgtgggaacattacatatttgttggacttgatatcggagtagatcactatgaaatcaccctcctacggctcatttaaatgaacaaaatcacctgaaaaacataagacatcaatcaacaatataattgagagtgacaattttagtatggcagttactggcttatgactaaatttgaatgattcaattagttggccaagcaatcataatatctcattttccaataatgggaaaccaagaacacgagaacaccaggaaagcgagataggaggtctcaccggcagataggaactgggacgccgttgtggcctgcgggaaagcgagtgcgccgtccaacaccggcagccccaccttgccgcctccggctccgcctgcaagaaaaccatcatccagcgatgagtcagccactcgaccaagatcgtcgtaatgattaactaataagtttacacctaggtcagaaaccccaacaagcaaagaacacacatccatattgccgggcccctacatacacatacacacacacaaatttatgtctaaacgtgtaaccaaataactcggaaaatgttaatgaaccaagaacgcacctgaaatcttcagtaccaccgctcgggcgctcggtaccaccactcgactgcgctctcctcggtgcaccttcgtccgcaagcttgaaccctcctctctggctggccgaatagctagcaaaactgacatgttatctaacctgccagtaagcaacaagattactcctatgcaagatgatccaaagatttcacatgaacaatatgatatattgtcaaagaaaataaagtacctgggcgaaaagattgcgatggcgcccaaaccacatgtgtcgccatcgtcgaggtcgtcgccccatctgccagtctgccaccccacctccgtccctcccatcatcacccgcggcggatcagcacgaacggagggtggagagacgacggaggtcgccggatcgacccacccatcgccgcggacggcagatccgcacaagaggggagcggagagacgacgggatccatgcaggaggggaagaggtcgccggatccacccctcccgtcgccgccgacagcggatccgcgcgagaggcgctagcggcggaggtgtacaagctgaggaaccaagaatccaccttaacgttagggtgcagatcgcacgagttgaggcatgccgactacagcgagctcatgaggttagccatctactcgccggcgtgacggtgccccggaacaagacgaccacctcgcaaaacccgagccgccgcgtcatctcgtcgggggacatggcgaagtacccgatccaccgccccccggcaactcgacgatggctccatggttgatctggtgggcaaaactagagaaggggatggagagagacggggaaagactgagagatagaacgagagtgagagactgggagagagagaacgagagtgacaggataaggatctcgcagggttcaccataccgccgataaccgcgcgggttcaccataccgccgataaccgcgcggttaccgcggttaccagacttaccgcgggggtacggtaatataaataccgcggtaacctccttaaattcaaataaatttaaaaaataatttgaatttttgataaattttgcacggttttgtacggtttttcacggttaccgcggttaccgcgcggtaaccgtgcttaccgccggggtgcggtaaccttgactccggcggtttaggaaaccctgaatctcccaggcagggttcaccataccaccggtaaccgcgcggttgctgggcttaccgcgggggtatggtgatataaataccgcggtaacctccttaaattcaaataaatttaaaaaataatttaaatttttgataaattttgcacggttttgtacggtttttcacggttaccgcggttaccgcgtggtaaccttgcttaccgccggggtgcggtaaccccgaccccggcggtttgggaaaccctgctcccaggcgatcactcatttttctcgcgtcaatttttctttattatttttagaaaaatctacgaccttagattggactgggttgtaactacatttgctgtgtgctatctctgcacacggaaaacggaatggtccattaacacgtgattaattaagtattagctatttttttaaaaaaaattaatcaatatgattttttaaacaacttttgtatagaaactttttgcaaaaaaaaaacatgccgtttatcagtttaaaaggcgtgcgcgcgaaatatgagggtgattgattgagaaagttggggaaagaactcagaatcaactcccgttgtgttgctaatccatggattgaattctgctaaaaaatgatttattttattaagtttttttatttaagataaaaagatgtttattgtaaaaaataaaatttctcacgaaacatgacatattatgataaaattacctattttaaatacattttttcaatcacacaaatttttgtccatcgactattgcatgaaagtgaccaagctattcaccgttattcctcgtttattcctcgcatggtacaatcatcgcactaaagtattatatacatatcacactaacgcatcgtgtacatcattcatatcatgtacgtaaacaggaataattgtccaaacaaaatacactttggcgttgtttagatcccctgccaaaatttacaccctgtcgcatcgaatgtttgatacatgcattaaatatagatgaaaaaaaataactaattacacatattgcgtgttgtcgacgggtgatacccgtagaccggatatagagggtattgaggtacgttggtacaaggatctacgtaatacgacatcaagcaaatagaagacgaagattatactggttcaggccccttgataggtaatagtcctaatccagttaatgtgggattatatgatggaaatcacaggttacaaagggaacgatggaactcgatgaaaccggcgagatcgtaaccgagttggttcgactagatctcctggcgacttggctcctgcaagctccgacttcgtaggctgtggtggttgtgttggctatgagattcgatgccctcggtcctcccagggggttccttttatatcgcaggtcaggcggtttccaagtagaactcggagacatcggaccctacacgatacattgacgacccagtcctgtccgagtaggactcttattctctgcaaacttcgtaaaggatttccttagtgtatgtagagaatgtccatatatgcgcgggcatgccatatcgatatgtaacatatatcgaagggtaaagggtatacctaacccgtaaccctgacagtagcccccgacttcggcttaaatgaactcgtgtaaccaatcgcgacttctgatgtcgaggctgatgtcgttttcggtgtgggaaccatagagacaggacatagtcgagaacaccatgtgaagcccaatggttatgtgtgagtttaaactgaagtctgaaagactaccgcgcgtaacggacccagaaatttccggcggccatctctctcctttccttgaaattcgcaccgtcggaagtgtgcctatttaagagagttttggggatttattttgaagtccgcctgttgtggaaaaaactttccagcctccaagcgcatctcatcttctccgctcccgcaaaaaaaccctagcttgttaatctccgtcctttctccagcgatctttagtcggtaatggatctcggcaagtctacctcgaccaacgcgtcgctaaagaagctccaggaagatggcacccttcctggccatggagccatggagagagaagttgaaggtactaaacgccggcctgtcctgggtcgcatggttgtgatcgaggactacattctgtgtggttttctccctccactttctgaatttcttctcttgattttgaacttctatggcctttctttgctccatttgaaccccaattccattgccttcttaagtatctttgcacacctttgtgaagcctatattggggtatagccctttctcaatcttttccgcttctactatgaattgcgttggatggaatccaacagagtgtctggatgcgttggattccgacttcgggatggtctgaagtcgcgttatatccccttccagtgcccttcttctcgtagcaaatggcgggcaaggtggttctatcttcagatagagaattcggatcctgtctttgttgttcctaaggaacaaccagacaagatttcgtcttggaccgcaaagcctaccttgacccccgcccttcggttcttcgtcgaggccatcgatgacctccgagtacgaggtttgtcggggtatgaagtcgctgccaacttcgttggtaggcgaatccagccgctccagactcgagctcatccagcctttgactattctgggccggaggacacgacccgggtttctcctcggggtatttttcttgtgtttgatttgacctccttataggcatgctcctcctggcttaccgaattccggttcttgacttgcaggcttgaacagcgaaacggtggagcgctgcgtcggccaactgatgatcaacggcccgacaacggcaagcgacatccccgtccccctttgtgagaaggaggcggccgatcgtgaaaccgcaatcaatgtgagtgtattcggcgacccccctctattcttgctcctggatcggataacgacttcatgcggtgcaggttctccctctgactgacgtcatcggaccgctcgtggatcaccaggcggcggcctcgctgaaagagtgtgtcgcgcatggggcatccaacgcggccgctgctgctgccacagcgactagcgggagctgccccccaaggaggggaaggaagttcacctccgtacttggcagtcgccggaagggtcctccccccggtaagtttcttgagccattaaccttgtaatcggaaaagtcgttcctcaaatcatccttggtttactaaggcctccgacgcgtctccgccacctccacgacggcaaaagttggtgacgctaggcgagaagtaagtaggtggagattgagttctttcctttggttggagatctggcgactagtcttgatattcggatgccatgatcttttgtaagtgggcgccagcgaaagccgcgcaagataagtttggtgagacctccagcgtgtctcctgcaacggtctccactgacgtcgtggtcgccccacgaagtcaggaggcgacaccccacggcctgtccggtgatctcgggcctgttcgcggcccgcctgcggacgtcctcagctggggggagctccaagtcgagatggggtgcctcctcgaagctagcgctcgcggcataagttgcgagattgctgaggcgaggacagcggcggcgtcgtcggctaacgagcgcgccgacaagctggagcgcaaactggcggaagttcgcgaggacctccagaagatgagggagctggtggccggcaacgagcgacagcggcggggtcttgaggaccgcatggcggaactcgagagtaacctatcggagctccgtggctcgctgcgagtcactttcaccggcctacaccagctcgccgggcaatgtggtgtcacgaccacgatcccggcgaaccccgacgagttctcgctgacgtcttcactcgcagaactggctacggcgatggaggcgataccctccaagcacgcggcctggatcaggaaggagacatccaatgggatctataccggggcatgtcatgtcctcgcgtgcgtcaagttggcacatccgaaactcgatctccagcggatcttggagcagggggcgacgaacgacgcgcgtagaggcgtgatggaagaagtcagcgatctgggagagtctgttctctcgctctttgaagagtaggaccttagttcccctgtgtcttttctccagttacgctttgtaaaaacatttctcaacctttttgcgtgtgcagtcatcgcttcagttttccccaacattttttatcccgagcacttgttgtcctttgtagagatgtcgatgtcgaggatgtccagcagtgtgggcagcctgagtcatcagtgatccttccggatcttgcatctgagggacccacgtcgctgaacgatgtggatgaaattttacccgcgagaatggggacggcaacgactttcttaggttggtggtctcttcatcccgtttcgctcctccgacttgatcagccgtgttctcgagagagaaaagcagcttgacttagtcgtttccatattgaacagatctcgagaatgcacttgctgaccaagatcgtcgtatccaatattggaagacaaaatttaaagtggcggaactcgagagagctatgttggaagtgaagaaggagcaggccgtggaaacactccgaggtcgtgaggtgtggttcaactcgtatttgaagagttgctgcacgtccatggcccgagtttgtagagagctccgagtactccgcggagatcccgaggagtcagcggccggatacatctcatggctgaatggggcctgtactcagctcgaaggcatcggcaagcgcatcgatgaagccctgaagcaggaatgccgtcgatcgagccgatatgctggagggcatgtgttgtcttgcatacgagatcatcgtccgcaactgcacctcgagtttctccatgaagggttcgctcgttctcggaggactccggcggagatagaccacctggcgaagtcgatggcgccgctggcggagaaggtcttccagtctatggactggcgttggccttcctggtagtctttgtatcctgtgatagatatcttaggaaaaaggtgtaatatagttccggacttgtgtggaattgtaagaagtatcttgtgaaatagaaaagaaatctatcttaatgagtccttcttactctggatgtagtgtgtaagagtgcctcctcagttcccgactttagctagtcatttgagtcgtacactctccctagcccccagccttgtcgtcgaggaattcttctcggaggacaaggctcttggacctttgacctgcctcggttgagaaagcactgattctagccctcaactgtgaagttggaaagttaatttctgattacacggcttggttaatacgcacggcgagaactcttacacgaccaggtcttacatggtctttcgtctctacaggatccgacaaggccttatcggctctgggcatccccagccgaagatcccttaggttcctcggaggccttgtcaggacggcataaagggacatgaggataggtttcaacgcaaggtgtcatctgggtaaggggtcatcaggcaggaacactgtgattgtaatatgcgcctgaaaataggctttattgatactgtaaggtgtcttacaggtatggattgtattgactcatacatagaatttacgtagttggtcaatgttccaagaatttgccaactcgcggccatcgccgtctacaactttgaatgcgcctggccgcaagacttgtgtgatcgtgtaaggtccttcccatttgggtgagagcttgtttcgccctgcttggctttgaactcgtcggaggatgtagtcgccgatcgaaagtatgcgtgctcggatgcgcttctcgtggtaacggcggagggcctgttggtaactggctgctcgaacggcaactcgttcgcgatgttcctcgagtagattcacatggtcgtttcgctgcttctcctgatccttgtcggaatacctctgtattcatgtactttgatatcgtagctcgctggggagcatggcctcagagccgtacacgaggaagaagggtgtttccttgttagatgttgtcggtgtggtgcatacggcccatagtactgatgggagttcttcgacccatttcttgtcgtgtgacatgagcctgtcgtagacacgggtcttgatcccttgtagtactatgccatttgccctctcgacttgtccgttgctttgaggatgagaaaccaaagcgaaacatatcttgattcccagcctgatgcagtaatcctggaaatcggcgctgatgaactgggagccgttgttggtgatgatgcgatgtggtagtccgtatctgcaaaatatccctttgatgaatttgatggcgttgtcggccttgatttcccccgtgggtatcgcttcgatccatttagtgaatttgtcgattgccacgaataggaacctgtagccgccctgtcctcgtgggaatggcccgagtatatctagcccccagcacgagaacggccaagtaagagggatagtctggagcgcttgtgcgggtagctttgtgtgtttattgtggaattgacaggctttacaccgctggactatgtcgcacgcatctttgagggcggttggccagaaaaacccttgtcgaaaagctttcccgaccaacgtccgaccggcggcgtgtgacccatagatgccttcatgtatatcaaggaggaggtgtctaccgtcgtcggacgagacgcatttgagaagtaccccgtttggcgctttcttgtatagatcgttgccgatcgtgcaatagatttttgctttacgggttattttctcagcctctgcgtcgtcctcgggcaactcttcgctgttgatgaatttgatcagtggggtgcgccagtcgtctatggtctcgatatcggcaacggcgtgttctgcctctgtggcctccaagctgatgtcgggggtgtctgggttaatttcgccgctgacctctttcactgatggctttgtcaggatgtccagaaaagtgctaggctcgagtggttctcgtctggatgcgcgccgtgctagatcatctggctcaatattgttcttgcggtatacgtgtcggacctcgatcccatcgaaccttttctccagcttcctgacttctgcgagatacttggataattcggggttagagcatttataatctttgtgcacctggttcgctactagttcagagtcccctttcacgatcagtcgtttgaccccaagtgcggctgcagctcttatcccggcgagtagtccttcgtactcggctggttattggttgccctgaagttgaggtggattgcgtgcttgaattgatctccggaaggagatgtcaagatgaatcctgcccctactccttggctgttgagtgcaccatcgaacgccattgtccacgtttcgtcgtcgatttggttgtctgatttgttatcaggcatagtccaatcggctacgaagtcggcgagtacctgggacttgatggctgttcgtggcacaaagtggacgtcaaactggcttagctcaactacccacttcgcaatgcggccgacaacgtctttgtttctcacgacttcaccgagagggaaggaggagacaactgtgactctgtgggcttgaaagtagtgacgcagcttccttgatgtcatgattaccgcgtaaagcagcttttgtatctgtggatatcttgtctttgcgtcatggagagcttcgctgacgtagtagattggtcgttgtactttctctctcgacagcaatgacggtgctaacagaataaggcgtggcggcaatatagaggaataattcttcattaggttggggagcaacgagtacagggggggtttgataggtagcgcttgagtgcaatgaatgcctcttcagcttcctgtgtccatacaaatttgttttgcttctttagcagagcgaagaagggttgtgctcgttctcccatcctagcgacgaacctgcttagcgctgccatgcatccggttagcttttgtactttcttgagtcttttgggcgacttcatgttctcgattgctttgatcttctcgggatttgcttctattcctctgccagatacgaggaaaccgagaagcttgcccgactgtactccgaacgtgcacttctctggattgagcatgaggcgatatcatcggaggttgtcgaacgtttcccgtagatcgtcaatcaatgagtcgcttgtcttagtcttgacaacgatgtcgtcgacgtatgcctcgacgttgttgctgagctggtcgctaagtgcgccctggaccgtgcgctggaaagtattccctacggttatcagtccgaatggcatcttaacatagtagaataccccgaacggtgtgatgaatgctgtcctctcttcgtcctctttcgccatgctgatttggtggtagccagagtaagcgtcgaggaagctcaacagctcacagccggctgttgaatccaccaactgatcaattcgaggaagagggaagtgatccttgggacacgccttgttgaggtcggtgaaatcgacgcacattctccattttccgttggccttccgcaccatgactggattggctagccactctggatgaagtacctctctgataaagccagctttgagaagtttgtcgagctcttctcgtatggcttgtttttagtctggtgcaaatcgccacagtctttgttttactggcttggcatcgggtcgcaccaagagtttgtgctcgatcacctccctagggacccccggcatgtcagacggctgccaagcgaacacgtctgaaaaggttggtgatgaaggtgatgagcgcgaattcctatttctcacttagtgatgccccgatcttgacggtcttgtcaaggttggcactagagagttgaacgatcttgatcgcgccgtctggtttcagcgtcttgtttgtcttgctcactttcttgggaggctcagttgtagcgggtgggctgggcgtgtgctcgaccatgtcgaggctccgcttgtcgcattgtaccgctagcttggcgttcccttgaatagtgattgttcctttcggtcccggcatcttgagcacttgatacgcgtagtgagatgcggccatgaacttcgcaagtgcagttttcccgatgatggcgttatacgctgtatcgaattcagcgacatcaaaggtgatctgctccattcggaagttgtttgcttggccgaaagtcacaggcaacgtaattttgcccaatggtttggacgaggaatggggagtaattccatggaagggttgatcggtgggtgtcaactcgcttcgtgggattcccatcacgtccaaggtgctggcgaagagaaggttgattgagctaccaccgtcgatgagaacccgcgcgaccttgatgttccgaatagtgggttcgaccacaatcggatagcgtcctgggatgacggcagtcttgtgatggtcttcttccgagaattcaatcttctgttcagactacttcatcttgggtgcagccccctgccatgtcgaacagacttcacgttccactttcttgtattctcgctttgaggagtacactgtggaacctccgaaaatgtgcgagacgtggaggtcagagtctggatatgctgagtccgattcctgagcagccgcctccgcatccttctcgaccactcgtactcgcttgcctttttccaacgccatgtgcttctcgagcgactttttgaaaacaaggcaatcttccaaagaatgtctgtccgtcttgtgtatggggcaccatgctttctttgcgtcgctaccttgtgggtctgggcgcttgggtgggttcgcgtattctgctacgagaacttccgcttgagctttccttttcccactcttgcgatttttcttcttgcttgactcaggtgcgtccgtggctggtttcttttctcccccggttttcggcttgtcgttcttgcatctcagcgcatcgtctacgtgggtgcatcgctcaacgatctcgaataatctccgagtagttgtgatgcgtcttgtcgccaactcctgggtagtatagcgatctcggacaccggacttgaaggcgcgaattacagaagcgtcggtgatttcggggattgtatttctgcactcgttaaagcgccaaacatattccctcaaggattcacccgagttctgtgtcaacgcatgtaggtcgtcttcgatcgcgtggcgcttgtatgttccttggaagttggcgacgaactgctgccacaggtttgcccacgaagaaatcgagtagggcgggaaatgcatcagccatgaacgtgcagagccttttaatgcagttggcagataatttgccaacgcgttgtcgtctgctccggcagcgtagagtactgtggagtagacttgaaggaattcttctgggtcagtactcccatcgtacttctctattgctccgggtcggaatctccaggccatcggacatcacgaagggaacgaccgaaagctctacacctagcgctgggagcagtgggttgtcggcgatcgtgtgtccttcgtggatgtctgtctgacgatgaggatgaagaagaagatgacaatgatgatggatcgcttggttttggtgtgggattacgaggtcgtcggctggattctcgagaatcctgtcgtcgccctccgttgttttcccggcgccgatctctgttgtcctcatcgttatggcggtgtcctcgaccagtatcgccctgcatccgcctctcacgatcatcatgatcgtggcgattgtgagatgaattttttaagcctaattgtgccatgatttgacaatgtggtgctacagagtacatgtgctaatgacagattaattaggtttaataaattcatctcgtagtttagaggtggattctgtaatttgttttattattagactacgtttaatactttaaatatgtgtccgtacatccgatgtgacacgccaaaactttacacctctggatctaaacacagcctttgattattattgacatagtagactgcttaagaaatagtacagttaaacttcaatcaccgcgatattacccggtgcaacgcacgggcattttgccagtatacatataaactttgtatttcagaaatacaaagtttatacgtatgtatataaaatatatacatatttgtgtgtgtgtatatatatatataatttttgtgtatactataaaattgacgtataaaaaatgtacatatatgtgtatgtaaagtttgtatacgcatatataaattttgcatatgtgtatagaaagtttgcatacacgtatataaactttgtatatgtacatattaaaaaccgagagaaaaaaacacgaatacaaactttgtatatgtacaaatacaaaacttggtatacatactagtacaaacatcgcatacatataacctaaaaaaactggaaaaaagaaagagaaaccgaaaaaaccaggaaaaacccgaaaaaaccagaacagaaagagaacagcaaaacggaacaaaaacagaaagagaaaaaaaaccggaaaaaaccaacaggaagagaaaaccgaaaaaaaccggaggaaaccaacagaaagagaaaaggaaaaaaaaatgaaaaccccgcggggcgccgtccgccgccccctttccgcacgcgacacgtgtccaatcgcacgccctccccgcgcgactgatcgctagataggattttggcccccccccttcccactatgtatccgttccccttcctctcctctattctacgccagcatcccgattcaccgccgtacccttccgcggaggagcacaccctctccagcgctggagaaagagaacaccagagctattgaagtagcacttaatttgtagccaactaattaattagtagcactaatagtactactggatgactatatcaccatactacctcatgcacgtgcagcatgcagctgtgacatgcttgatctgaagtttctgaacttctatctgaaccggccagattttattttagaaaatagattaaaacggggcctctacatataaaacagatgtacacagccaatctaaacattattcagagttgcagattaaaatgaggtgcgagatgccaaaagcgcaagcatatctctccattattcagagttgcagatgaggatgaggtcatgaggaggagaggatcctgaattcctgattcctccagccttggagattgatgcacgagggaggccaccatcgccatcgctatgctttgcttggctgcaggaatgtgcacgacaggaatctccgtcgtcctcctcctcctcccctgcgtcatctacgtcctcttcgttgccgttccggtaggacgcgacagcgcccgagagggcgagaggtcgacccaggagcggcgtctgggtttgagagtgaaaaagacaaaaataccccaacacatataatttttcttggactaaaatatccctccacaattctactaccatcaagtgtggtggtagtagaaatacatctgaaccgttcgatcaaatgcgatcaacggttcagattattctctactacagatagaaagcactgaagtgggactccggaagttcacacacgtgacaccttttgagctagcgaaagtgttgattgagcattattagtaggattgtttcccttacaacgaaaatagtggttgcatgggggaacgagatgggaaagcaaccactttgaaaggagagtgccggagagacgacgagatcaccggagttttccgacgatcggggatgcgatagagcatgcgagtcgctgggctcccgcgggctggcggtcggcatgggcgaagacttcgcaatccacagagatttcgtcagatttcaggagggagacagggggggtgcagttcactagaggaacctcaacttaacaataaattttttttaatatcctttaaccacaaaatcagaaatatatacccctaaactcactcaaaccgtttcagggaggtcccatggcagtatcgactcaatttttacctttttgttaacataacatcctagtcaaaataaaataaaataaataaatatgtaggacccatatgtaagcaagaaaaaaaaagtgaggtcaacaatcctagtcagcaatctccgtagagagggagcggcactggcgcgcggctggaggcaggcggaacggcggtatcgacgagcgagcaagacggcggggcgtcggcggcggcaagcggcgggcaagcgttggtggagcggtggcggcgggcgagcgacggctccgggctcgggaggagcagacgggcttgggatgtggggggcgcggtaggtgagtgcggctgcagagggggagaggcggccggagcaggtgaagcggtggcgtcagagggcgagcgcagctgtgatggcggtgagctcgcggcgcgcggcgagatgcatgtgcggcggtgcagcacggctcggcaggcagcgctgcgaggtgcggcgacgcggcagagacccggcgcaggcgcaacggccatgcgggcagcacggcgagggggcggcggccgtgctggtggcgcggctggcaggcacagacgtcgcgctagtgcggggcacaattggcggtggttggttcttcggagcgacgcaggttaaggcgtgtgaaactctgcgtgggatggcgtcgctgtcgtgcagggtagcatggtggccggtcgatgcggtcgccgactcgccatgcgtaggtgacgcggtggctcaggataggggcgacgtcgtgcgcgaggctatgcggcggccgttcagcggcatcagccaggcgtcatagtggccgtgcataggtggctcgaggcatgacactgtgtagggtgcgtccgagtggcggccatgtgtggcagcgtgacggtggtggtggccatgtggggtgtaggcagcgcgcgggcacggctcgagcgatggtgtgcggcagccatgcgaggcgccgcgcggcgggacggtgcacacgggagagaagagaaggagaagaaaagggaagaaaaaagatgtgcagctgacatgtatctatattgttatagactttagtgcacgatttgcatgtgtttaggagtacacgtttctggttttgtataagggactaaaaagttgagggacctccggtgaacttattcttttccaggtcgaaaaatccccccagttgcgtctctcgtgagcgccggcgttccgctctgtcctcgcgactctgcggcggccggcggctccccttctcatgagccgccgccatcgctgcgtgacgtccccctcccacgagccgtcgctaccaccggcggcgcctcccctcctctcacgacgcatccatgccagtgccgcccccttgtcactagccgccgccggcgggcattaccctcccccgagccgtcgccaccgcagggcctctccctcccacaagtcgccgccatcgcagggcctctcgtcccgtgagacagaggtgtgtcttctccttctcttcctctccttagggcttgttcggcacgtggtgagcattttccccaggggaaacgccacctggggggtattggatgaatcccctcccatcacccaatcccctccatcccagggatttggttcccttggtcattcggaatgcaaatggcggggaaggttaacgttcacttcagacattaactcaggccaagcaacgttcaacactgatatttaaatttcatatcactaaaaatacaaagaaaactaaacatatagtcctgaaatttaaaaatagcattaccgaaaatttgaaatattgtaaataaaaaactaaaatttctggagaaaataagaaattctgaagactgtctaaaaagattatgaaaattctgaataccacatagaatgtactaaaaattgcttgcatcatatccattcagtcaccacaatcagtcacgcattcacaatacctgatttactcatttaaacatcatatccatcaccacaatcagctaggataagccactgaagactaattacattcatttcatacaaacagaaactaagagtcccaaaaatccaaattctccgtaagtgcaagagcagaagggcattactgcaaggctattagtagctccattacctgctgcgagtgaaaaatgagttatcatcagtgatctgcattaggcattaatccatgctatgaatagaactagccctatattttaattcaagaggcagaactgttttggaatatagtataaaaagtagcagaattacaaggaggaaatatacatcagtagaagagcatttccttgaacaatcgatgtcagaagggaactatttgtatagaaatatatataaatataagtagatcacattagcagtatagcatcattagcaaaataggatcagtgctcaagcttatactgagttcatggcaaagcacaaagaggccgaggggggctcctgagtatttactccgtacaggaaatgacatcgatctatctatgactagacctacagagattgatcgaaatttttacacattccatgtagtagtgcatccaattcatcccaatcctttgaattagcacatctaattaatgtcagattgctaatagtatggaaaaaagaaagaactaatcaagaattatgaactattttctccatatgtttgtaacattatgaactcttttcagccaatgaattaatcaagaacacactaaagtatccaatattcagtctaatgtaatatgcaggttgcagagtttttgagacaactttttacagaacattatctgaaatcaagaacaattaattttcttttgctagtcaaatcaaggccaaatatgataggaataggctcatgaatcatgataaagtactaataaaaagtgtctaaccacagcacaatgtataaagctgtgccctcctttgtagcaaccattattacaattatattgcaacagtgaattaggaaatttttcataaaatcgagatatccaatatatttgatcataagtcaattgttaatctaataaataagagggcaatgaaattctgttacatcactttgtaaaatgaaaattcatggttccacgtgtaaatgttaaatgagctaaaaagaacaaggatatactaaatactgctagtctgctcatccctaacacaagctctatggagaataatgaccagctattagcccagtgatttctttttttgctttaatacattgcaaacagctattgtgtttccgaagaccatatttgacaataaaatctcttaaaaatctgttaggaaacgataggcaaacaaacgataaaaaacaatagatcaatcacagaagacacgagatttaacatggaaaaccctcccaaaacaggagagaaaaaaccacgggcgccagccagcaaaatatcttcactatatctgggtgaggttacaacgccgcacggcgacttacaagaggtatatatatggtggaaccctaaaagggatgacgatccgtttcgtgggggctccgccctcgcacccctgggcgtccccaggtgcacgacccaatgggccagcttcagcctccgctccactacggcagaagctggcctttattaagtgcaaatgaatttggatcacaactcaacaaactccaccttgagacaaattacttcttatagcatgaatcaatccttcaccctgaacacaacaaagataaaaaacactttcggcgccaaatagcctcttgggctaaaccactatacaaactaagcttgagcaaagctcaaacttagcaacaggaacagactttgtcatcatatcagtaggattatcatgagtgcttatcttgcatacctttagcttaccttgcacgactacatcgcgaacataatggtacttgatatcaatgtgctttgtcctctcatgaaacatctgatccttagtgaggtatatagcactttgactgtcacaaaacaagttaatgcaagaatcaactccacaaagctcagcaaacaatcctatcagccaaactgattctttacatacttcagcaatagccatgtattctgcttcagtggtagactgggcaacaacaggctgcaatgttgccttccaactcacagcacaactaccaatggtaaacacataacttgtgagtgaccttctcttatccaaatctgcagcaaaatctgaatccacatatccaacaagccccttatcagtc

SEQ ID NO: 27083 - DNA, 1448 bp, Oryza sativa
ttggcagcaatcagcatatcatcaacatataacagcaagtatataggtgatccattaacaaatttaatatacacacatctatcaaattcagaccttttaaagccatgtgacaacataaatgaatcaaaccttttataccattgacggggggactgtttcaaaccatataaggatctttttaacttgcaaacataatcctccttaccagctactatgaacccttctggctggtccatgtatatctcctcctcaagctctccatgtaaaaatgttgtcttcacatctaattgctcaagctcaagatcatgcatagcaacaatactgaagaatgtacgaattgaactatgctttacaactggagagaacacatcattataatcaacaccagcaatctgattgaaaccttttgctactaaccttgccttaaaccttggaggctcgctgggagataaaccctcctttctcttgaaaatccatttacaacggacaggcttcttctgttttggcaagtgcacaagctcccatgtgccattcttctcgagagactgcatctcctcctacatagctgagatccacttctcacgatttccagaaacaacagcttcagtgtatgtggctggctcaagagtattctccacctgttcagcacaactaaaagcataataaaccatatcacattcctcaataaggcggactggagctccacaactcctctttgttctgcgatgtgcaataggttcatcttgtggctgcaaaacaggaggtgagtgctgaacagtatcatgaacatcattatcaacaatttcagtttcctgatcatcacgtgctccacctgcacgttgacatattgctgctcctcatcagaaccacctggtatgacatctgtgggcaagctgtcattaaacataatagattcattaaaaacaacactcctgctcatgaaggtcttattagtttcaggattccataacttatatccttttactcctgaaccataaccaagaaacagacacttaatagctctaggctctaattttccattatcagcgtgagcataagcagtgcatccaaaaactctcaactgtgaatagccagcaggcataccagaccatacctcaatgggagttttcttattaagtgggatagaaggcgacctgttaatcaagtagcaggcggtgttagcaacctctgcccaaaaacgcttgttcatgcgagcgttggacagcatacaacgagccttggagatgatggttctgttcatgcgctcagccacaccattctgctgtggagtgtacgggatggtgtgatgccgaacgatgccttccttcctgcagtaatcatcaaaagcatccgaacaaaattcaccgccattgtcagtgcgaagtacttttacctccttttcagtttgcctttctatcataacattccactctttaaaaacagcaaaa

SEQ ID NO: 27084 - DNA, 2626 bp, Oryza sativa
aagttcactcatatgtccaagacgcatatgccacaggttagtcttactaggttcatctttagaaacggcagcagcggtaacagaaccatgtaatgtacttcctctaaggacatataagtttgcagaattcatatcaccaatcatataaacgagagaaccttttgatacctttacaactccacctgaaccggagtatttgtatccttctgtatcaagtgtgctgagtgagatgagatttctcgccattcctggtatgtgtctcacatctttcagcgtgcatgtcgtgccatcatgtgtcttgatctgaacagagccaatgcccacgatctcatgtgggttatcatctcccatacacacaacatctccattctgcacagacttgtaagaactaaaccaatctctgttaatgcagatatgaaacgaacatgcagtatcaagtatccattcatcatgactagcaacacaaccagcaaaaacgacaagacaatctcctgaatcagagttttcggcactggtaacaatagaggccttaccatcagattttcttttctccttattctgcagcttccaacattcttcaatgagtgaattttctttttgcaatacttacagaactttttacttcgggacttagaacggcctctactctggctcttgtcacgatcattgctgtcgttgtaggttctttgctcagatctgcctctgacctgcaatgcttcgcccttagaggacgaggcattagactgaaccataactttcatcttctccttgttttggagtgcctcataaacttccgcaagggttagttcatcacgacttaaaagtatggtgtcacgaaaatttgcatatgaactaagcagtgagcataacactagaagacctaaatcttcatcatcaaaatgtacctccatcgacactaggtcggcaacgatctccttgaagaccgatatgtggttcaacacagaaccactctcctgtaacttgtgcgagaacaacttcatcttgatatgcatcttactggttagatctttagacatgcagatcgattctagtttgagccaaagttctgcaacagtcttttcctgcaacacttcttgcaaaatatcattagatagatgaagttggatcagcgacagagccttacgatcttttcgcttctcctcagcggtccattcagtcgttttcttcttcccgaagctttccagcgcctcatcaagatccgaagtttgcgccagaaccgcccgcatcttaacttgccacagcgggaatctcgtcttgtagtctagcagcggtagatcatacttcatcgacgccatcgtgaaaccctaatatggaaacaatgctctgataccacttgttaggaaacgataggcaaacaaacgataaagaacaatagatcaatcacagaagacacgagatttaacgtggaaaaccctcccaaaacaggagagaaaaaaccacaggcgccagccagcaaaatatcttcactatttcggcggcgtcaactttcgccttcttcgttgcccttgtgcgggcaggcggtggagcttggtgggaccttgacttggaaggtgctggacgaggagcttgaggaggagtcgacgcaggagcctgaggtggagacggtgctggagcctgaggaggagatggcggagccggaggagatggtgcatgagacgccgcttgtcgcctagggaggatgatgtaccgcttgcgccatagtataatggcgtggcttgtgtctcgtagatgcgtctcaccgtctcctccagggtagtccaactcgaggtccttgtacgcggttgccaccaactcaacttcgaccttcgagtatcctgctggaatcggcctgcagtggtaagtccccgaagggtccgttggaatagccattcccgacgccaccttcacgtggtgagaggttatctattagtaatcaacataagcagcaacttgcggaatggacaagtcaaaaatcataaaattacgagcataccttgattgataagttcttgaagggaatatgcagctcacatggtgtccgctgagtgatctcatcaacggggcaggtggtttcgtcctgagtttgcatggcttccatgctctgtgatcctacctgccccgttaaggcgcagctgctatgattgcctgatgggctgaccattgcaggaggaatgtacggctggggatcctgggaccgatatgcggacatgcgttcatccaccttccttgccacctcctcttgcatgctgagctcatagctcgataccctgtacttaagatctgcaattttcgcctcggtatctctcttgctcctcatccgactcctgtacgtgtggatgtcctccttgaatccaatcttccaaggaatcacccctttccctcgtgttcgtcctggatgctcgggagtctgtagggcaagtgacagctcgtccttctctctgtcgggtcggaacgtgccctgagaagaggcttccactgcgtccgttagtcgactggtagcctcgcgtatctgatcgctgaagaccagggagccatcaactgggttaagcgttccaccatgagcatagtaccagaacttcgatcgatccaaccatttagcggtggctggttcgatacccctctcaag

SEQ ID NO: 27085 - DNA, 732 bp, Oryza sativa
tatcagaggaagtatgacaagcagcaggagaagcattatgaagaacacgatgatggttttgatcctcattggggttgtgagttctttagattctgctggaatgaagggatgaggttactgtccatcgaaaactgccctgggtgcagtgttatcattgagagctcaagccagtcatataatatgaataatcggctgaggcaggaaagagtgtctgctcatcaaagattgggcccagtgaatcaaggtcgtggtcaggaggatgaggtagttaggacaaatcaatggtgtccttctggtattttcacgaagaaccagaagagaagggttcagaggttgaggaacagggagcattttcaagaagttgaacaggaaattaaccatcggctaaagaaagcaaagccaagacaggaatggcgtgttaagaaccaggttcctgtagccgatgatgttgcagccgaagaggcaaaaaggatggcaaaagggaagagtgttgtaacagcaccaattaacatggtctttacattgccagccgaattcgggattgatcaagtcgatgtagatgaggtagaagaggaatcggctaagttggttttgtcaccggagcgggcaatgttcgagaagcctgaggggacagagaatcagcatcttaaaccattgtatataaacggttatgtcaatgggaagccgatgtctaagatgatggtcgatggtggggctgcagtaaacttgatg

SEQ ID NO: 27086 - DNA, 1936 bp, Oryza sativa
gtttactttatttacttaccttttactttgattttctaactttattcaaattaatccaaaaacttgtgctattaattggataaatgtcttaactccctcctttcacttgtctttagatgtcgcgttacaagcctgagtacttgtttggtgttgagggatttgtctaggagatgcgtacgatgtcctttgccataggatttgggactgcccctttttatgcccagattcctcatgatcgtcacgaagagaagtgccgagtcaaagtcaccttgaacagtaatagtgaagatatcccctcagtgatgttcgaagctggaggaagaaactacatccatgcatgtcaggaggtggcaaggatcgccataggagagctccgcgatcgctacagtgatcagttggccgacactgagtatcgctaccatcctcgccaaccacagggaagtgaccgtggcagctaccttgagactgagggaattgagaatgatgctaccacgaggcatttggttgagatgctgtgggctatggatgaaacccgtgcggagactgtgttagcagctcaagatcgtgaagaccggaatcgtggcaagatttgcaagttagaggacaaagtggatcgtttggagaaggaactagccgcattgaagggagaagcaccaccgcagaaggccaggattcgtcttaccgcaaggaagagagctctatttgtccctcgctaccaattggcgccaaaggtccgtgtggtggaaaaagaagttaccccagccctagcggatcctccggtcgtcaacataagtgatgatgaagtagaagaatccaagcgcacctattccaagattgagtggggagccactcaagatgatgaagacgagccggacgagccttcaatcaactccgttcattattgaattaagaaactagtcttcatgatacaatacatgcatccaatagaattagagaacatgagagtggagaatttaaaaatgtaataatttaatagagaaggggccatagttaattgactacatgcatgcatgccttatattatgaaacatctaaaaaaatggttgtgccttatattatggaatggagggagtatttgatattaggtccttccctaatatttttttttttttataatgagccgagagagtttgaacctggcaacaaagggcctgtttagttcgcgaaaaaaaaattttggatgtcacatcggatgtttgaccggatattggaaagaatttttggacacgaataaaaaaactaatttcataactcgtctggaaaccgcgagacgaatcttttgagcctaattaatccgtcattagcacatgtgggttactgtagcacttatggctaatcatggactaattaggcttaaaagattcgtctcgtgatttcctgcctaattgtgcaattagtttttttatttatctatatttaatacttcatgcatatgttcaaagattcgatgtgatgtttttggaaaaaaaatttggggaactaaacggggccaaaattaggcaggagcatgttaaatcatcccatgtcaaccaagttcaccacattgactcgtaccatttccttcccccattattcaatatgaaaaatgccatggaaataaagaaagaaagaaagaaagaaagatacaaagaggaatttgaccaatccccttacgaacgacgaacaccggagacagcaagagagaggccgccgagcagaagcacaaagagaccaaatgtcagcggcggactgatggcgccggcggcgagcatagttaccgcaaatgaggcagcggcgatcccgattacggccgaagcaaggttgccgccgcgagcatctgcgtccgcggctgcgtttgccgctccactgggaatatcaatcttaacctgcagggtcgatagcgtaattgaaacgtgtagaacttctcgcaaaaaaa

SEQ ID NO: 27087 - DNA, 7448 bp, Oryza sativa
ttgccggtgaagtcgttccccccgccaaggccgccgccggcgtggctcatgcgcagaaaccaatcagcggatggcgcggcgagctcccgcgtgtagccggtggcgcggccgtcggccaggacggcatccgccatctttgattgcgccattaatttggctcttgatcgggcttggtggcgtctccgagaccggggggactggaacgagaccggacgaacacctgcaagctgcagctagatagcgctcgagctcgcgatgctttgcgaggttagccatggcatcgcatcgctttataatataaacggggacagcgatccctaccacttttgacacattgcaactttcggaatgagacagtttattatcaatcatcttcgtatgattccgaatttctgacaagaacagcctttgaatttttagccaagggtcacttgcagaatcccatcaacactagtactatcataatctttatatccaaaatagggtgctttgtttcagctttgttcggctgcagcttacaataatgctacttctgatgttattattcaattgtagaactatacaggagtgtctctcttttctcgagttatcaacaacaggaatttcaaatgaacagaaagtgggggagagatgtatagacaatttctctcgtgctcagtcaaaataggagaaagcattatttgttccatacaagtactcctcggtgtaacaatatataattgtagtgccatgttctctcagacaaaaattagtagcagcaatatacagtatatagttcgatgggcaatcacttctggattttctcaaatcgcatatcttcgtagagctatcacgatcaaaagcgaaagataacggatttgaccgcctgctccaaattacgagtatatcaacaatccctttcgaaattgcaggtggtagaaagggtggattataagccactccagctagctagcactaattaatcgtcgatcattgataattcagcacttgtatgaatcttatcgtcgatcaagtatactaattaatcgctccctgatttttaatgcccttggagccagcataccttgaagggtactagagactagacttggcattttgccaattcgccatgcgttcatcttcatggatctatgcagcttgtatatatgcatttgggtttatgataccgttgaattccttaactgtgcatctggactatatataaaaagttcaatcacgtccttgcagcccctctatctcctttcattttcttttaattttaatttcccgagaattaagaaaatgtcacgtcaaatcttgttgaactagaccgcaatgcttaggcccggtttagtttctaactttttcttcaaactttcaacttttccatcacatcaaaactttcttacacacacaaacttttaactttttcatcacatcgttctaatttcaaccaaacttctaattttggcatgaactaaacacacccctactcacacaaacttccaacttttccatgacatcgttccaatttcaaccaaacttccaattttggcgtaaactaaacacacccttactctcttaaataacttggggtcctcttgacgttcaaaagaaaatgaaaataaaatctgtgctcttcttgtaaaactaaatcatcatttgatccaatcctctcttttcttgttaaaagaaaacaaagttggacaaatgttgtttatttgcctccctgtatgatatctccagataatactgcggcgcgatactgcacacaaatgctttcccttctttctttaaaaaaaaaagaaaaagaaaaggaaagtgttgggatgaccgaaatagaaagtttatttggaccaatcgacgtggacagtcacatgtctgtcttcatggcatattacgttggataaactaatcatttaatcatctctttgtctagtaagtacttatcttttctctaactgctggcagtccagatcaaaatgacattttcccttccttttacctttgttcttttcctatatagcttgtgaattttgtggtagactaatcttatacttcaatataagccagtaaaagctggatctctcaaaacgaaattgtattatctaaataacatatacatcatcgtcaactagttatatagatgtcgacccccctgcaattggtggtttgatcttaagttctgaactgttaaggctgtgtttagttcacgccaaaattaaaaatttggttgaaattgaaacgatgtgatggaaaagttgaaagtttgtatgtgtaggaaagttttgaagtgatgaaaaagttaaaaatttaaagaataactttggaactaaacacggcgtaagtctctctatacatttttaattaatgaggccacaaaacgatattaatttgtttagagcagcaatagagattttctttactgataaaattaaatttcatcagatttcacgaaccctacgcgttgtttcgggcgatcggacggcaccagccggtccctttgacgacacgcttcagctgaattcaattgtaatctgaacaattgcagcaaaaacagcagtatgttctcccaaccgctgagtcggttccaaggagctaattcgtactctctctccgtttctaaatatttaacgccgttgacttttttaaatatatttgaccattcgtcttattaaaaaaatttaagtaataattaattcttttcctatcatttgattcatggttaaatatacttatatgtatacgtatagttttacatatttcacaaaagtttttgaataagacgagcggtcaaacatgtgctaaaaaatcaacagtgtcaaatatttagaaacggagagagtatttttttttaatcccaaatgtacatcacggagcatgcgaatataatactagcaccacaacgtcgttttaatcagcctgtgtcatggtcatggtctatcttttcatccgcacaatctgaacctcgcctacttgttggcactataacctgaagaaaacaccatccatcatctcccttgtttttcccatgaaaagaacactagtctttttcgtggaaattgtagctgatgcgtccgtctgccgctcgacaaattttcaatcagcaacaaaaatgatttgatactactgaaattaaggaactaaactttcatttggttggactattgcagattgcattgcgtgtagaatgtatgctgaattgtactggattaaaggttaaattaggattatcaagattcggctaagcctcatctaatcggcaaaattaatctctgttaacactgcaagatggatgccaagctaagtttatttcgggtattcatttgagaattcgagaaattttggcgcaagacccatttcacaacgaaacgaaagctttttttgttacacgtgaacacaacgaaagcttttgacgactcaactaattaactagctatgagactgaggacaaaacgtccttttctattcttcttaaaattgacttgaagagctcaaatcggataagggcacacgcattagcctcttgccaacttgcagtactagaaaatgtctgaaatgttcttctgcctcttttcttttggacttccacggcagagcagacaaaacctcaagaattgaaacgtgttgtgttcatcctattgatactatcagcctatcaagatggagtactatgctttggtacacacaaatttattttcgacaagatcgtataagatacaattcagttcctcataaattaacagcaaaattcagcatggacttgtaaattcacctcaacactacattctgaaacataagatgaaaaacatttcggaaacatcagatgaaaaacatttcgtgtagcaccaattgatcgatcacaccaacatccattattgctaaaccgcagatgaaggaactgataatctgagatagcatctgatattattgcttcattaacatatataggacaagatcttgtacaagtggcgttggatctgacccatagtttgacatgtcgcatcactgtaattgttaatgaagcaccatgtcatgctatgaattcggtccaaattcatctgtaaaggatccgaatcctacaaaattattccccaattttcgtcagatatcatcaaccagctgattctcaagaacacgggagacagaaactaagaggccaccaagcagcaggagaaaggcaccaaacgccaccggcgggctgacggggccggcggcgaccatggtgacggcggttgaagcagcgaaaatccccaccacagttgacaggttgccgccatggccgccgccggaatctgcaccggccgctaccggcacctccttggcaccgacaagaacatcaatggcaacctgcaaaatttgaacaattgatggattgattctttgtagaagagaagcagctcgagagtaagaaatggtggccatcgaatttggctcgctagtctacctgctccgagtgcggggcggaaggcgccgggcggagagccttgtcggtgcgcgcgccgtgctcgtcggccgcgacaagcccggcgaagggcggcgcggctgtcttgcgcgcgaaggagtagtcgtcggagaagaatttctcgtccaggagaggtgtgtcgatctcgcgcagcccagcggggtgattgtttcccaggagggcgtcgccgaatgacatgccgcgttcacgcgcgaacacgtcgcggtgcttgtcgaggaggaggaggaggaggaggagaggctcgccggtctcacgcgggaggaggtcggactcggacacgccgcgctcgagcgcgaagacgtcgttggcgttggtgccacccacggtcagcccgccggcacgggccatgtccactagcggcgcaccggtctcgcgcttgaagaagaggtcggacacggccagaccggccggaccgttcttgctgaggagggcctcgcgggaggacacgccgcgctcgcgcgcgaagacgtcggcgccgtcggtgtcggccacggttaggcgtggccgcgcgtcgcggtcggcgaacggcgcgcggtgatcgcgctctaggacgcgcgccccggcggcggcgcggtccttgtccgggataaaggcattggtgacaggctctcggtctgaagcgctattattgggatatgccccgacagggacacggacaaactctccggagatttcgcccatattttggggcacgatcgagcacagcagcaggaaagcagtttgttttgcgtggtggttagccgtggtgagctggggacttaggatttgggggctaagaaatagtaggggggacagccggacaggtggccccgttgaattgcagctcgacaagtgtcccggcggctgccaagtgacacgtggtggtgccgcctgtcccaaaattaggatgcaagtggaacgagcaagcacgttttcttacttgcttatcgcacttaaaagattttttttttaagaaagaaagtgtactctcacatagacagtgaattagtaaacgagcttttatataggtatataacgagattgtccacttgtatatctctagtgtagcttcctcttcatttagaattgctatatatcttctttccgataagatggatggtagaaaatcgattttcaaatgtatcagaattatgtttttaactttctatgaacacaaagcaataaattcatgaaggaaggattggaatcctgcagcaaaaaacaaaaggataaagacagtattttgctttcactgttagagaagtcggctgtatgcggtgatctctcttaaaaaactgatgatcaggtgataggtgacatgatgttaacctaattaaaaagaaatgaagtaccaaggtggaaggagaataagattaggtagctattttaatctctctgaccaaagtagttcttaatccctcggtccacatatatagggattttgtgttcaatcttatacgtaaatataagagattttaagtattacttgttcgatctaatcacccttcacttaattttcgttcagtcgtattcccagtttccaaactatcctctcacccttcaactattatcttattttttgaggatcatcatagttttttttataagtaaatttcactttaggccacttatattgacctaagttgcacattgggctaggggtgggtcacttttttcactttacaccacctatttttaccatcctttgcaagttggaccaggtttactgattgggccactaggctgggcttcagcccacgcaagtaggtgcgtttaccagcggtcggcagtcctcgtctccgggctccagcgagggctccctcgacggcggttctgcctccctctctagtacgagtacttccctcccaacacaaaaaagtctctgttcacacacggctgttgtgcagcggcgtgaactcaacaatcgacacacaaacaccaccgtctaggtccaccgtccaccggcgccaaggtggagcaagtctcgtcatccggccgtgtcgccagcgtcaggccaaagggcctctgcctggtggacgcccatgccacctcgatcgggaagctgcttcccgaggatggaatcactggggtcgtcagctgcctcgttgctaggatgcttgttgggtttatgaggtagacaggtatatgcatccgcgatttgatcatggagtaatccatggaggaaagttttgaccctgggacttgggagagtgaaacaaagcaacgcattcagtaattcctatgagatttgggttttgtggggataatcaatattcctcttctgctcttcgaaaaaactagagtaattaatctgtgttcctcggttggtaaccagaaacatgtcgaattttcacaagaaaattaaagagaagatcggatcttgattactgctaaatggaatagttggtcttttttttatttcacatgcatgatctgaatgggatagttctagtatggtctcagatcttgtcaacgtaatcagatgtgccgtagtattgttttgagcgcgacagggccgagcgtgatcaccacagggtccgcgtccactggacgacaacatgctcgccctcgccgatgaccacaccaacgcgtcgcgcgcgctcctggtatcgcgcaccactgccaccatgagcgaacaccagctgctcgcgtggattaggtcgaaacgcagcccatgccgtaaacctggtccaacctggaaaagattgtaaaattaggtggtgttaagtgaaaagagaaacttagccctagcccattatgccacattggtcaatataggtggttcaagatgaaatttactctagttttttcacactaatcttaatatttctaaaagagcctacgatcatttgcatttatggttggggagggagcaattaggagtagtttaggggctgtttggttttcagggacttattccaagtccctgtcacatcggatgtttggccactaatttagagtattaaacatatactaattacaaaacccattccataagctcggg

SEQ ID NO: 27088 - DNA, 982 bp, Oryza sativa
gccggcaaggtggattaggcgcgcaactatgcgggtctgacgacagtggggaggtgcggtggccgtcgcccgtgcggatccaacgacggccgtcccctcgtgtgtcgccggcagatctagttgtgggaacggcctcctcctctgtcacatcctgatttttgtttcaggttttataaattatttaataaattaataatataatttatattaaatgatctttaatttataagtgaagttaaatgtgggaaataaaatttcctaaatataaagcatggatggatttaatttttattaaattctccatgattaagtcaactctctgaaattttctcggatttttcggagctcaattcctaaatgatacaaagaacagttcagtaattatttgatcaataatgatctaattatatttgttaagagcttttcttgtttaaaaatccttaaattataaattgttgtttaaaaaggaattattagaaatgattttaaaagcctagaagagaagatctagttttaatttgttaaatctcaatataaaattgggttagataaaattttgttaaatactttgcttaattctataattcctagatttttctgggatttatttgagctaaggaagtatttttaataaatggaattgcatttcatgaataattttaattgaaaaaggtttttaaaagtctgttttggctttgggccgaaagtcggcccaaaacctctctcttccttctctctctcttctcggcccaagccggcccagtccgccgagccgccgctctctcccgctcgctgacaggtgggtcccacttgtcagattcgtcttcctcgcgccgccgcggccgcccgaaaccctagcgcgcaagcgccgccatctccttccaaatccggtcgatcctttcccgatccggtgaaatctttggaggggaaatgatcctctcgacctccttttccttttcccttttggaatcatcgcctaatt

SEQ ID NO: 27089 - DNA, 9869 bp, Oryza sativa
tgaccggattgaaaaagttcaaaaagcatccaaacattatttttggacaaattggagtctattgggtgcgttcgtggcaaaaactcacttcgtgattcgcgcggcgaacttttctgaattaatgccaatactgcacacgagggtgcgatgtttttgaccggaatgaaaaagttcaaaaagcaccaaaacatgatttttggacttattggagtgtattgggtgcgttcgtggcaaaaactcacttcgtgattcgcacggcgaacttttgtcaattaatgcctattttagaatatcctgagcccccacatgtgcgatgttttttgagcggaatgaaaaagttcaaaaagcaccaaaacatgatttttggacatgtttgagtgtattgggtgcgttcgtggcaaaaactcacttcgtgattcgcgcggcgaacttttgtcaattaatgtcaatattggcatatattgagcccccacgggtgcgatgtttttgaccggattgaaaaacttcaaaaagcatccaaacgtgatttttagacatattggagtgtattgggtgtgttcgtagcaaaaactcacttcgtgattcgtgcggcgaacttttaccaattagtgttggcaaaaaactcacttcgtgattcgcgcgacgaacttttgtcaattaatgccaatattggcacacgagggtgcaatgtttttgaccggaatgaaaaagttcaaaaagcaccaaaataagatttttggacatattggagtgtattgggtgcgttcgtggcaaaaactcacttcgttattcgcgcagcgaacttttgtcaattaatgccaatattggcatatattgagcccccacgggtgcgatgtttttgaccggattaaaaaagttcaaaaagcaccaaaacatgatttttcgacatatttgagtgttttgggtgcgttcgtggcaaaaactcactttgtgatacgcatggcgaacttttgtcaattaatgccattattggcatatattggtacacgtgggtgcgatgtttttgaccggaatgaataagtttaaaaaccacaaaaccatttgttttagacatattggagtgtattaggtacgtccgtgtcgaaaaatcactccgtgactcgtgcggctgatgaaccctgagttccacatgacactcaaagctgttgttggcccgatctttcgatgagttgagataactacgatttggaagaaacgttgacgacccgactacaaccgtacaagacgttgtgttgcgccttagcgatcgatacacctctccgtaggttgttgatcttgccggtgcaaagcaaccctattcctgcaagcaaatcgaagaaacaagcaagaacaagataaaagcaatttgaattgcaaataggaatgaatgcacacaataagttggggtttcggatacaagcagacggacggtctagccgacacgcgcgctgcaaggaagtagcaatggctaaactttcatctaaacaaaagccaaactaaccctgaaggggttactagctatttaagggatgtaggaggtcagaagggcgtcctccctctgtttggagcgcagccccccttgggccccacttgggccggggtcccagacgaaattacaggcccataggcccattacagacaatgcagccccttgtttcttcaattgccaatgactcagatagaatttgacaatgaggttggatccgttggaaggaggattccgagagctttctatcaagtactcgtgggcccaaaatgaaggccatatggagattttgcgaccgtttgaattcaacactatctcaagtggtcgaattggattctagaatgcggcggacttcatctctatctctgcatgcaccatggccgtcgtctttatcttccatatgcagccccaaataagtggattggtcctgaacatataaacgcatacatttatgaggtagtgtcatattcttgattagattaaattggcacttgttatgaaacgagaccacctgtgggtatatgacatgatcaatggttgtatccgtcgtaggcgtggtcacatcatcggcagactttgtcaattaataccaatatttgcacacatgggtgcgatgttttcaactggaacgaaaaagttcaaaaagcagcaaaacatgagttttggacatcatggagcggattgggtgcgtccgtgttgaaaaattactccgttactcgcgtgaccaacttttgtcaattaatgctgatattggcacacgtgggtgcgatgtttttaaccggaatgaaatgttcaaagagctagcaaatattggcctatgttggcacacgtgggtccgttgtttttgccaattaatgtaggtattggcctacgatggcacgcgtgggtgcattggttttaacctgaacaagaaaaaacagttaaaaaaccagaaaaacatgagattttgacttattggaatggattgggtgcgtccttgttaaaaattcactccgtgactcgcgtggcgaactttgtcaattaatgccaatattggcacacgtgcgtgcaatgtttttaatcggaacgaaaaagtttagaaagcaccaaaacatgtgttttggacataatggagtggattgggtgcgtccatattgaaaaatcactccgaaactcgcgcggcgaaagtttgtcaattaatgccaatattggcctacattggcacacgtgggtgcgatgtttttagccggaaaataaaagttcaaaaccacaaaaacatgagttttggacatattgcagtagattgggtgcgccctcgtcgaaaattcactccgtgactagcgtggtgaacttttgtcaattaatgtcgatattggcacacgtgggtgtgatgtttttaacaagaacgaaagattcaaaaagaactaaaacatgagttttggacatattggagtggatttggtgcgtccgaatcgaaaaatcactctgtgattcgcgcgatgaactttttcaattaatgctaattttggcacacgtgggtagcggatccaaaattttcaaaatacacgaaagcatgagttttggacatattggaattgattgggtgcgtccgtgtagaaaaatcactccgtgactcgcgcggtgaacttctgtcaattaatgccgatattggtacacgtgggtgagatgtttttaaccggaaaaaaaaagttcaaaaaacagtaaaacatgaattttggacttattggacttgatttggtacgtccgtgtcgaaaaatcactccgtgactcgcgcggcgaacttttatcaattaatgccaatactgcactatattggtacacgtgggtgagatttttttaaccagaagcaaaaagatcaaaaagcaacaaaatatgagttttggacatctcgtagtggattgtgtgcgtccgtgtcaaaaaatctctccataactcgcgcaacgaacttttgtcaattaataccgatattggcacaatggtgatgaaccctgagttcctgacgacactcaaggctgttgttggcccgatctttcggtgagttgtgataactacgatttgggagaaacgttgacgatccgactacaaccgtacgagacgttgtgttgcgccttagcgatcgatacacctctccgtgggttgctgatcttgccggtgcagatcaaccctattcctgcaagcaaatcgaagaaacaagcaagaacaagataaaagcaatctgatattgcaaataggaatttaatacaaatgataagttggggttccgaagaacaagcagacggacggtctagccgacacgcgcgctgcaagcaagtagcaatggctaaactttaatctaacaaaaacccgagaaaccctgaaggggtaactagctatatataggggtgggaggacgacctaggggtgcctagggtcgtgctccaccagcttggggcgcaccccacatgggccccacctgggccggggtcccaaatgaagttacaagcccataggcgcattataggtgatgcaacaccttgttcctgtgattctggccacacgagatagaattcagagaagaggctggatccgttagaaagagggctccgagagcttttccatcaagtactcacgggccgaaaacggaggtcgtatgcagattcggtggccgtttgaagtcagcagtgtagtaggtggccgaatcggattccagcacttggagtacttgatctcgatatcttcttgttcatccatgatgtgagcaatggttgcatccgtggtagccatggtcacatcaaatggcacacgtgggtgctatatttttaaccggaacaaaaaagttcaaaaagcaccaaaacataagttttggtcaaattggagtggattgggtgcgtccgtgtccaaaaatcactccgtgactcacacggcaaacttttgtcaattaatgttaatactggactacattggcacatatgggtgagatgttttttaccggaacgaaaaagatcaaaaagcagctaatcatgagttttggacatcttgtagtggattgggtgcgtccgtgtcgaaaaatcactacgtgactcgcgcggtgaactttttttcaactaatgccaatattggcctatattggcacacgtgggtagcggaacgaaaaaattgaaaggtacaaaaacataaattttggacatattggatttgattgggtgcgtccgtgtcgaaaaatcactccgtgactcgcacgatgaacttttgtcaattaatgccaatattagcacacgtggtgcgatgttttctcatcggaacaaaaagttcaaaaatcaccaaaaacatgagttttggacatatttaagtgtattgggtgcgtccgtgtcgaaaaatcactctgcggctcgcacggcaaactttcatcgattaatgccaatattggattatgtctacataactatctcgtagcaaagtgcgggctatcaactaattaaaccttccctccggcgtcaacatcgtcacaacgtcattcttattcgtgccaaatttaggtggctttcccagtttatccgcatgtccacaaattaatcccgcatgctcttggcatttacccaccagacgatcacatcacccgctccatttgcaacggagctccttactctacctcgacttgcaaccgaccaatggtcgccgtttgttgggacatccatacccatgcattctggatacgctcttctctcctccgtcttgctcgtcctcctggcgctctccatcatcacactagtgccacgcatgccatcaccgcagtcattcttccgatctccaccgcctcgcctgatcaacagtagggttcctcatccatccgatgccagcgattgtattttctccgacggtaaatgggtgagggacgccgcggcagtgactgcttaccgggaggactgcccgtttcttgaccctggtttccagtgcatcagcaacggccggagcaactcatctttccgctactggcgatggcagcctcatggctgccagctcccgaagtaggtagccatcgccaatgacatctttgataaattagtaatttcttttctgtggtttttcatgatgtggacatttttcagttacttgcattgccactcaatcttcaattccaaatgatttgaggtgtttaggttcaatgcaactgatatgctggagaggagccggaacggcagaatcgtgttcgccggcgactcgatcggccgtaaccagtgggagtccatggtgtgcatgctcgccgcctccgtgccagcggggaagtcaagaatatatgagcagtccgggaaacccattagcaggcacaaagggtacctcgccatggtcttcgcagactacaacctctccgtcgagtactaccacgccccaatgcttgtcatgatcgaccgcttcccggcaagcagcggtgccgtcaggggagcggtccggctggacatgctgcctcggcacgccaaccgttgggccggcgccgacgtgctcgtgttcaatacagggcattggtggaatgagcacaagactatcaaatcgtaatgccaggggctgcttcaagaaacgggtgatgtgggttccaatcattcttggtttggttcctcggcaccaagccaatcccattcctttccgctggtgaccgccttcttgttgcctacctttttaacccctgttgtaaccccaagtccaagtacaaggcatacgtgctcctttaatatgcttgctcctcttttcttgaattcaggattggctaaggctctagccattaaatgtgactggggttgatccaagggctggtctcatggttttgactaggtgtttctcaaatttctgatcatatttcctgtcgttataacccccaaaatacgctaactcgcagctcgaagttcccagttacatgggcaaccctactcactatacatagggtgtgaagagacggacaacaatagtctttctctgctttcactcgagccaaactaagtgttttctaggattggccccaaagccatactatggtcacaacggtaaccccctcgatttgatttatccaatcaatcgagaggcagcatctctatcaattactcggatcggcaacctcggttctggaatgtggacttcactgaccagccgcctcttagtccacacccaacttggaagtgttattgattcgttagtaaccttcgccatcctaatacccgagactgtagtgttctaagttggttaaagccgtcgtctcctgggatgcccggctggtcgggcaagtattagtgaaacggctccgcgcaatcaataactaccctgcttaggtatgagcttccaagtcccgaatccttttgtctcaagtctgccttggtaatgtgaccacacatcctttgatgatggaagtgttgtttcccaacaatccaccccggaatcctagttggagtaatgtatccctacatactatcgcactaatgtaatcgggttctcagatcatactcaatgaggggtggctagtatcccgaaactttgaagaacatgagttaagtagttcattcacttggtttcgccaccagtcagaacgccctaaaacccagtaggttttctcgatcaccattctacgattttatttccacctgttttagaacacataaattgtgctacccttaagagtttatcactaaaatcaagaactttatttatgacctgtaagttgcctcataaaaagtagatgttagtacccgactaaaaggagggaatcaaataaaaggtaaagctctcaattaaaagaaaaagctatcgtttactttgttaagggtatattgcccgtagcgaggttaaggtaaacccttgaccgagtgaaggcgagcccggtaaagcactaagtgtattggctagcttgtactttattagctatcaagtgtttgatgtaccaattactttattgtgtcaactagtttattgaatgcaaaggtaattccctcgataattgatttaattatcaagaaagagaattagttaccctccttcctcgagctgagctatttcttgtgtattcaatcgtatgcacgagggctgtcctctcctctgctctatctcccggacaagtatgaaagtcgtaattctttgggtttttgtagtcaatggaatgagcggagggagacacatccttccatccaaaggtgtgtgtgtcccgtagcgagtggaatggctggttcggtctagtcgtatagaacgggttgagttctttttactgagtcctttcgaggctggaagtgtttcttacagtttccttttccgaagggaaagtcaagtagtataaactagtactaagtccaagaagaaggggtgaaaagtgaggagggcgattagcccgatccacttgaggggaggaaggccttccttcccggtaaaaaccaaaaaaaataaaagacaatacatatttttttaataaaatgaatggttagaacgtatttaaaaagtcaacattgtcatgcattaaaaaaatggagatagtacgttccaacgtagatatataatgcttttaaaatggattaaaatggagtagtggtggtgatgagtggtgaatctaccaccatccccatcactaactccctactttagtaattttatagtacattctacttgaagtatatatttgctgcagtatatggaagggtaggttcggtatttgttaaaaatatgaaaagtgttgtttagtattttgaaattgaagtttattttcatccggattgattttccagttgtagtattttttctgtatctcgtcatccattcgtgatatagcgcttcttcagaatttatcgcgtgtccccggcgtccttgactcccgacgcacttgcctccagccccggcgcctccatcccgattccttcatgacaaaaaaaaagttatgtccagatttcacccgatatgtctggaccaggaaacaactaaataacacgtggttttcagatggagctaatataaattaaataactattattttaggaaaaaaagttacctccggatttcatccatggctctaagtccttttccaagtgtctccttgacccctccattgttcctattcacaatataatcattaggtagcaatctattctcgaattcatacaaagaagaacataggaacgagctcacctctaaatttaattgtcgcgcacgagctcttgttatcggtccttgaatgaacgttggaggattgttgtgtgtatccgagttagtgatgttcgcatcatcctccccctcttgaattgaagtcgtcctcgactcaagctcatcctcttctcccaagtatggcttcaaattttaaatgttaaacgtgggactaaccccaaacttgggaggcaactcaagtttatatgcattatcattaatcttctcaacaattttaaaaggaccatgagcacgaggcatcaacttagactttctcaattccggaaatctatcctttcgcaagtgcaaccaaactaaatcacccggttcaagcttaacctcttgcctacctttactaccaacaattctatacttttcagtcatcttttcaatgttgagcttggttgactcatgcattttcaaaataaattcagcgcgtgccttagcatcatgatgaaccctctcactagtaggtaaagtcggcacatctattggagcaagagcattttatccatcccgcggcggaaaagggcttaccttggtagtagaatgcataggctgagaccccacgggtgcgatgtttttgaccggaatgaaaaagttcaaaaagcactaaaacatgatttctggacatattggagtgtattgggagcgttcgtggcaaaaaatcacttcgtgattcgcgcggcgaacttttgtcaattaatgccaatattagcataaattggcccacacgggtaaaatgtttttgaccggattgaaaatgttcaaaaagcatccaaacatgatttttgtacttattggagtgtattgggtgcgttcgtggcaaaaactcactccgtgattcgcacgacaaacttttgttaattaatgccaatattggcatatcttgagctcccacgggtgcgatgttttttgaccggaataaaaaagttcaaaaagcaccaaaacatgattttggacatattggagtgtattgggtgcgttcgttgctaaaactcccttcgtgattcgcgcgacgaacttttgtcaattaatgccaatattggcacatattgagcccccacgggtacgatgtttttgatcggattaaataagtttaaaaagcacccaaacatgatttttgtacttattggagtgtattgggtgcgttcgtggcaaaaactcactccgtgattcgcacgacgaaattttgtcaattaatgccaaaattggcaaatgttgagccccacggctgcga

SEQ ID NO: 27090 - DNA, 4630 bp, Oryza sativa
attccccacagtatgccaccaaaaagatgcagaaccggtacacttattactagcagccttaatcatttgagcattagaaaaatcatactcatcaaattgtttttctactgctagctcccaattaatgtatgcagcggaatcatactttccatcatagactggtaacttacatgcaacttgtgcaaaattatagtcatgtacctcatatgcatcacgtgaagaagttgtcatatctcgtcgaaggtgtagatgttgacgttgagcatgaccatcttgtttccccttgcgcaatcctgccatggttagcagcaaacaagaaacatacacaagaatatacacgctcctatcaactattaggtactggcagctcaaatgtcacacacactcaagcttttaaccaagctcttacaagatcttaccaatgcaagtggaatggtgatgtacaccgactcaaccaagcagcccaatagaggttggatatatcgatgcctcggcaaacacttgctgtacggctgcaatcaaatctgtggagctctgggtaggcttaaatatgtagcaaaggaatagcaaatgctcaaatcagagaacgcaaagttgaataattgttcaaagtcaagtaccgtgctggtcctaggctagaacgtactagagacgcgagcctagacacaaacgataccacaagatagcactaggaacaactcatgcacaactctgatatatgaagttcagctcaaacataacagtattttctcttttctttctttcttctttcttcttttcttttttttctttccttttcttttctgttttttttttggtgcggctttttttttttttttttgcacctttctgcctttttttttcacttttttcttgattttttttaacaaaaattgactcaaggaccttaatgtaagattacagggactcaaacataaatataaaatttacagggactcaaatctaaaagtctaaacccaaaattaaaattatacaaaaaatggaatgctgaatttatgccggttccgtttttccaaacagatctcgaaaccgacaccaaacaaaaattcgccaaggtgtttgacacaactcggaaccgtggaagagagggagggagtcggactcggccaaaggggcgagtgggactcggccaggaggtggagtggatggcagccgaatttggtgtatgggataaaaaggaaactaatttttaaccaatccaatctactatatctttccaaaacaatcttgactacttccaaaatcagatatggtaattcaccttcctcctctcgtgcacgacacaggcacggccaaaacaaacacacacaaggatcggcaaactctagatgcaactcaagaactccaaaactaaccgacagaaacttctgaaaactacaaaaatagaaccttggcagcgagccgattccgttttcgtaggtcccgacaacaacagagacacggtggcagcgacgactgtggtacaaaacgtgaccagaactcgaaactctaaacgaactagacgctaagaccagcaacacgacgtgacgatgcaacacaaaattcaacaaagcaaagactgaaaagaacaatgcaatggcacaatatggctaggtaaatgatacgaatttttttgtatggctattttctggttataggaagataaaaactcaccgagcaacgaaagctctgataccacctgatgaaccctgagttcctctcgacactcaaggctgttgttggcccgatctttcggtgagttgatgaaaactacgatttggaagaaacgttgacgacccgactacaaccgtacaagacgttgcgttgcgccttagcgatcgatacacctctccgtgggttgttgatcttgccgttgcaaatcaaccttattcctgcaagcaaatcgaagaaacaagcaagaacaagataaaagcaatctgaattgcaaataggagttaaatacgaatgataagttggggttccgaagaacaagcagacggacggtctagccgacacgcgcgctgcaagcaagtagcaatggctaaacattaatctaacaaaacccaagaaaccctgaaggggtaactagctatatataggggtgggaggacgacctaggggtgcctagggtcgtgctccaccagcttggggcgcaccccacatgggccccacctgggccggggtcccaaatgaggttacaagcccataggcccattacaggtgtcacagcaccttgtttcttcagttgctgccgactgagatggaatttggcaatgaggcttgatgcattggaaagaggactccgagagctttccatcaagtactcacgggctgaaaacggaggtcgtatggagcttcggcggccgtttgaagtcagcagtgtagcaggtggccgaattggattttggcacttggaggactcgaacttgatatcttgttgttcatccatgatgtgagcaacggatgtatccgtagtagccatggtcacatcatcctccccttcttcacggaaaaccgtcctcggtttttccatatggtgttcttcatatagtccattcaaaataacctgtttcatccaatcaaaactagagaaactcgaaatagtgtgattagcaataacatgtttctctaaatccaaacaaatgaaaactctatgcaccaaatatattcctctatcattatatttgccaaagatatgaaaaatagcattagttagacatggcaaatcagacttagcaaataatttctccttcaaattatcgagctcacaaaaatcatcaaactgaacatagcccaaagtatttaaagaagatagcaatttacgttcctcaacttcattaacaatatgaacagcatgcttaaaatcagcacacaaagaaacactaggaatagcatgttcatccactagttgtggcatggatataagtgaagcattatcacacaactcttctttatcacaaggaacagcgagtaaatcaacttgtgacaaaggaattccagcatttggttccactaacggttgctctacttttgcatgaaaagtggacaaatttacttcgttaacaatgcactcaccttgattaatttcagtaccatttactttaccttggatgtcctctttagatgatggaggtgtctcgaacttgagtgtgaacaatggaattggtggctctttcatgtctctctcctccttttcgtgattacgcacttcctgcaaatagttagtaattggaggcaaagacatagcgtgtttctttttcatatcctcctctattttactttcagcattgcaagcaagttgtaacaaatgagaaagagatgtatatctttgacaatcaagcatgtcctgaatttctttgttaagcccacataaaaacctcaattctttagcttcttcgcattcatctaaaccacaacgtaataaacaagcttgcatatcatgatagtatgaagtaacagttctggtatcttgttttaaacattgtagtttgttgaacaaaatgtcagcataatacatgggaacataaacatctctgaaatatcgtttcaggtctttccaagattgtggtattttgttatgcctacaaagatgtttccaatcattagaagcatgtttaattaaaacactagaggcacacataaccttttgtttctccgacaagacatgcttttgaaattcactatcaaccgctagctcccaattaatgtaagcacgaggatcatagtttccctcgaaataaggcagtgcagatttgatcttacctagaacatcatcacttacctcataatggtcatgttgatccctcctcatgtctcgacgaagatgtcgatgttgagcacagctatccccaattatcttgcatatccctgccattgttagtagaaaacaagaaacatacacaaaaatatgcgcgttcctattaactactaggtagtggcagctcaaaaatcgcacacactcaagcttttaaccaagctcttacaagatcttaccaatgcaagtggaatggtgacatacaccgactcaaccaagcaccccaatgaaggttggatgtatcgatgccttggcaaacacttgcggtacggctgtaatcaaatatgtggagctctgggtaggcttaaatatgtagcaaaggaatagcaaatgctcaaatcagataatgcaaagttgaataattgttcaaagtcaagtaccgtgctggtcctaggctagaacgtactagagacgcgagcctagacacaaacgataccacaagatagcactaggaacaactcatgcacaactctaatatatgaagttcagctcaaacataacagtattttctcttttctttctttcttctttcttcttttctttttttttctttccttttcttttctgtttttttttggtgcggcttttttttttttgcacctttctgcctttttttttcacttttttcttgattttttttaacaaaaattgactcaaggaccttaatgtaagattacagggactcaaacataaatataaaatttacagggactcaaatctaaaagtctaaacccaaaattaaaattatacaaaaaatggaatgctgaatttatgcccggtccgttttccaaacagatctcgaaaccgacaccaaac

SEQ ID NO: 27091 - DNA, 9147 bp, Oryza sativa
atatcctccgtcttcttcacaccaaagtgtcccatcagccctccaccatgcgcttcctgcaataatagcatacgcacggagctagctggaatgcataacttattagctctaaacacaaacccattggtgagaacgaatttgttccaagtccttccctccttgcaattcaacaacacatctttaaaatcatcatcgtgcgcatattgctcttttattgtttctaagccaaaaattttgaagtcaagttgggatagcattgcgtaacgtctagacaaagcatcagcaatgacattttcttttcccttcttatgtttgatgacatatggaaaagattcaataaattcaacccatttagcatgcctacggttaagttttgcttgacttcgaatgtgtttcaaagattcatgatcagagtgtataacaaattctttgggccataaataatgctgccatgtttccaatgttcgcactagagcaaacaattccttatcataagtagaataattcaaactaggcccactcaatttctcgctgaaatatgctacaggtttgccttcttgtaacaacacaccacccaatccaatcccactagcatcacattcaagctcaaaagttttgttgaaatcaggaagttggagtaaaggagcgtgtgttaacttatctttcaaagtgtcgaatgcattcctttgtgctgcagcccaagtgaatgtgacatttttcttggtaagctcatgtaatggggctgcaatggtgctaaaatccttcacaaagcggcggtagaacccagcaagtcctagaaagcttctcacttgtgtgatcgttgttggaaccggccagctatgtatggcttcaaccttggcttgatctacttcaattccctgcggagtcacaacatagccaagaaaagagactcgatctgtgcaaaatgtgcacttctcaaggttaccaaataaacgtgcatctcgtagagcatcaaaaacagcacgcaaatgaccatgatgatcctctattgatctgctatatatgagaatgtcatcaaaatataccaccacaaatctgccaatgaaagcacgtaaaacttcattcattaatctcatgaaagtactgggtgcattagtgagaccaaagggatgactaaccactcatataggccgaatttagttttaaaagctgttttccattcatctcctaacttcatgcgaatctggtggtaaccactacgcaaatcaattttagagaacacaagtgaaccactcaattcatcaagcatatcatctagcctagggataggatgacgatatctgattgtgatgttgttaattgctctacaatccacacacatgcgccatgagccatctttcttaggaactaaaagcacggggacagaacaaggactaagagactcacgtacataccccttgtcgagtaactcttgcacttgacgctgaatctcctttgtttcctccgggttggtcctgtatggcgcacggtttggcagagaggccccaggaatgaggtcaatttggtgctcaatccctcgaattggtggcagccccggtggaacctcctttgggaaaatatcagcatactcctgcaaaaggttagtgaccggaggaggcaaagaaataggaatatcctcaattggaaataaggtttctttgcaaaccaaatcatagcaaacaacagtgtcagtgtcaacttcatccaaatctgattttgttgcaatgaaacaagatcccttcagcttaatctcatttttattattttgaacagagttggtgggtttcttcttatgcttctcaagttcattagccgcaataagatgctcactcctagtacgctcctgatttttttgtttgctagctctagcaagttcatcctttaaaataacttcaggagacatatgatgtaacacaagtttttttccattatgcacaaaggagtattgattggatttgccaaagtgtaaagaatctttatcaaactgccatggcctacctaataacatagaacatgcttgcataggcacaacatcacagttgattgaatcatgataagaaccaatggcaaaatgtactcttaccaatcgtgttacctttaccttgccgctgctattaagccattgaatatagtaaggctgtggatgtggctgtgtgctcaatgcaagtttctccaccatttcagcactagccaaattattgcagcttcctccatctatgatcacgcggcaagagcgttccttgatcacacacttggtttgaaacaaggtgtggcgctgattctgttcagccctttccatttgtgcgcttagcactcgctgcaccacgaggctctcatagtgctctgcagcttcagccccaatgtgttcctcatcttggtgggacgcgtcaccttcccctgcattgttagttgcaagcaaagcataggtttcttcatctaaatcactagcggaggagtacccaccatcagctctcacaatcattacacgagtgcttgggcagtccttgcgcacgtgaccatagcccctgcagcgtaggcactgaatatctcttgtccttcctgatgaagctactgatgatgagctcttggaaggtgtagcagcaacccctcttgttggttcactcgggcatggtgtagagtttgttgtagagggacgcagcttgttgcttgaggatgatggtgctgctgctcgagttgacggtgcagcagcgttagaagatgtccaagagctagcacgacctgcagaaatgttagtcctgaagctagctcttcgtccctgtacttccctttcagctttacaagcaagatgaaacaaacgattaattgaattatattctttgtaggctagaatgtcctgaatttctcggttcagcccacccatgaatctagccataccagcatcatcattttctaccaatccacaacgaagcattcctgtttgcaaagcttgataatactcctctacagatttgtttccctgtctaagttgttgcaatttgtgcagcaaatcacgtgcatgatatgaaggaacaaatctagctcgcatgactcttttcattgcatcccaggtttggggagtgttatttggattggaacgaacaaattcactccaccaaatggatgcaaaatcagtgaactcactagtagcagccctaacacgtttattctcaggaaaatcatggcaagcaaatttctgatcaatggctaactcccatgtaagatatgcatcagggtcatattttccatcaaagcaaggaatggtaaacttgatcttgcctaaagaatcatcattatcacgtacctcccgccgtggtggagcgcccatgccatggcgctgccggcgttgttgtctttgtggacgaccaagtacctcctcatcatgctcagtgtcagcagcgtactccagttcttcccttgctgcgatgctgctattagcatcatggccattgtggttgcgcctagccgatccatcatgaccttcttggcccattctctccaacgtattcaagatacctgcaagagaagtgttcacagccacaagggacctctccaatgaggaaagcttggagttggtgtcaatttgagcggcctccaattgaccaaggcgatcattggcgaccctaacatcctcatcaaggccttcagcatgctccctcacttggcgctcaaaatgttgtatgatgcccctcatacgtggtgaatgttgagggtgctcccccgatcctcctgtcatggttaatggaaagaaacaattcacaagaaatatgtcctatcaactattgaagctaggtgttgtccatctccacttctaccaaacttgtgcaaacgagttcttacatgttcttactttgttatgtaaaaggcgttggcaaacagcaagaacagcaacaacggttagtagtaccggagccgacaacaagcacgatcctgtgatatagtagataaaaatttgtggagctataggtggctgcaagtaatatcaaggtacagctagaaccacatgaatcaaagcaagttgaataatcattcaacgatggtattgtgctggtcctaggcaaaaccctttagagacgcgagcctagtcacaagcgtagccactcaaaatagcacgaaaataacacaaacaaaacagcaacaacaacaacttcctctcttcccttccttttttttttccttctcttcatttctgatttttttttctttcttttttttttgttttctttctttttttttgtacagcaagctcaaagcttcagccaacaagtcaaaacaagaagtaatgatgggttggttggctagttacatgattcagccaacaagtcaaaagtgagagcacttaaatgctttcttgggaagggctgattcacttcaaaaagttgcaaaagggttggctgttggtggaggcagcaataaatgcatttgggggtggctgatgtggtgatgagggtgctgctggttgtggtggacgaaatttggtggggttggaggtggatttcgtggtgaatatggtggtgatggtggcagcgggatgaagataaatgaagtgatggtggaagtgtttgcggtgacgaattcgtgagcagaactcgaaactctaaaggactaaactactagaaccagcaactcaaccaatcgatgcaatcgaaaactcagcaagcaaagactaagtagaacagcaaaggctcaacatgttttggtgatttcgggtctgtcctattttagtggtttttcttttgggctgtaggtaaaaacaaagaagtgataaaatctctcaccgagcaacttgagctctgataccacttgatgcagcaacgggggttcccgatctttcgatgagaggagggtaaacttcgatttggggaaggatacgacgttggcggtccgactacaactaccacaggggtgctgcgccttagcaaccggtacaccgactccacgttgttgctgttcttgccgtgccaagaacaaccttgaacctgcaagcaatcgaagaacaagcaagaacaagttgacaaggaaacagctcacggcacttgtcaaatgatgaaacttaaacaaaccaaaatggggttctgaatacaagtatccgggtggtctagccgacacacgcgagtacaaggaagtagctgcagctaaacttacatcaaaacaaaacccaaagtgcaaaatggtggctgctaggagtttatataggtggaggaatgaccaggagaggaggtgggagcaaaccctaggttttgtggacccctaatgggctgtaatgatacaaggcccaagcccaagtttctgatgtaaagaactattttcgtcattctgagcagcctgggtcaaagttgatggtgaggccacacatagctgaaagtagacgacgagatctttccaacaagtactcatttgccccgtttgccctccggagtgaagagcattgacttcatcaactcagcgctgctagtgctgcttgcgatttggttcctcttccatattcctaacaacaagtagatcacaacaaccatttagtagcacacaattctgagaagaacttgtatgattagctaggaatgactttacctgataattaagttcacgagctcgagctctagtcattggtccttgctgtgcaataggtgtggttgtatcgttggaagggatgtcctcatcatggcatatattggcccacatgggtgcgatgtttttgaccggaatgaaaatattcaaaaagcacaaaagcatgatttttggacatattggagtgtattgggtgcgttcgtggcaaaaactcacttcgtgattcgcgcggcgaacttttgtcaattaatgccaatatcatatattgagcccccacgggtgctatgttttatgaccggaatgaaaaagttcaaaaggcaccaaaacatgatttttggacatgttggagtgtattgggtgcgttcgtggcaaaaactcacttcgtgattccgacggagaacttttgtcaattaatgtaaatattggcatatattgagcccccacgggtgcaatgttttatgaccggaatgaaaaagtttcaaaaggcaccaaaacatgatttttggacatattggagtgtattgggtgcgttcgtggcaaaaactcacttcgtgattcgggcggagaacttttgtcaattaatgccaatattggcatatattgagcccccacgggtgctatgttttatgaccggaatgaaaaagttcaaaaggcaccaaaacatgatttttggacatgttggagtgtattgggtgcgttcgtggcaaaaactcacttcgtcattccgatggagaacttttgtcaattaatgtaaatattggcatatattgagcccccacgggtgcaatgttttatgaccggaatgaaaaagttcaaaaggcaccaaaacatgatttttggacatattggagtgtattgggtgcgttcgtggcaaaaactcacttcgtgattcgcgcggcgaacttttgtcaattaatgccaatattggcacacgagggtgcgttgtttttgaccggaatgaaaaagttcaaaaaacgccaaaacatgatttttgcacatattctagtgtattggcaccattcgtggaaaaaactcacttcgtgattcgcgcggcgaacttttgtcaattaatgtcaatatttgcatatattggcccacacgggtgcgatgtttttgttcggaatgaaaaagttcaaaaagcaccaaaacatgatttttggacatattggagtgtattgggtgcgttcgtggcaaaaactcacttcgtaattcgcgcggcgaacttttgtcaattaatgccaatattggcatatgttgagcccccacgggtgcgatgtttttgaccggaatgaaaaagttcaaaaagcaccaaaacattatttttggacatattggagtgtattgggtgcgttcgtggcaaaaactgacttcgtgattcgggcggagaacttttgtcaattaatgccaatattggcacacgagggtgcgttgtttttgaccgaaatgaaaaagatcgaaaaacgccaaaacatgatttttgcacattttctagtgtattggcaccattcgtggaaaaagctcacttcgggattcgcgcggcgaagttttgtcaattaatgccaatattggcatatattgagcccccacgggtgcaatgttttatgaccggaatgaaaaagtttcaaaaggcaccaaaacatgatttttggacatattggagtgtattcggtgcgttcgtggcaaaaactcacttcgtgattcgggcggagaacttttgtcaattaatgccaatattggcacatattgagcccccacgggtgctatgttttatgaccggaatgaaaaagttcaaaaggcaccaaaacatgatttttggacatgttggagtgtattgggtgcgttcgtggcaaaaactcacttcgtcattccgatggagaacttttgtcaattaatgtaaatattggcatatattgagcccccacgggtgcaatgttttatgaccggaatgaaaaagttcaaaaggcaccaaaacatgatttttggacatattggagtgtattgggtgcgttcgtggcaaaaactcacttcgtgattcgcgcggcgaacttttgtcaattaatgccaatattggcacacgagggtgcgttgtttttgaccgaaatgaaaaagatcgaaaaacgccaaaacatgatttttgcacattttctagtgtattggcaccattcatggaaaaagctcacttcgggattcgcgcggcgaacttttgtcaattaatgccaatattggcatatattgagccccaggggtgcgatgttttatgaccggaatgaaaaagttcaaaaggcaccaaaacatgattttttgacatgttggagtgtattgggtgcgttcgtggcaaaaacttacttcgtgattcgcgcggcgaacttttgtcaattagtgccaatattggcacacgagggttcgttgtttttgaccggaatgaaaaagttcaaaaaacgccaaaacatgatttttgcacatattctagtgttttggcaccgttagtggaaaaaactcacttcgtggttcgcgcggcgaacttttgtgaattaatgtcaatattggcatatgttgagcccccacgggtgcgatgtttttgaccggaatgaaaaagttcaaaaagcacaaaaacatgattttctgacatattgcagtgtattgggtgcgttcgtggcaaaaactcacttcgtgattcgcgcgacgaacttttgtcaattaatgccaatattggcacacgagggtgcgttgtttttgaccggaatgaaaaagttcaaaaaacgccaaaacatgatttttgcacatattctagtgtattggcaccattcgtggaaaaaactcacttcgggattcgcgcggcgaacttttgtcaattaatgtcaatatttgcatatattggcccacacgggtgcgatgtttttgttcggaatgaaaaagttcaaaaagcaccaaaacatgatttttggacatattggagtgtattgggtgcgttcgtggcaaaaactcacttcgtgattcgcgcggcgaagttttgtcagttaatgccaatattggcatatgttgagcccccacgggtgcgatgttttttgaccggaataaaaaagttcaaaagcaccaaaacatgatttttgggcatattggagcgtattgggtgcgttcgaggcaaaaactcacttcgtgaatcgcgcggcgaacttatgtcacttagttccaatattggcatatattgagccctcacgggtgcgatgtttttgaccggaatgaaaaagttcaaaaagaaccaaaacatgattttttgaacatattggagtgtattgggtgcgttcgtagcaaaaacattgacgaacatttgtcaattaatgccaatattggcatatattgagcaccgacgggtgcgatgtttttttgaccggaatgaaaaagttcaaaaagcaccaaaacaagatttttggacatattggagtgtatttggtgcgttcgtggcaaaaactcactttgtgattcgcgcggagaacttttgtcaattaatgccaatattggcatatattgagccccaacgggtccgatgttttttgaccggaatgaaaaagttcaaaaggcacc

SEQ ID NO: 27092 - DNA, 5305 bp, Oryza sativa
gaaaaggacttttagagcttttctttttataaaatcattttaactttgtttatttcttaataattattatttgtgctatgaaaattccactaaaatttatttacgcattttaggcttttaggaaatatacaaaaatcctccaagccttatttgacttttaactttgcacattttaattgttggaggctttcacacggattttaattattctaggcataatttcgaggatgtattttagagtcgttttgggacgcgacaaacctaccccccttaaacggaatctcgaccccgagattcggaagaactggcgaagagatcgggatgggctgccttcagctcgtcttcacgctcccaggtagcttcttcctcggcgtggttgctccattggaccttgcaaaaacggattacccggttcctggtcctgcgctccatggtgtccaggattttcactggcctctccacgtaggtcaagtcttcgcgaacttcaatttgctctgagtcggcctgctcggatggcactcgaagacatttcttgagttgcgacacatggaacacatcatgcacgttgcccaaggaggcgggcagctccaactggtaagcgacttctccgcgtcgggcaacgatacggaaaggacccacataccgaggtgcgagcttccctttcgtctgaaacctgtgtacacctcgcaatggcgtgacccgaaggtacacaaaatcgtccactgcgaattccaggttacggcgacggttatctgcataacttttctgccaggactgtgccacctttagattatcccgaatggttctgactttagcttcagcttctctcaggatatcagtcccgaacacttggctttccccaacttggtcccacaatagcgatgtccggcatttgcgtccatacaacgcttcatagggtgccatttgtatgctggcttggtagctgttattgtaggagaactcggcataggggagactcttatcccaggtcttcccgaaatctaggacacatgcgcgaagcatatcttctaggatctgattcagacgctcggtctgtccatctgtctgcgggtgatacgcggtgctgaaatttaatcgggtacccagctcttcttggagcttcttccaaaagtgagaggtgaattggcttcccctatcagatacaattttcttaggaacgccatggagactcacgatcctagcgaagtagagctcggctagtttgttccctccataggtggtcttcacaggaataaaccgagctactttggttagtcggtccacaactacccatatagaatcatatccaccttgggtttttggaagtccggtgatgaaatccatcccaatttcatcccatttccattctggtacttggagaggttggaggagtccggccggtcgttggtgctctgccttgacacgctggcacacatcacaaagggccacgaactctgcaatttcccgcttcatactaacccaccagtatttctccttcaagtctaagtacatcttcgtactgccagggtggatggaataaggactttcgtgagcttcctgaagtatcagctgtttaagttctctgttatctggaacgcatacccgatttccgttccatagggttccgtattcatcctctgtgaaaccagcggctttaccctgtttcatattcttgaggagtccacgcatgtccggatcattcttctgagcctcgcggatttgatcgagcaaggtaggcttggcctccaacgcagccaagaatccgcgaccaactatgcttaggttcagggcttccatctgttgattaagttcgggtggaatgccacggacgttaagagtgttgcaatggcttttttgacttagagcgtcgacgaccacgttggccttaccgggatgatagtggattcccacatcataatccttgatgagctctaaccatcttctctgccgaagattcagatccgactgggtgaagatgtatttcaaactcttatgatcagtatatatttcacagcgattcccaatgagataatgccgccagatttttagagcatgaaccaccgcggctaactccaaatcatgggtagggtagttgccttcatgaggccgtagctggcgtgaggcataggccaccacatgaccttcctgcatgagcacgcaccccaatccttggcgcgaagcgtcacaatacaccatgaagtccttgcgagtatccggcaagattaacactggcgaggaaaccagcttttctttgagagttttgaacgccttctcgcattgcgggctccacacaaatttatattttttcttcaacaactgtggtcatgggtcgagcgattttggagaagttctcgatgaacctccggtagtatcctgccaaacctaagaaactgcggatttgagtgactgtcttgggttgcttccaatcgggacggggtcactgtttcggggtccacagcaactcctttagcagatatcacgtgccctaagaatttgacttcggacaaccagaactcacacttgctaagtttggcatacaattgatgttcccgcaactttcccaacaccagacggagatggtgctgatggtcttcctctgattgtgagtataccagaatgatgtgaccatggctaccacggatgcaaccattgctcacatcatggatgaacaagaagatatcgagatcaagtactccaagtgctggaatccgattcggccacctactacactgctgacttcaaacggccaccgaatctgcatacgacctccgttttcggcctgtgagtacttgatggaaagctctcggagccctctttctaacggatccagcctcttctctgaattctatctcgtgtggccagaatcacaggaacaaggtgttgcatcacctataatgggcctatgggcttgtaacttcatttgggaccccggcccaggtggggcccatgtggggtgcgccccaagctggtggagcacgaccctatgcacccctaggtcgtcctcccacccctatatatagctagttaccccttcagggtttcttggggttttgttagattaaagtttagccattgctacttgcttgcagcgcgcgtgtcggctagaccgtccgtctgcttgttcttcggaaccccaacttatcatttgtattaaattcctatttgcaatatcagattgcttttatcttgttcttgcttgtttcttcgatttgcttgcaggaatagggttgatctgcaccggcaagatcagcaacccacggagaggtgtatcgatcgctaaggcgcaacacaacgtctcgtacggttgtagtcggatcgtcaacgtttctcccaaatcgtagttatcacaactcaccgaaagatcgggccaacaacagccttgagtgtcgagaggaactcagggttcatcacagaatgtcatcaatgaaaaccacaacaaacttatccaagtattccatgaacactttgttcattaagttcatgaagaaggcaggagcattggttaaaccgaacgacatcaccgtgaattcatacagtccgtatcgtgtggtgaatgcggtcttcggaatatcttcttcacggatgcgcaactggtgatatccggaacgaagatcaatcttggagaataccgtggcacctttaagctgatcgaacagatcatcgatccggggaagagggtacttgtttttgatggtgactttattgagagctctgtagtcaacgcacatcctcttcgtcttgtctttcttctccacaaaaatcataggagcaccccaggggaaagtactcggccgtatataccccttttctttcaactcttccaactgtttcttaacttcggccagttcatttgctgccatacggtagggtcgtttgtacagaggagtggttcctggagcaagatctatccggaactcaatctctcgcttgggcggcatatcgggtagttcttccggaaacacgtctccgaactctctgacgatggggatttctgacagtcctatctgatgaagttctgaactactgacagaggttggaggtgcaaagaaaacaaccggttgttccggccctcggtacagagtgacagtgcgtcttgcacaatccactactccttggaattgagccaaccaattcatcccaaggatcacatccaagttcttggtgtctagaagaatcagatccgagggaaaagggatcccctgaatttctatagggacggcaggactataatactttgctgtcataacccctccaggggtggtgatgaggagagggttcctaaacctttctacccccaactgatttctccccacgaatggcacagatataaacgagtgggaagctccagagtcgaacaaaatggtagcagggatggaatgaatgaggaacgtaccaacgatgacgtctggagtcgtcagcacgtcctcggccgtcacgtggttcacacgaccccgaatgacatccttaccaccgttgtttgagcggggaggcgcttggccttgctggcgcctcggctttgggcatttatccgcaaagtgcccaggctcgaagcagttgaagcacagacgctgcggaccttgaacgtccctgcggccttgaccagactgcgcggctggcgtaggaggacggggcgcacgggtcccttgctggctctgctgttgctgcggctgtgggacgcgcaccacgaattgaggtcggggcgcggagcgaggttgctgctgctgttgctgttgcgaggacgatccccctggatagggattggtgtagcggatcctttggttagctccctgttgattgcggaaattcgccaagcggcgcttgtgcgactccagttccttgtgcttggcttccaagcggatgctcttgtccaccagacgttggaaatccagatagtcaccggagactagacgcacggacagctcagggtccattcctgccaagaacttctcctgcttttcctcatcttcccgtacatcctccggggcgtaccgggccaggttgttgaactcatgcaaatactccatcacggagcggttgccttgcttcaactctcggaattcccttttcttaagggccatgactccggcgggcacatgggtcctccggaaagcggcggtgaagcgggcccaagtaataggctgcccctctggctgcgtagcctggaaatggtcccaccatagagatgcgggcccctgcagttggtgggcggcgaagatgactttctcctcatcgctgcactgcacggtgtctagctttttccccacggcatgcaaccaatccaacgcatccacggggttgttggagc

SEQ ID NO: 27093 - DNA, 7385 bp, Oryza sativa
gtgggctgccctggttgttgtggttgctgccttcggggtgactgccttcaccggtagcagcacttctcctggtcatcaccatctgaaaaccccacacagaaccagcaaacagagagagctgacaattaaaactagccacccacgactaccataattcttgaatttattactgctattaaattggttcattaaagttcaagttgcttaagcaaataaaataaagacaggctccgacacagttataccacacaccggcataaccatgccccacacgactccaacaagaagacaaacgagaaagaacacacgcgcaagcctactaactgctcgtctaccgctgcgacggtccaggacggaaggtgagcaacagcgcatcctccgtgctaccaacgccggaggcttccccctcctgaggaaccacgggcgcgggctcggcacgaggggtctccacgaagcaggtccacgccagggactgacgaacaagctcaggcctggaggtgctcttgcgggcggtgatcttctggctgcggcagacgggcgacgcttggggcgacagacctctccctgggcaatcttgagctgatgcagctgcgcctccactgcgtctaggtccttcttcagctgcagattctcctgacgcagctccaggatcttcatgttgttctcgaccatcccacggcgcaccatatgatggaagtcgatacgagccgcgtcgtacgcctccaccatgcgcgccaggtgcatgatggtagcgtcatcctccgagctagcatcccggaaggtggcgtagtcgcgggctcctccgcggcgagggtggtagcggtagggcgagtgctgcaactcgtccgggtagcgctggtgaagagtgccgatggcgaggagagcggcgttctggcaagcggcggagaaggaatctccacccgcggtgactgccaacgaagtcctctcgggtgagccagtgaggatcactgcagtaacctcccaagcagcgtggggctctgcatcgtcaccctcctgctccgggagctgcctgccctggtagtccactccatgcggataccccaggacaacgcacatgccccgctactccaaaacaaagccagtcaggtccagaccacgacggttgatgctgccggccatctacaaacaaaaacaaaaagaaaagcaacattttaaaggtcagattttgacgataaatgaagcagtaggacagagagagactagaggattttcacaaataagaaaggatttttattttgaaaatattgctaaggcttgggatctacggctcgtcctagggtcaagggggctctgataccaacttgtcacgaccggaaataacccaacgggcgttccttacgtgcgtgcattattccttgtcccaggaggcaaggtacactaaaagttgatacagttcagagtttaacaagcggaagcgtaaatagataatttattacatgggcagcgaaggcccagcacacaaaaagacaaacaggaaacagcggaagactagggcgacgaccacaggcgcttgacggcaggcacgagctagacaccaaggccttcatcttccagaggctcctcttctgggtttgggaaaaattgagcaagactgagtacaaccactgtactcaacaagacacacccacaagtgcaggataaatgcaagggagtacaagggagttataatataaagggttagggtttgcagtaaacagcattaaaagacacttagttgctcaaagctattttgtaaacacgattccagagttataatcaaggccgtgaacccacacgaacctgccttaacccaaggcctacgatgattcaaaccgaactggcaacccgaccctgggtcccagctcgtcccaagccaacccaggccaaccattccacattttagttgtttagcaggttttaagaattaaaacactaacttgggtacattgctcggcttgcccataaccgagggcgcggctattcgaatagattatactctgatcagaggtgtacatctttacccacaagacacattttcctcacgtgtaaccacgtgccacataccaccacggtatacggacggaagacatgacatagtttccaacccatcctagccataaacaagagtaccgacccaaccccacctacggccggaacccccaggacaggtaggcaggactgagcccctagcagcaggacaccggccctgtgccatgacatctcgactaccgggccgcagctcgtgtagccttcatttgccctagagatgtccatcgacccctgacttcgtccatctccatccgtgtacttttgtttataaccagactaagccacaaactaagccttacctactagacatgtggaagtacggtagtgctttgcaacagaggcccgaagaccggtccatatatggccgaggtgctactgtcaaaaccatgcaccccgagcccagcctaaaaccattttgagggttttgaatagagggggaggtgtgaatccaattccacaataatccaaccattccatagtgtccaggtgataagagtattcccaaagtctagagttgtaaaaccacctaatgttgcctaattaaccagcgaagcatctacctaaaatcatactagtggtaccatgagtgtccactagttggggttttgtttcttctagggtgaacaaggaaataataacaataacaataataaggtcataacaaaggtaaataggcatggctagataaaacagtgataacgcgggaatttaataaacagtgataacaaagcgataatgcaataatttaaatcaaaataattttataaactgggattcaatatgttcaaggatgatgtgacttgccttgctcactttcccaaacgtcggcttcaacctccacgaagagtggatcttccgaatctgcaacgtctacacgaccaacggaaaataaaagggcttttactctaataaactccatataacaagcaggaacgaagcacaaaaatgggttcttgacttcttaaggaaaaaaaagagacttgaacggtccaattccgagttcaaatggccaagttatggccatttgaagtttatatgctctttaaatgaatatttgcggatttgttcatttaaattttaatttaaaaagggtttattgcgtcagccgaggggagggggcgcgcggaccgggtccacgggagtggggcccacgcggcagcctcacggtccacggtggaccgggcgcacccgggctcgcaccggccggcgccgtgggccccacgcttcagccgcacccgagggcgcgggcggctgacggccgggccccacgcggcggccactcggcgtgcccgaaggcggccactcggcgcggccggcaggaggcggcgcccgcgcccctatggtcgccggcggcggccataggcacggcggagcggcggccgagagagggaaagggaagggggaaaagaagcggcggtccacggctcaccctaggtcgacggcgatgacggaaaggcagccggagcggaggaaggcggcggcgtggctcgggtcgacggggacgacggtgttccggcggtcggcgagtgaaacggaggggtggacgaggtcgccgaggatgcggcgaagccgaaggaggcggcgccgagggggaaggtggtccggggcgacgacggcggcggaccggagctcggcggcgacggccgagagagagagcgacggcgcgagctcgatttcggcggggagagagagcggcgagtggcggaaacggtggagggaggcacggggagggtttatatagggttgggtgtgagagagggcggccggaggagggggaaacgggcgcgggagacccggccgccattagtggcgccggcgaggttaggggaggagtttcctaacgaatccgagggagagagagagggaaaaatggggggaaagggggaggggatcccggggaataattcccccctattgattgcacgcggggcggacgggggcggcgggattcgcggcggcggcgctagggcgcgggcggggcggcgggagcggcgggaggaaggggatgacgggtgggccccacccgtcatcgagggaggcgggcgggcccgcccgtcggcggcacgcgcgcggggaggatgccgaatgggccgcgggggagaggagagagagggagagagatgggccgagccggcccaagagggggaggggggggggaaaaggacttttagagcttttctttttataaaatcattttaactttgtttatttcttaataattattatttgtgctctgaaaattccactaaaatttatttacgcattttaggcttttaggaaatatacaaaaatcctccaagccttatttgacttttaactttgcacattttaattgttggaggctttcacacggattttaattattctaggcataatttcgaggatgtattttagagtcgttttgggacgcgacattgaaaaagttcaaaaagcatccaaacataatttttggatatattggagttttttgggtgcgttcgtagcaaaaacattgacgaacttttgtcaattaatgccaatataggcatatattgagccccgacgggtgcgatgttttttgaccggaatgaaaaagttcaaaaagcacccaaacaaaatttttggacatattggagtgtattgggtgcgttcgtggcaaaaactcacttcgtgattcgcgcggcgaacttttgtcaattaatgtcaatattggcatatattgagcccccacgggtgcgatgttttttgaccggaatgaaaaagttcaaaaagcaccaaacatgatttttggacatattggagtgtattgggtgcgttcgtggcaaaaactcacttcgtgattcgcacgaagaacttttgtcaattagtgccaatattggcatatattgagccctcacgggtgcgatgttttttgaccggaatgaaaaagttcgaaaatcaccaaaagatgaattaaataagtttaaaaagcaccaaaacatgaattttgtacttattggagtgtattgggtgcgttcgtggcaaaaactcactccgtgattcgcacgacgaacttttttcaattaatgccaatattggcatatcttgagcccccacgggtgcgatgttttttgaccggaatgaaaaagttcaaaaagcaccaaaacatgattttttcgacatattggagttttttgggtgcgttcgtaccaataacattgacgaacttatgtcaattagtgccaatattggcatatattgagccctcacaggtgcgatgtttttgaccggaatgaaaaagttcaaaaagcaccaaaacatgatttcttgaacatattggagtgtattgggtgcgttcgtggcaaaaacattgacgaacttttgtcaattaatgccaatattggcatatattgagcccccacgggtgcgatgtttttgactggattcaaaaagttcaaaaagcatccaaacaggatttttggacatattggaatgtattgggtgcgttcgtggtaaaaaatcagttcatgattcacgcggcgaacttttgtcaattaatgccaatattagcataaattggctcacacgggtacgatgtttttgaccggaatgaaaaagttcaaaaagcaccaaaacattatttttggacaaaaactcacttcgcgattcgcgcggcgaacttttctgaattaatgccaatactggcacacgaggccgcgatgtttttgacaggaatgaaaaagttcaaaaagcaccaaaacatgatttctggacatattggagtgtattgggtgcgttcgtggcaaaaactcacttcgtgatttgcgcggggaacttttgtcaattaatatcaatattggcatatattgagcccccacgggtgcgttgttttcgaccggattgaaaaagttcaaaaagcatccaaacatgatttttggacatattggagtgtattgggtgcgttcgtggcaaaaactcacttcgtgattcgtgcggcgaacctttgtcaattagtgccaatattatcatatattggcccacacgggtatgatgtttttgaccggaatgaaaaagtttaaaaagcaccaaaacatgatttttggacttattggagtgtattgggtgcgttcgttgctaaaactcccttcgtgattcgcgcgacgaacttttgtcaattaatgccaatattggcatatgttgagcccccacgggtacgatgtttttgaccggattaaataagtttaaaaagcaccaaaacatgatttttgtacttattggagtgtgctggttgcgttcgtggcaaaaactcactccgtgattcgcacgacgaacttttgtcaattaatgccaatattggcatatcttgggcccccacaggtgcgatgttttttgaccggaatgaaaaagttcaaaaagcaccaaaacatgatttttggacatattggagtgtattgggtgcgttcgtggcaaaaactcacttcgtgattcgcgcggcgaacttttgtcaattaatgtcaatattggcatatattgagcccccacgggtgcgatgtttttgaccggattgaaaaagttcaaaaaacatccaaacatgatttttggacatattggagtgtattgggtgcgttcgtggcaaacactcacttcgtgattcgtgcagcgaacttttctcaattagtgccaatattagcatatattggcccacacgggtacgatgtttttgaccggaatgaaaaagttcaaaaagcaccaaaataagacttttggacatattggagtgtatttggtgcgttcgtggcaaaaactcacttcgtgattcgcacggcgaacttttgtcaattaatgccaattttagcatatcctgagcccccacaggtgcgatattttttgaccggaatgaaaaagttcaaaaatcaccaaaataagatttttggacatattggagtgtattgggtgcgttcgtggcaaaaactcacttcgttattcgcgcagcgaacttttgtcaattaatgccaatattggcatatattgagcccccacgggtgcgatgtttttgaccggattaaaaaagttcaaaaagcaccaaaacatgatttttcgacatatttgagtgttttgggtgcgttcgtggcaaaaactcacttcgtgattcgcgcgatgaacttttgtcaattaatgccaatattggcatatgatgagaccccacgggtgcgatgtttttgaccggaatgaaaaagttcacaaagcatcaaaacacgatttctggacatattggagtgtattgggtgcgttcgtggaaaaaactcacttcgtgattcgcgcggcgaacttttgtcaattaatgccaatattggcatatattgagcccccacgggtgc

SEQ ID NO: 27094 - DNA, 5323 bp, Oryza sativa
tgttttttgaccggaataaaaaagttcaaaagcaccaaaacatgatttttgggcatattggagcgtattgggtgcgttcgaggcaaaaactcacttcgtgaatcgcgcggcgaacttatgtcacttagttccaatattggcatatattgagccctcacgggtgcgatgtttttgaccggaatgaaaaagttcaaaaagaaccaaaacatgattttttgaacatattggagtgtattgggtgcgttcgtagcaaaaacattgacgaacatttgtcaattaatgccaatattggcatatattgagcaccgacgggtgcgatgtttttttgaccggaatgaaaaagttcaaaaagcaccaaaacaagatttttggacatattggagtgtatttggtgcgttcgtggcaaaaactcactttgtgattcgcgcggcgaacttttgtcaattaatgccaatattggcatatattgagccccaacgggtccgatgttttttgaccggaatgaaaaatttcaaaaagcacccaaacatgatttttggacatattggagtgtattgggtgcgttcgtggcaaaaactcacttcgtgattcgcgcggcgaacttttgtcaattaatgccaatattggcatatgttgagcccccacgggtgcgatgtttttgactggaatgaaaaagttcaaaaagaccaaaacatgatttttggacatattggagtgtattgggtgcgttagtagcaaaaactcacttcgtgattcgcacgaagaacttttgtcaattaatgcgaatattggcatatattgaggccccaccggtgcgatgtttttgaccggaatgaaaaagttcaaaaagcaccaaaacatgatttttggacatattggagtgtattgggtgcgttcgtggcaaaaactcacttcgtgattcgcgcggcgaacttttgtcaattaatgccaatattggcatatgttgggcccccacgggtgcgatgttttttgactgaggggaggagtttaggggaggagtttcctaacgaatccaagggagagagagagggaaaaatggggggaaagggagaggggatcatggggaataattccccccactttattgcacgcggggacggcgggaggcggcgggattcgcggcggcggcggcgatagggcgcgggggaggcggcgggagcggcgggaggaaggggatgacgggtgggccccacccgtcagcgagggtggcgggcgggcccgcccatcagcggcgcgcgcgccgggagaggccgagtgggccgcggggagaggagagagagagggggggggagaggagagatgggctgggccggcccaagggagggaagggggacttttagggtttttctttttataaaatcattttaactttgtttatttcttaataattattatttgtgctctgaaaattccactaaaatttatttacgcattttaggcttttaggaaatttacaaaaatcctccaagccttatttgacttttaactttgcacattttaattgttggaggctttcacatggattttaattattctaggcatcatttaagggatatattttagagtcgttttgggacgtgacaattcttctcaaaaacagtcagagatgtcaacgatctgattgagaagaggctcacaaatacaggttggagcaaggaacgactccaaaccagtcaaacgcggtatgcacaccgtcaacgagacggaaatgctcgccgcccaattggatctccttatgaagagaatggacaacaatgagaaggacgccaagaagggtaccgttaaggccttcgacttttcaaatggcatgtgaggtctgtggcaatgacgatcactctgggacggatcgtccgaaaacctgtaaggacgtcatgctcatgaacaacaacaacggatatcgtccacaaggagaccaagtatggagcattgctccatggtctagttcaagaacggaccgaacccacaaggaggttagagtgaaaccccgaaggacggatagtctcaacactttcatgatgaacttcctgtagcgggaagaaacgaggaaccgtcaataccttaagccggcatccaagaagccaggaatataggccggtcaacctgcgttcccagttatgaagaggccgttgcccgcacctaaggcaaagaaggtgtggcagattaaggaaaaaacacctgctcctttacctccggaattgggtgccttatcgaggtaaatgcatcggaggtactgtcgtgcttgtcagacttgaaatgatgtcgcctttgccaacaggtaaatgggtagttatttcatatttattttccattgcatcaaagcatgtttgaatttttcaaacgcagcaaaataaaataaaatttttggcaaaattttgcatggccaccaccacactagtcgttggaacccaatggctaaatgtggggccggttgggtccaccaggggttcggccgaacccctgcatggcactggctggctgcaaatttctttagggtagcggctagtggggcccacatgccattactagccattatccatgcactatataagcagctcggctgggagagggaagtcacaccactctaactcattctcactccctctcaaaaccttcctctcaaaattcattcaaagttttgcaagcttgcctcaaattcacacaatttgctgcatttagtttagacactttacatatacgagtttgctttagttcggtgcaatgttaatcggtgggtatttgtttaacccccgtccgagtagtcttgtattcttgctctttgttgtagctatgaagaaacgacttccgggcatattcaagagacaatcaagctcacggacaagccgacacgaaaagccgagtacaccttcttctgcggatgcatccatggaggaggcgtacgttccaccgaggctgtacgacaactccgatctcgacctcgtgggcgaccgggaaatgcaagcctatcatatgctgaaggaccgaacgtgtgctcagacctaagcatacaactcgaccttttgaaaaggataggtatggatgctgagtttcatactgtttgacgtgctgttggatgggataaatttgcatgtgtagatgagctgggttcctgtttgcttaccatgcagtttctatgtaccttgctagaggtaggcgatggtgtactttctggttattccgcaaggaatatcacctttctcggaaagaccttagcttgcatctaggctttgacaaaacatgcaaagttaatttcaggaacgcatttcttggtttttaacaagcgtatgttttggcaaagtatttcaggtttctcatcctctaaaaagcctagaactagtgacatccatcatcctaccttggggctgttgcataagttgcttggtttcatgttgtttcttagagctgatatccagatagtttgtgaagacgaactagtcctcttgtatgccatggttaaaaaaaaaatcaaagtttcacctgttcaacccatgatcaagcaatggttagaaaatatgaagttgtctggtccttttgagtgtatttctttggtgactcgttcagcatgaagagttgggactatgctttataagcaagtattcctatcacccgctcttatgttgatgaggcctatttagttcaatgccacatactcaaacatggtccaaatgattatcttatatttttgtttcccggctatacaaataagattcctttacctaacccggagtttcatttgtgtaattgccgagaactaaccattccactccaattggagttgcatcgtgatgtcccacgcagggtaacatgacgaatgtacagagaagcacctcaggaggcgtcttcctcttcaccaccagtgtaaatgtatggggactattgggacgctggtggttcgtcctggcagagtgccagcgacggccgatggcatgagccgtaggagctgcactggggatactcgcgctcctccaattcaagtggtccaccttcatcctcttggatgtgtcgctgtctcctctcgaggggatctgggagaactcacccggaggatggatacacttgaactgtaggcagggaacgaacaacacaccttggaggataatgtggtacagtcacgggaatggcaacagtctgttgatgcacaggttgcaaacttcaacactatgatgcaacaatagcaagctgactggcaagcgtttcaccgctaccagggatttgatccccgccatgagccatagcaagaagcaagcttgggggggagatgtctctccccccactaaggtaacttgtatcatattgcatatttccctttcaaattacatgtttaaatttttgcattgcatttataaacctgaaaacaacataaaaatttgcaaaactaaaaataccaaaaagataggttagatttaatatgctaggtaagacatgcttagttcttcatgttgaaatgatgaatagttgctctgttttatatctctcatatatgggttcatggttaagtactctctcaaaatttgaataagggtagcctacaattatccaggaacctgaggtaagtgagctgcactttgctgatctgagtctaggttgttgcgagatatgagatagtaaataagagttgctataaataatcatgttctaagtttgacttgaattccggatgttttatttttcaaaatgataattttgaaagttcctcatttgatatgaattcctaccagagccaaaatattcatattgattaagccatatacattttggttacttgtaattccattaaattttgtcaaatccttgtgacttgtgtagatacttttcatgctctatgtgatcattgatggaggtagctgcaacaacttggtgagttttgatttggtcaagaagcttggcttgactacacgtacacatccacacccttaccatattcagtggttaaacgattccggaggagcaaaggtaacacaggtttgtagggtttcgttttccattggctcatatgcagattctgttgattgcgatgtggttcctatgcaagcttgttcacttttgctggcccgtccttgggaacatgataatgatgctacacaccatggtaggagtaataaatacagttttgtgcataatgggaagaaaattactttgctacctttgacccctgctgaaattgtagaagctgataaagagcgagctgctagtttgaaacttgatgaatctgaaaatcagcaagtggctaaatctgtttttccaactaaaaaggataagctttcacctagttctaaggttgagggaattaagttgaagggtggtg

SEQ ID NO: 27095 - DNA, 622 bp, Oryza sativa
tgcaggagtatgatgatgtctttctagctgagatacccccaggattgccacccatgagagagatagagcatcaaattgatttgattccaggagcatcattgccaaaccgtgttgcttatcgaaccaacccagaggggactaaggaaattcagcggcatgttcaagaccttttggaccgcgggtatgtacgtcaaagccttagtccctgtgcagttcctgtaattttggttcctaagaaagatggttcttggcgaatgtgtgttgattgtagagccattaataatattactatccgatatcgtcatcctattcctaggttagatgacatgcttgatgagttgtgtggctctataattttcacaaagattgacttgcgtagtggctatcaccaaattagaatgaaacttggagatgaatggaaaacaacttttaaaactaaatttggtttgtatgagtggttagtaatgccttttggtttgactaatgcacctagtactttcatgcgcttaatgaatgaggttttaaggccttttattggacgatttgtggtagtgtactttgatgacatattgatttacagcaagtctttggatgaacacatggatcatttacgtgctgtttt

SEQ ID NO: 27096 - DNA, 865 bp, Oryza sativa
caaatgaagttgcaagcccataggcccattataggtgatgcaacaccttgttcctgtgattctgaccactcgtgatagaattcagagaagaggctggatccgttagaaagagggctccgagagctttccatcaagtactcacgggccgaaaacggaggtcgtatgcagattcggtggccgtttgaagtcagcagtgtagtaggtggccgaatcggattccagcacttggagtacttgatctcgatatcttgttgttcatccatgatgtgagcaatggttgcatccgtggtagccatggtcgcacccgtgggggctcaatatatgccaatattggcataaattgataaaagttcttcgtgcgaatcacgaagtgagtttttgccacgaacacacccaatacactgcaatatgtccaaaaatcatgttttggtgatttttgaactttttcaatccggtcaaaaacatcgcacccgtgggggcctatatatgctaaatattggcacttattgacaaaagttcgtcgcgcgaatcacgaagtgagtttttgccacgaacgcacccaatacactccaatatgtccaaaaatcatgtttggatgctttttgaacttaatcaatccggtcaaaaacatcgcacccgtgggggccaatttgtgctaaaattgacactaattgacaaaagttcgctgtacgaatcacgaagtgagtttttaacacgaacgcacccaatacactccaatatatcaaaaatcaagtttgatgccttttgaacttttttattctggtcaacaacatcgcatcagtgggggctcaatatatgccaatattggcataaattgacaaaagttcttcgtgcgaatcacgaa

SEQ ID NO: 27097 - DNA, 923 bp, Oryza sativa
ggtaaatgatacgaatttttttgtatggctattttctggttataggaagataaaaactcaccgagcaacgaaagctctgataccacctgatgaaccctgagttcctctcaacactcaaggctgttgttggcccgatctttcggtgagttgtgataactacgatttgggagaaacgttgacgatccgactacaaacgtacgagacgttgtgttgcgccttagcgatcgatacacctctccgtgggttgttgatcttgccggtgcagatcaaccctattcctgcaagcaaatcgaagaaacaagcaagaacaagataaaagcaatctgatattgcaaataggaatttaatacaaatgataagttggggttccgaagaacaagcagacggacggtctagccgacacgcgcgctgcaagcaagtagcaatggctaaactttaatctatcaaaacccaagaaaccctgaaggggtacctaactatttatagaggtgggaggacgaccaagagggtccaagggtcgtgctccaccagattggggcgcaccccacatgggcctcacatgggccagggtcccaaacaaagttacaagcccattggcccaatacagcagatgcagcaccttgcttttgtgattgcggccaaacgagatagatttccgagatgaggctggatccgttggaaggaggacttcgagagctttccatcaagtactcacgggcccaaaacggagcacgtatgtagatttggcggccgtttgaagtcagcaatgtaacacgtggccgaatcagattgcagcacatggaggacttgatcttgatgtcttcttgttgattcatgatgtgagcaatggtcgtatccatagtagccatgatcacatcaaaacatcgcacccgtcggtgctcaatatgtgccaatattggcat

SEQ ID NO: 27098 - DNA, 2165 bp, Oryza sativa
taaggctcgtcctagggtcaagggggctctgataccaacttgtcacgaccggaaataacccaacgggcgttccttacgtgcgtgcattattccttgtcccaggagacaagcggaagcgtaattaattaatttattacatgggcggcgaagacccagcacacaagaagacaaacgaaaaatagcggaagactagggcgatgaccacaggcgcttgacggcaggcacgagctagacaccaaagccttcatcatccaggggctcctcttctgggtttgggaaaaattgagcaagactgagaacaaccaccgtactcaacaagacacacccacaagtgcagaataaatgcaagggagtacaagggagtacaagggagccataatatagggggttagggtttgcagtaaacagcattaaaagacacttagttgctcaaagctattttgtaaacaccgtcctagagctatacaatattattaaccaaggctgtgaacccacacgaacctgccttaacccaaggcctacgatgattcagaccgaactggcaacccgaccctgggtgccagctcgtcccaagccaacctaggccaaccattccacattttagttgttaagcaggttttaagaattaaaacactaaattgggtacattgctcggcttgcccataaccgagggcgcggctattcgaatagattatactctgatcagaggtgtacatctttacccacaagacacatcttcctcacgtgtaaccacgtgccacataccaccacggtatacggacggaagacgtgacatagtttccaacccatcctagccatagacaagagtaccgacccaatcccacctacggccggaacccccgggacaggtaggcaggactgagcccctagcagcaggacaccggccctgtgccatgacatctcgactaccgggccgcagctcgtgtagccttcatttgccctggagatgtccatcgacccccgacttcgtccatctccatccgtgtacttttgtttataaccagactgagccacaaactaagccttacccactagacatgtggaagtacggtagtgctttgcaacagaggcccgaagaccggtccttatatggccgaggtgctactatcaaaaccatgcaccctgagcccagcctaaaaccatttttggagattttgaatagagggggcggtgtgaatccaattccacaataattcatccattccatagtgtccaggtgatgagaatatcccaaagtctagaattgaaaaaccacctaatgttacctaattaaatagcgaagcatctacctaaaatcatactagtggtaccatgagtagagtgtccactagttggggttttgtttattctagggtgaacaaggaaataataacaataacaataataaggtcataacaaagttaaataggcatggctagataaaacagtgattacgcgggaatttaaataaagcgatagtgcaataatttaaatcaacataattttataaactgggattcaatatgttcaaggatgatgtgacttgccttgctcgctttcccaaacgtcggcttcaacttccacgaagagtggatcttccgaagctgcagcgtctacacgaccaacggaaaagaaaaggcttttactctaataaactccacataacaagcaggaacaaagcacaaaaatgggttcttgacttcttaaggaaaaattagagacttgaacggtccaattccgagttcaaatggccaagttatggccatttgaaggttatatgctctttaaatgaatatttacgaatttctttatttaaattttaatttaaaaatggatttattgcgtcagccgaggggaggggcgcgcggaccgggtccatgggggtggggcccacgcggcagccccacggcccacggtggaccgggcgcacccgggctcacaccggccggcaccgtgggtcccacgcgtcagccgcacccgagggcgcgggcggctgacagccgggccccacgcggcagccgcacggtgcgcccgaaggcggccacgccggcgcagcggcgggaggcggcgcgcccgcgcccctatggtcgccggcagcggccataggcacggcggaacggcggcccaaaaagggggagggaagggggaaaagaaccggcggtcca

SEQ ID NO: 27099 - DNA, 5789 bp, Oryza sativa
gtcattcggacggcgaacttttgtcaattaatgccaatattggcacacgagggtgcgatgttttgtactgtaatcaaaaagttaaaaaagcgccaaaacatgatttttggacatattggagtgtattgggtggatacaaggaaaaaactcacttcgtgattcgcgcggcgaacttttgtcaattaatgccaatgttggcacacgagggtgcgatgtttttgaccggaatcaaaaagttcaaaaaacgccaaaacatggtttttggacatattggagtgtatcgggattgttcgtggcaaaaacacatttcgtgattcgcgctgatggacccggagttcctctcaacactcaaggcttttgttggcccgatctttcggtgagttgtgataactacaatttgggagaaacgttgacgatccgactacaaccgtacgagacgttgtgttgcgccttagcgatcgatacacctctctgtgggttgttgatcttgccggtgcagatcaaccttattcctgcaagcaaatcgaagaaacaagcaagaacaagataaaaagcaatctgatattgcaaataggaatttaatacaaatgataagttggggttccgaagaacaagcagacggacggtctagccgacacgcgcgctgtaagcaagtagcaatggctaaactttaatctatcaaaaccccgagaaactctaaaggggaacctaactatttaagaaggtgggaggacgacctaagggaaccctagggtcgtgctccacctggttggggcgcaccccacttgggccccacttgggccggggtcccagacgaagttacaagcccattataggtgacgcagcaccttctttttgtgatttcggccgactgggatggaatttggtgatgaagctggatccatttgaaagatgactccgagagctttccatcaagtactcatggacccaaaagggagctcgcatgcatatttggcggccgtctgaagtcgattctgttgcaggtggctgaactggattgcagaacttggacggcctgatcttgatgtgaacgacggttgtatctatagtagtcatggtcacatcacgcgcggcgaacttttgccatataatgtcattattggcatattttggcctacacgggtgcgatgtttttgaccggaatgaaaatgttcaaaaagcaccaagacatgatttttgcacatattggagtgtattgggtgcgttcgtggcaaaaactcacttcgtgattcgcgtggcgaacttttgtcaattaatgccaatattagcatattttggaccacaccggtgcgatgtttttgaccggtatgaaaaagttcaaaaagaaccaaaacatgatttttggacatatttggagtgtattggttgcgttcgtggcaaaaactcacttcgtgattcgcgcggtgaacttttgtcaattaatacaaatattggcacacgagggtgcgatgtttttgaccggaatcaaaaagttcaaaaaacgccaaaacatgatttttggacatattggagtgtattgggtgcatacatggcaaaaactcacttggtgattcgtgcggcgaacttttgtcaattaatgccaatattggcacccgagggagcgatgttttgtactggaatcaaaaagttcaaaaagagccaaaacatgatttttggacatattggtgtgtatcaggtgtgttcgtggcaaaaacacatttcgtgattcgcgtggctaacttttgtcaaataatgtcaatattggcatatattagcccacacgggtgcgatgtttttgaccagaatgaaaatgttcaaaaagcaccaaagcatgatttttggacatattggagtgtattgggtgcgttcgtggcaaatactcacttcgtgattcgcgcggcgatcttttgtcaattaatgccaatattggcacacgagggtgcgatgttttctactggcatcaaaaagttcaaaaaacaccaaaacatgatttttggacatattggagtgtatcgggtgtgttcgtggcaaaaacacatttcgtgattcgcgtggctaacttttgtcaaataatgtcaatattggcatatattggcccacacgggtgcgatgtttttgaccggaatgaaaaagttcaaaaagcaccaaaacatgatttttgcacatattggagtgtgttgggtgcgttcgtagcaaaaactcatttcgtgattcgcgcggtgaacttttgtcaattaatgccaatattagcatatatcggaccacacgggtgcgatgtttttgaccggaatcacaaacttcaaaaaagcgaaaacatgatttttggacatattggagtttattgggtgcgttcgtggcaaaaactaacttcgtgattcacggggagaacttttgtcaattaatgccaatatcggtatatattggcccaaacaggtgcgatgtttttgaccgtaatgaaaaatttcaaaaagcaacaaatcatgatttttggacatattggtgtgtattgggtgcattcgtggcaaaaactcactacgtgattcgcgcggcgaacttttgtcaattaatgccaatattggcacacgagggtgcgatgttttgtactgtaatcaaaaagttcaaaaagcgccaaaacatgatttttggacatattagagtgtattgggtgcattcatggcaaaaactcacttcgtgattcgcgcggtgaacttttgtcaattaatgccaatattggcacacgagggtacgatgttttctactggaatcaaaaagttcagaaagagccaaaacatgacttttggacataatggagtgtatcgggtgtcttcgtggcaaaaacacatttcgtgattcgcgtggctaacttttctcaaataatgtcaatattggcatatattagcccacacgggtgcgatgtttttgaccagaatgaaaaagttcaaaaacgccaaaacatgagttttggaaatattggattgtactgggtgcattcatggcaaaaagtcacttcgtgatttgcgcggcgaacttttgttaattaatgccaatattggcacacgagggtgcgatgctttctactggaatcaaaaagttcaaaaagagcccaaacatgatttttgacatattggagtgtatcgggtgggttcgtggcaaaaactcacttcgtgattcgcgcgacgaacttttgtcaattaatgccaatatttgtatatattggcccatataggtgcgatgtttttgaccggaatgaaaaagttcaaagtcaaacataatagttttttctcttttctttctttcttcttttctttcctttccttttcttttcttttttttttgggtgcggcttttcttttcttttttttatgcacctttctgcctttttttttctttcttttttttttattttattttacaaaaacagattcaaggacctcaatgtaaggctatagggactcaaacataaatataaaatttacagtgactcaaatgtaaaagtctaaaaccaaaattaaaattatacaaaaatggaatgctgaatttatactggttccgtttttctgaacggatatcgaaacggacaccaaacaaaaattcaccaaggtgtaaggatggcacggtgtagattgaaccgaaaggagagggagtcggactcaaggggggaatgccgcatggaaggtggttggactcggtgagaatttctgaaggaaggaaaccgattccttttctgcgtggccccaaatagaaacgaaagtaatctaatctagtctaatcttctccttccatcttcctcatgtgcatcttctcccttcttcctcacgcgcacatgcacggcagaaacaaacacacacaaggataggcaaactctagatgcaacacaagaactccaaaactaaccgacagaaacttctgaaaactacaaaaatagaaccgtggcagcgagccgattccgttttcgtaggtcccgacaacaacagagacacggtggcagcgacgactgtggtacaaaacgtgaccagaactcgaaactctaaacgaactagacgctaaagccagcagctcgacgtgacgatgcaacacaaaattcaacaaagcaaaaactgaagagaacaatgcaatggcacaatatggctaggtaaatgatacaaatttttttgtatggctattttctggttatgggtagaaaaaaactcaccgagcaacgaaagtctctgataccacctgctgaaccctgagttcctctcgacactcaaggctgttgttggcccgatctttcggtgagttgtgataactacgatttgggagaaacgttgacaatccgactacaactgtacgagacgttgtgttgcgccttagcgatcgatacacctctccgtgggttgttgatcttgccggtgcagatcaaccctattcctgcaagcaaatcgaagaaacaagtaataacaagataaaagcaatctgatattgcaaaaaggaatttaatacaaatgataagttggggttccgaatacaagcagacggacggtctagccgacacgcgcgctgcaaggaagtagcaatggctaaactttcatctaaacaaaacctgagaaaccctgaaggggtaactagctatattgacattaattgacaaaagttcgccgcgcgaatcacgaagtgagtttttgctatgaacgcacgcaatacgctccaatatgcccaaaaaacatgttttggcgctttttgagctttttcattccggtcaaaaacatcgcaccctcgtgtgccaatattcgcaattaattgagaaaagttcgccgtgcgaatcatgaagtgagtttttgccacgaacgcacgcaatacactccaaaatgtccaaaaatggcgtttttgaactttttgattccggtcaaaaacatcgcaccctcgtgtgccaatgttgccattaattgacaaaagttcgccgcgcaaatcacgaagtgagtttttgccacgaacgcacgcaacacactccaatatatccaaaaatcttgttttgccgtttttttgaacattttgattctggtcaaaaacatcgcacccccgtgtgccaacattggcattaattgacaaatgttcgccacgcgaatcacgaagtgagtttttgccacgaacgcacccagtacactccaatatgtccaaaaatcatgttttggcgttttttgaactttttgattccggtcaaaaacaacgctccttcgtgtgccaatattggcattaattgacaaaagttcgccgcgcgaatcacgaagtgagtttttgctatgaacgcacccgatacactccaatatgtccaaaaattatgttttggcgctttttgaactttttcattccggtcaaaaacatcgcccccgtttgggccaaaatatgccaatattggcattaattgataaaagttcgccgtgtaaatcacgaattgagtttttgccattaacgcacccaatacactccaatatgtccaaaaatcatgttttggcgttttttgaactttttgattccggtcaaaaacatcgcaccctagtgtgccaacattggcattaattgacaaaagttcgccgcgcgaatcacgaagtgagttgttgccacgaacgcacccaatacactccaatatgtccaaaaatcatgttttggcgttttttgaactttttgattccggtcaaaagcaacgctccttcgtgtgccaatattggcattaattgacaaaagttcgccgcgcgaatcacgaagtgagtttttgccacgaacgcacccaatacactccaaaatgtccaaaa

SEQ ID NO: 27100 - DNA, 6590 bp, Oryza sativa
cgcacccaatacactccaatatgtccaaaaatcatgttttggcgttttttgagcttttttattccggtcaaaaacatcgcaccctcgtgtgccaatgttgccattaattgataaaagttcgccgcgcgaatcacgaagtgagtttttgccacgaacgcacgcaacatactccaatatgtccaaaaatcatgttttggcattttttgaactttttgattccggtcaaaaacatcgcaccctcgtgtgccaatattcgcattaattgagaaaagttcaccgtgcgaatcacgaagtgagtttttgccacgaacgcacgcaatacactccaaaatgtccaaaaaacatgttttggcgtttttgaactttttgattccggtcaaaaacatcgcaccctcgtgtgccaatgttgccattaaggacacggatacagatggatgaagtcgttgcgacgatggatatctctgaggcaaatgaaggctaaacgagctgcggctcggtaatcgagatatctaggcaaatgaagactacacgggtcggtgcccgttagtcgagatgccatggcactggactagtacgcgggtggtctcacccctatgcgtgtggcgcacccggtctagatcctgttgctcggggctcaatcctggcctgcctgtcccgagataccggccgtaggcagggttgggtcggtacttttgttcacggctaggatgggtgaagggttatgtcacatgtttacgacgggttccaaggccatggaatgggatgtcaaaagaagcaccatctattgactcggctgacaaggagattcagccggaaaagactgtgccgtaggagtactgcgacacacggttgctgctgtttccccaacgaaaggacgagcagttcgctcgttttgtgatccagaagatccacatcaaagtgccgttgttggatgctatgcaagtgccaacatacgcccgttatctcaaggacatactcaacaacaagagaccgctgccaacaacggaggtggtcaagctgacggaacaatgcagcaacctgatactccacaagctcccggagaagaagaaagatccggggtgtcctatgatcacctgctcgatcggggcacaacaattcgaccagacctggtgcgaccttggagccagcgttagcgtcatgccaaaagacgtcttcgacaagttcaacttcacagtgttggaaccaacaccgatgcgcctccaactggctgactcatcagttcgttacccagcaggaatagcggagaatgtgccagtcaagatacgggatttcttcatcccggttgattttgtggtgctagacatggacatggggaaggagatgccgctcatcctagggcgtccattccttagtaccgcaggagccaacattgacgtgggaacggggagtatccgtttccatatcaacgggaaggaggaaaagtttgagtttcaaccaaggacggaacaatgctccatggtcagaataaagtacgggccgaatccgtagaatattcaagtggtcgaagtggagccacccaaaacggacagcttggtgatatttatgcagaatttcctggagaaggaaacaacgatgcccaggaaccgttattggaaaacgccggtaaaatcacccgtaccggccaagaagtcagatcagccggctcagaagaagccgccgtccgcaccaaaatcaaaaaaggtgtggaaggaaaagctaaagatgcccgctccatcacctccggagacgggtgaaaaatcagtgcactaaaccgaaaggaggtatgtatccgcatatttgctttcaacaatttaaatttttgtatcaccacatatttgaatttcaaaatgcatttaggctttttgaatttttaggaaattcttcaaatgaattttccagagcaaaccaaaataaaattttcaatgaaaatttattgtgccacgaccacactgaccgttggaatccaacggctgaaagtggggccggttgggcccaccaggggtttggccgaacaccctggttcggcctaaccggccaggccaacggtcggctgcctctttctttgaggcaacgtgatgaaccctgagttcctctcgacactcaaggctgttgttggcctgatctttcggtgagttgtgataactacgatttgggagaaacgttgacgatccgactacaaccgtacaagacgttctgttgcgccttagcgatcgatacacctctccgtgggttgttgatcttgtcgatgcatatgaaccctattcctgcaggcaatcgagaacaagcaagaacaagatagaaagcaactgaattgctagatagacaagacgcacaaagatgaattgatacacgataaagtggggttctgaacaagcagatggacggtctagccgacacgcacgctgcaagcgaagtagcaatggctaaacttacaatttatcaaaaccccagcaaccctaaaggggtatctagctacttataggggtgggagaatgaccataaggatcctagggtcgtgctccaccagattggggcgcaccccacatgggccccacttgggccggggtcccaaacgaagttacaagcccaaaggcccatgacaggtgacacaacaccttgttgcttcaattgcggctcaataagatggaatttcgcaatgaggctggatccgttggaaagaggactccgagagctttccatcaagtactcacgggccaaaaacggagctcgtatggagatttggtggccgtttgaaattagcagtgcagcaggtggccgaatcggattccagcatttggaggccttgaccttgatgtcttcttgttcatccatgatatgagcaatgtttgtatccatagtagctatggtcacatcatcctccccttcttcacggaaaatcgtcgtcgttttttccatatggtgctcttcatatagtccattcaaaataacctgtttcatccaatcaaaactagacaaactcgaagtagtgtgattagcaaaaacatgtttctgtaaatgcgaacaaatgaaaatgctatgcaccaaatatattcctctatcattatattcgccaaagatatgaaaaataacattagttggacatggcaaatcaaacttagcaaataaattctcctccaaattattgagctcacaaaaatcatcaaactgaacatagcccgagtattgaaagaagttatcaatttacgttcctcaatatcattagcaatgtgaacaacatgcttaaaatcagcacacaataaaacactagaaatagcatgttcattcactagttgtggcatggatataagtgaagcattatcacacaactcttctctatcacaaggaacagcaagtaaatcaacttgtgacaaaggcatctcagcaattggttccactaatagttgctcttcactagcatgacaagtggaaaaatgtaattcatcagaagcatactcatcttgagtaatttctgcaccatttaatttaccttttatgccctcttcagataatgtaggtgcatcagccttctcctcattcgcgagtgatggaagtgacatctcaaacatatcgttcttctcattttggggactgttctgaacttcctgcaaaatatcagcgataggaggcacaagcatagcttgttgctccattgggttctccaaaattttgcgctcaatattgcaagcaagcatgaacaattggcctatatgattatatgtcacattaacaagcccaacctgaatattggaattaagccctctgaaaaatctagtcattgtgttctcattagattcttgtaaaccactataagtgatacaaattttaaaatcatgaaagtactccctaacagttttgtcaccttgttttatatgttcaaatttctcaaagagagcacgtctatagtatgaaaacacaaatctttttctcatcagtattttgcattcatcccaagtttcaagcttatttcccacagtatgccaccaaaaagatgcagaaccgatacacttattactaacagccttaatcatttgagcattagaaaaatcatactcatcaaattgtttttctactgctagctcccaattaacataagcggcagaatcatacttaccatcaaaaactggcaatttagattctacccttgcaagatcattatcaggtacctcatatgtgatgcgtgaagaagtcgctatatctcgttgatggtgaagatgttgacgttgagcatgaccatctcatttccccgtgcgcaatcctgccatggttagtagcaaacaagaaacatacacaaaaatatgcgcgttcctattaactagtaggtagtggcagctcaaaaatcacacacactcaagcttttaaccaagctcttacaacatcttaccaatgcaagcggaatggtgacatacaccgactcaaccaagcaccccaatggaggttggatgtatcgatgccttggcaaacacttactgtacggctgcaatcaaatctgtggagctctaggtaggcttaaatatgtagcaaaggaatagcaaatgctcaaatcagataatgcaaagttgaataattgttcaaagtcaagtaccgtgctggtcctaggctagaacgtactagagacgtgagcctacacacaaatgataccacaagatagcactaggagcaactcatgcacaactctgatatatgaagttcagctcaatgataacaaaatgattttctccttttcttctttttttctctctctttttttttgtctttcctgcttttcttttctttttcttttctttttttggtgcggcttttgttttctttctttttagcacctttctgccttttttttcttttttttaaattttttttcagcaaaaaccaactcaaggaccttaatgcaagattacaaggactcaactgtaaatatacaaattacagggattcaaatgcaaaagtgcaaacccaaaaattaaaattatacaaaaatggaatgctgaatttatattggttccgtttttccaaacggatctccaatcggacactctgaaaattttcaccaagctatgcgggaagacacggtatggatctaaatcgatagaagagagggaggagtcggactcggaggaaggaaggcaccacagagaggtggagctgaatattgcggccagcactagtgtttggattcagtgcacaaaataaaaggaaacggatttccacccgatctaatcttctttttctttcctattctgttctttcctttttttttctttccttccacccaaccgaatccaaacagatcttctatattcctttccccttcttcttcctcaagggcaaaacagaaccacagcacaagcactaagcctgggtaaacaacaaacccttgatgcaacaccaaaaccgaccgataaaaacttttgaaaactacaaaaatagaaccatggcagcaagccgattccgttttcgtaggtcccgacgataacagagacacggaggcggcaatgactctggtataaaacgtgaccagaacacgaaacactaaacgaactagacgctaaggcgcaacacaacgtcttgtacggttgtagtcggatcgccaacgtttctcccaaatcgtagttacctacaactcaccgaaagatcgggccaacaatagccttgagtgtcgagaggaactcagggttcagcaaaaactgaatagaacaaagcaatggcacaaagatggctagggacatgatgtaaatttttttgtatggctattttctgcttataggtagaaaaaaactcaccgagcaccgaaagctctgataccacctgctgaaccctgagttcctctcgacactcaaggctgttgttggcccgatctttcggtgagttgtgataactacgatttgggagaaacgttgacaatccgactacaactgtacgagacgttgtgttgcgccttagcgatcgatacacctctccgtgggttgttgatcttgccggtgcagatcaaccctattcctgcaagcaaatcgaagaaacaagtaataacaagataaaagcaatctgatattgcaaaaaggaatttaatacaaatgataagttggggttccgaatacaagcagacggacggtctagccgacacgcgcgctgcaaggaagtagcaatggctaaactttcatctaaacaaaacctgagaaaccctgaaggggtaactagctatattgacattaattgacaaaagttcgccgcgcgaatcacgaagtgagtttttgctatgaacgcacgcaatacgctccaatatgcccaaaaaacatgttttggcgctttttgagctttttcattccggtcaaaaacatcgcaccctcgtgtgccaatgttgcaattaattgagaaaagttcgccgcgcaaatcacgacgtgagtttttgccacgaacgcacgcaacacactccaatatacccaaaaatcttgttttggcgttttttgaactttttgattccggtcaaaaacatcgcaccctagtgtgccaacattggcattaattgacaaaagttcgccgcgcgaatcacgaagtgagttgttgccacgaacgcacccaatacactccaatatgtc

SEQ ID NO: 27101 - DNA, 3226 bp, Oryza sativa
ggttccgaacaagcagacggacggtctagccgacacgcgcgctgcaagcgaagtagcaatggctaaacttacaatttatcaaaaccccagcaaccctgaaggggtatctagctacttataggggtgggagaatgaccatgaggatcctagggtcgtgctccaccggattggggcgcaccccacatgggccccacttgggccggggtcccaaacgaagttacaagcccaaaggaccatgacaggtgatgcaacaccttgttgcttcaattgcggctcaataagatggaatttcacaatgaggctggatccgttggaaagaggattccgagagctttctatcaagtactcacgggccaaaaacagagctcgtatggagatttggtggccgtttgaaattagcagtgcagtaggtggccgaatcggattccagcatttggaggccttgaccttgatgtcttcttgttcatctatgatgtgagcaatggttgtatccatagtagctatggtcacatcacaaaggctagtgggccccacaggttagttttgaccgttgtggatgcactatttaagccaaccggccgggagaggggactccaccccatttcaacacatttccattccctctgcaaagtttgctgtctagttcattcaagctgtgatattttccctcaaatttaaatctttagttgcatatatacaagttgctttggtgaaactaaccggcaggtgaaactcttatcattcctaacccccgccgagttagtccgttcttgcttcattgtgcagaatgaggaggcgattgtctcaactgttcaaagggtccggcccttcatcaagtcatcatgacgggtctagcactcgttcatcagctaatatctcgatggaagacgccgaagctccgcgacatgatacggacatcactacctcggatacacacaacaatcctccaatggtcattcaaggactgatagcaagagctcgtgcgcgacaattaaatttagaggtgagctcgttcctatgttcttctttgtatgaattcgagaaaagattgctacctaatgaatatattgtgattagaaataatagaggggacaaggagacacttggagaaggacttagagccatggaggatcatcgaggacgtccaagtcaaggtggaggcccaaaccaattcgacctcggtgcaattcggagtctaggaccagtctgcactaaaacgggcgcccaggtcgcatacgtgctcggattggggcgttctttatatgaatggaaaactaagaagataacctttccaatggttttggtcccacatccaaatactttccgagtcaatgggtatcgaccgaacaagttgacatccagaatctgtcccggtgctgtgtcaccgtatttgggcctttgggccatgtatcgtgttggaacccattagggttgcgtcgagagggggttgcacgagcctaaactctatatatcagtaccgctaccatctttaggttttagagttttgcttagattattctgtcgagaacagtttcgccgctagatcggtttgtaagaccccaactcgtgagcttatcattcatctgcaattttggttgttttctatctcgtttttgtttgtgttcttcgattggcaaatagggattagccttcttggcgaggtcatccgcgtttcgacacgggtgataaccagaggagacgtggtgttgcgattgcggggctcaagagcgtgcgcgttcaagaagccggatcgatttgtgtcgcgactccgcccaaatcattttttatcagaacctttcggaagatcgggaaccctagtgcacatcaagtggtatcggaggccgttgtaaagtctgtccaagatgccttcactaaaatcggcttcctgaaccacatggagaggttggacaagcagatatccacgctaactgatcgggttgccgcgttggagacaccttccaatgaggaagtggtgagtggtgatgacgatgctcattcggaagacacggtgtatgattccagtggctatattgacacaccagctacaaggcaagcacggctatgacgtcgcctacgcataaaccgcacaggtatgggtggcactcgccaccaacaaggtaataataatcgtgtgccagatgatccttatgctaaggttaagtttaaaataccatctttttcgggatattatgatgctgagaaataccttgattgggagatggcaatagaacaaaagtttaatgcccaccttgtacctgagcaacatagagttaaacaagctagtagtgagttcaaggattttgctatcatgtagtgggctgggttatctgatgagggggtactacctactacttgggaagaacttaaggtagctatgcacgataggtttgttcctccatcttatcatagagatttacgcaagaaattgatgcgtttggaacaaggggataaatccgtacaggattactatggtgagctacaaaagggtgtgagacgctgtggcatagtggagggggtcgaggatgctatttttcgtttttattctggtttgagggaggaaattcaaaacattgttgattataaggaatttaactctatgaaccagttgttttggtttgcaatgcttgaagagaaggaattgcaggggcgtgaccatcagggcaagaacaaggcaagcacatacactccacgcacgatgccatctacgggactacccagggccgtttcttttcgggcgccttcccagccagcgagcaagcgaccagctgcattcggagcttctgcggcaccaaaaccatctccaccacaaccagcagagtcaggtaatggttcttcgcaggtacccgccaagagtgcctcatctgtcgcctcgacgggacgcattcagtgccaccgttgccaagggtttgggcatgtgcagaaagattgccctattcaacgggcctatgttgctacagaagatggctacatcaccacctccgacgtggaagaggaagaggaggaagaagaagttgaggatgaggatggagaagtctttggccgtgatgacacaactgactacaggaccatcgttgtgcagcgggtgctcagcatgcaggtacagcagcctgagaggttgcaacgccataatttgtttcagattttcttcgtcatcaacaaccgtcgtgcacgtgtgatcattgatggaggtagctgcaacaatttggtgagttctgatttggtcaag

SEQ ID NO: 27102 - DNA, 2748 bp, Oryza sativa
cgtgcaatgtttttaatcggaacgaaaaagtttagaaagcaccaaaagatgtgttttggacataatggagtggattgggtgcgtccatattgaaaaatcactccgtaactcgcgcggcgaaagtttgtcaattaatgccaatattggcctacattgccacacgtgggtgcgatgtttttagccggaaaaaaaagttcaaaaaccacaaaaacatgagttttggacatattgcagtagattgggtgcgccctcgtcgaaaattcactccgtgactagcgtggtgaacttttgtcaattaatgtcgatattggcatatattgagcaccgacgggtgcgatgtttttttgaccggaatgaaaaagttcaaaaagcaccaaaataagacttttggacatattggagtgtatttggtgcgttcgtggcaaaaactcacttcgtgattcgcgcggcgaacttttgtcaatttatgcctatgttggcatatattgagccctcacgggtgcgatgtttttgaccggaatgaaaaagttcaaaaagcaacaaaatatgattttttgaacatattggagtgtattgggtgcattcgtagcaaaaacattaacgaacaattgtcaattaatgccaatattggcatatattgagcaccgacgggtgcgatgtttttttgaccggaatgaaaaagttcaaaaagcaccaaaataagacttttggacatattggagtgtatttggtgcgttcgtggcaaaaactcacttcgtgattcgcgcggcgaacttttgtcaattaatgccaatattggcatatattgagcccgacgggtgcgatgtttttttgaccagaatgaaaaagttcaaaaagcaccaaaataagacttttggacatattggagtgtatttggtgcgttcgtggcaaaaactcacttcgtgattcgcgcggcgaacttttgtcaatttatgccaatgttggcatatattgagccctcacgggtgcgatgtttttgaccggaatgaaaaagttcaaaaagcaccaaaacatgattttttgaacatattggagtgtattgggtgcgttcgtagcaaaaacattgacgaacatttgtcaattaatgccaatattggcatatattgagcaccgacgggtgcgatgtttttttgaccggaatgaaaaagttcaaaaagcaccaaaataagacttttggacatattggagtgtatttggtccgttcgtgccaaaaactcacttcgtgatttgcgcggccaacatctgtcaatttatgccaatgttggcatatattgagccctcacgggtgcgatgtttttgaccagaatgaaaaagttcaaaaagcaccaaaacatgattttttgaacatattggagtgtattgggtgcgttcgtgatgaaccttgagttcctctcgacactcaaggctgttgttggcccgatctttcggtgagttgtgataactacgatttgggagaaacgttgacgatccgactacaaccgtacgagacgttgtgttgcgccttagcgatcgatacacctctccgtgggttgctgatcttgccggtgcagatcacccctattcctgcaagcaaatcgaagaaacaagcaagaacaagataaaagcaatctgatattgcaaataggaatttaatacaaatgataagttgggttttcgaatacaagcagacggacggtctagccgacacgcgcgctgcaagcgaagtagcaatggctaaactttcatctaaacaaaacccaagaaaccctgaaggggtaactagctatatataggggtgggaggacgacctaggggtgcctagggtcgtgctccaccagcttggggcgcaccccacatgggccccacctgggccggggtcccaaatgaggttacaagcccataggcccattacaggtgtcacagcaccttgtttcttcagttgctgccgactgagatggatattggcaatgaggcttgatgcattggaaagaggactccgagagctttccatcaagtactcacgggctgaaaacggaggtcgtatggagcttcggcggccgtttgaagtcagcagtgtagcaggtggccgaattggattttggcacttggaggactcgaacttgatatcttgttgttcatccatgatgtgagcaacggatgtatccgtagtagccatggtcacatcatgttgagaccccacgggtgcgatgtttttgaccggattgaataagttcaaaaagcatccaaacatgaattttggacatattggagtgtattgggtgcgttcgtggcaaaaactcacttcgtgattcgcgcggcgaacttttgtcaattaatgccaatattggcatatattgagcccccgcgggagcgatgtttttgactggattcaaaaagttcaaaaagcatccaaacataatttttggacatattgtagtgtattgggtgcgttcgtggcaaaaactcatttcgtgatttgcgcgccgaactattgtcaattaatgccaatattggcatatgttgagaccccacgggtgcgatgtttttgaccggattgaataagatcaaaaagcatccaaacttgaattttggacatattggagtgtattgggtgcgttcgtggcaaaaactcacttcgtgattcgcgcggcgaacttttgtcaattaatgccaatattggcatatattgagcccccgcgcggagcgatgtttttgactggtttaaaaagttaaaaagccttccaacat

SEQ ID NO: 27103 - DNA, 12022 bp, Oryza sativa
tgggtaggctgtcgctagttctctgctctttaaaccggcccaagcccaactaagccaaagcccatagagttctgctcgaaaatctctctaaaaaagggctaagaagtactcacaaaccccaaaaattgcagagcttcatttattgcatcttactccaatggttactcttaaaaaaaatctaatcccggagagaatttgaataagagattgttcaatttgtctttaggattaattcagatttgaccatctatggttgtattgagctaatacttcatttaccgtgaacgtgtttttaaaacagttaaatggtttattttgtgcgaaaattttttaaataaaattttctataacaaaaaaatgtaaatatattttcaaaattataatagttaatgtttactacctccgtcctaaaataaagcagaatctgaacatatatagttgtctagattcatagctaaaaatgtttttattttaggacgcatgtagtaattatttatacgctaacaatgtgtcttgctttacgtgccactaactagctaagcccaacagctatatcaaacttacccgaagccttcttttaaagaaggatcatgtgcccaaatttggggttggagtaacggataaccagcgttcccagtatttgacaaaaaaaaaggcgctcggttttgtgaaaatttggtgcttcgagctggatcaacttgacaaaccatttcgtaaactggtctaatgatgaaaagatattaaatcaaagtgagtttcaattttttgacagaactgatcaaatttcacatgttttcaacagttttcacaaaaaaaaaaacttatgagcgatttacaatcaccgaacggtttacgcaaacactgctgctaactgtaaattgttctgcccgtcccaacactgacaaataaattcccggcaaacaattctctaacaaaaaagcttattaggcatttccatgttgatttaacctctggttatatatatgcacttcatgcaacagtaaaataaattatgcatgcatgcaccagtagaacgattaatacaactgaccaccagcactagcttaataaattcaacagagttaaaaagtgaaaaacaatcaataaacttatataacttccaaaaaagaccatctattgtgccaaacgaaggactggaatgtaattacgtaaaatcaggggggtcacggaaggatatatccttcctctcttcgtcccgcgcgcgcgggcaccaaacccccctcaaaacccctcctcctcctcgtcgccgtgtgcttcttcctcgccttccccctaacctcttccacgcgcatttcccatcgccgaattcgcgatcgatctcctcctccgccgccgaggaatcgatcggaagagctccccggaggcgagccgtacgtcctcctcctcctccgtctccggcggccacgcgcgcgatctcccccgacttccgcgcgccgcgaggtaagaggtatggttcccccagcctccattcctcgccgctccgcacgcacgcacatgacaagccctaaccctatcccgcgccgcatcaggctgtctccccgcgccgcgccgcgccgccatcgtcgtcgaggtcgatcgacaccgccgctcacccaggtgtggtctctctcttcgcctcgatcgatcgcgatctctctctctctaccttgtttgcgccgtgatcgatctctcctcccttgcgcttgcaggacagatgcatcatggccgccgcagccggagaggtgccaggccctcccgaggccgaccccctcgaggtgaagtgaaatcgttcgacgacatagctaattgctactagtagctttgcaactggatcggagtactaggttcgcactgttgcgttgcgatgtgttgattgctggtattaagagactgattttgtgccgagtcatgagatcgatgttagtttagttgcaacctgccccaaattaatgttgtttctgaatttctcgattatatgctaatttgttctaggcatctgcgcagttagttcacatatgctggctaagaatttatagaacacattggtgcaaaccaattatggcatgcatacatacatgttgcatgtacggatgaacaaggataggcattaattggagaatctagagtctacactagggggatccaggaggattaggggtgtgttatgtagtactcccaatgtccatggaagattacaatcgggaagaaatggagacatgagcagctagagcctagaggatgatctaaactaagatcaagttcttttatagttttatgaactagattggacatttaattctcactaactgtcattatccttgaaatatgttattcttgtgtggaacataatcaaattatttgtaaatcatctttgtcttacatgcatgtaattcgtttgtgctctgatctcttattacagggtatcataacgtttactctcaaccttgcggacgtggacaaagaacaacttacactgattttgtatccgagttgcgccaatactctgttgagagggcaccatttacttgtagaaattgccccaccacacccgtcgatggttatttatcatccgtttttgccccaccatgcccgacaatggttactttatcatccgtttggtggaaggagatcattctatccggctacttatccaggaaaggaatggatatatgatatcattctagagaggggatcattcctggttccattttaagggtgaaaccctgctagattttattgttcagtcttcagaggaaacaaaaatcgaagcaagttatcataaattgattcccagtggaaggtatgaagttacattattcgctcattaatactctctatactctactcatggctatccattttatacagtatatatgatgtttcattgtactaacttttgtttcgtcgtaaacatgttcaagtcactgttttcatacaggccctaagccattgcgacattacttccgctgcattttgagctataataatgatgcggctttgggtactacaatgatgaacaattagatattgctttggccccaatgagtggtactttggctttgggtactacggtgatgaacaattagatattgctttggccccaatgagtggtactttctgtaaagaagacggcttagaccagtaaagaggtttgcaactcaatatgtattactttttgtgtgcctaagaatatatacataaaaactgctattataatcaggatataagcatacaaggaacatgacttcaaagtttttgacaaaataaactagcaagactatacagtattactagcagtaacttctgttatcactggagtaaagtagccgtttcctactaagccagaagaatataaatccgcgcctgtctatgaaaaaactaatgatatcaatatatagtttgactaacacatctatttctattgtgtaggttcattcctaattgtttcaggaatcatgtattattgtgtaggttcatttcttagtgtttcaggaatcaggtttccgaaagactcacggaaggtttgtgaaaatatatccactcttacacaatatcagcattcatcttgacctatcacgatgaggatggcaatccgctgccgattgttcctgaagatccaacttatcattgaagctgtttttactctggatgaagtgctagaacttcaggaacaaggatggttcaggaatgaatgtttaggatggttcaggaatgaatgttttgaggagggttagagtaagggagagtaagttacttcaaacataaggcagaatcagagagaaggcaagcaaccagtcaatgaggattgtgacatggatgcagtaagtctgagataagagtaatatatctcaagacaggtggttggctataagattgcaaaaggcagaaacatgatggagcagctaggaagctttgaataagcagaaaataactgaaaatatacatatctatatgcaagataaaatggaaacacaggggcagatgcatgttgagcaaggaatcagtcacaggacatgatgagggttttaagctcagaaaaggttctgaagatgcaggagacacacaatgtcacaggacatggtgagggttttaagctcagaaaaggttctgaagatgcaggagacacacaatataaatattgaggttgctgactctgttgcgaataaggaagacagagagaaggtagattttgggggagagtaatgagtttctagagaaggtagattttgggggagagtaatgagtttcttattcaaaagtgtctgaagatgattttgtaaacgagtgtagtgatagtagataattttgtaaataagtgaagtggatgtagtaatagcagaggaaaacactggagtcaagaagaaaagaaaagaagcagcaagaggctaaggaaaaagaagacataaatctagaggaggtggctattaagaggaagctaagcccaatatgcttttattaataaatgtcagaatcatattccatcctttgttcattattccaatggtaaaagatcttgcatgtgctagaattaatttcttcttaaaagagtaggaagtttacagagatatagatgtgaaaacaaatcagaggatgattttcatctgaacattgcctttctgaagataatgactcagatttagatgatattgatgttttgatgaaaactctgaacatttctggcaatagaaagaaaaaaaaagaggaaaccttgaaattgtaaggttacttctaaagttgttaagaagtgggggaataggaaaaaaaaagagatgaaaggtaatattagagaaatgagtgctatagaaaaggttagaatgttacaagatcttgttagagaaaataatgtagaattaatgtagattttgtatcaaaacagtaaaacaagacttttcctctagaatgctgaggggattagtggtcataaatctttgtgctggaactggatgcctccttctggaaaatctagggatactctaattagcattaatactgaaaaatttgatatcttggaagttactaaaaacaaattctgtgtccaagtgaacctgatgatcaatgggacttgatggtaatttatggagcaacctagaaagaggaaaatagtagtttcttaactcatgcaaatcttttacatcaacaaaaaatatcctttggtgatgggaggtgattttaatatcttaagaaaataaagtgaaaaaaaagctggtggttataacaaatagagtttcattttcaatgcgattattgaacaagctagtctaagagaactttgtttgagagggagtttcattttcaatgcgattattgaacaaactagtctaagagaactttgtttgagaggaaggcaatttaattggagtaataaccaggacagcccaaccctaaaaaattgaacagagtttttataagcaatgaatgggaggttcaattcccactcactgttgttagatctttgccagtgggcttgtctgatcataaccctctgatagttaccactggagaaaacacaatcagtcattccatttttaaatttgaacagtgctggttccttagggaagacttgaataaagtagtggaggaggtctggaacaagagttattcttggaccagtatagaaaaatggcaattgaggcttaaagcccttaggaaaaaaactaaatgggtggaacaatgtcacgcccagaaattcccgaatagaattgcaagcagaatgtgcataaaaattcctgtccaggaccggccggggtacacaaacgacaatgttgacattcagatccacgtcttacaaccatcataaaagtcttacataaatgcagcggaaaaacgaaagacaacaggagctaagccttgactagatctgcagcgggaacagcactccacaggcatcatcgacggcacggacgaagcctactcctcggagaaacctccatctgacacatactcgtactctggggttggaaaaaaatagagcaagactgagtactacccactgtactcagcaagtcataccggaataggggtatgatgtagggaattatcaaaggagagctagagtggttcatttgcataaagcgagtatttataaacagaagtttaaagaagaaaacggtcgtaataattaatcaatattaatcatccactgtccaacgctataccacgttgcgacaggcccaaccagattgtgccgtgttcatcttcatggaaatcccgggcttttccgactctcatgttctttttcagctctgctatttcaggatcatttacttgagctgctctgacttgatccacgagcgtaggccgtgcctccagaacggctacgaacccgtgttcaacaattgccacgttgagatgctcaaactcctgccgcaattcctcacacatgccctcgatgcatagggcagtgtagtaactcttcctgcttaatgcgtctgccaccacattggctttcccctggtggtagtgaatgctcatatcatagtctttgattaattccaaccatttttgttgtcggagatttaggtccggttgggtgaagatgtatttcagactcttgtgatccgtatatacttcacagcggttgccaatcagatagtgcctccagatcttcaaagcatgaaccactgctgccaattctaggtcatgagttggataattcccttcgtgtggacacaactgccgcgaggcatacgcaaccactcttccctcttgcattaggacacatccaagtccgtggcgggatgcatcgcagtagacttggaagtctttcatctggtcgggcagaatcaaaactggtgcggatactaatttctttttgagctcctcaaaactcttatcgcactcagctgtccatttaaacttctcatctttcttaagcaactgagtcatgggtcgagcgatcctggagaagttttcgatgaatcggcgttaataacctgcaagttcaagaaaacttcgaatctgcgacaggtcttaggtggggtccatttggtaactgactccacgttcgatggatcaactgccacgccctgagctgtaatgacgtgacccagaaatttgacttcagacaaccaaaagtcacacttgctgaacttggcgtataactggtgctccttcaactcctcgagtaccagacggagatgttgctcatgttcttcttcagactttgaatagataagtatgtcgtcgatgaaaacgacaacaaacttgtccagaaattccatgaacactttgtttatcagattcatgaagaatgcgggtgcgttggtaagtccgaaagacatgaccgtgcactcatacagcccgtaccgagtggtgaaggccgtctttggaatatcctcttcccgaattctcaactggtggtagcctgatcgcaggtctatcttagaaaacactttagctcctttcagttgatcaaacaaatcatcaattcgcggcaaaggatatttgttcttgattgtgacctcgttgagtgcgcgataatcaacgcctcctcttcgtcttatccttcttctccacaaaaatgaccggagcaccctaaggtaaagtacttggtcgaatgtaccctttctgcagctgctcatcaacctgcttcttgacctctgctagttcgttggccgccatcctgtacggtctcttgtaaattggcgcggttcccggtgccaaatcaattcggaattcaatctctcgcttgggtggcatggtagtgaggtcttcgggaaagacttctgggtactcgcaaactatgggaatctcttccaatttcctcggattcttctcctcggtgaccactgggatttccgcctcaatctgattcaaggagacccgttgctttggtgagactagtgatttgtacactacggtttctcccttcttgttggtcaaggtgactgtgcgattcgcacaatcaatgactcccttgaacttggtcagccaatccatcccaagaatgacatctaggtctttggattcaagaagaatgaggttggctagaaatggtgatctttggatttctattagcactgaagggctaaaactgaccgaggttgaactatttcccagggtatgaaccctcattggtgtattaagctcttctttccttaacccatgcatccccacaaatttctttgaaatgaaagaatgcgttgcaccggaatcaaaaagtactgttgcagggattgagctaacaagaaatgtacccagtacgacctctggtgctgcttgtgcctcctccgcagatgcgtggttgacacgagcctggacaatccttggcccggcacgcctaggcttcgggcatttgtcagcgaagtggccaagctcgccacagttgaagcaggaccctggttttgttccagtctccttcttggcttgcgcggacgggcctgactgtgccggtgccactggtgggcgtggagctgcaccgcggttgggctgacctccatggtggttttgactgccactggcgccctggtggaagttgctagagttgaacgggcggtactggcagatgatcatggtggtaggtccaccctgctgcccgggagcgaagcgcagtcgctgatggtttccttggttggaccggaactgtgccgcctttctcttcccgtccatcttgttttgctgatcctcctgacggattgccttgtccaccagcctttcaaaatccgcgtagtccccagatatcagttggttggtcagctcgtcatccagacctgccatgaacttttcctgcttctcggcgtcagtgcggacatcctccggtgcatatcgcgcgaggcgatggaactcatggaggtactcggtcactgtcctgttgccctgatggagtgcctggaattccctcttcttttgtgccacgaccccgtctggcacctacgccttcctgaagctacgacagaactccgcccaagtgacttcagtgcctggcgggcgggtggccatgtgattgtcccaccaagctgacgcaggaccttgaagctggtgtgtggcgaaagcgaccttctcctgatcattgcactgcaggagatttagcttcttctctatggcatggagccagtcattcgcctccatggggttggtggtgctggagaaagtgggtggtctaacgcgtagaaactctggcaacttggactgagagggagggggaccaaactgctggtgctgctgttcggcgtgctgcagcatcctttggtgcatctgctggtgctggtgctgcatctgctgcatcatggctgccatcatctgcgtctgatgtgccatcacttgggctagcgtcggattctcaggaagtggtggcggaccattgccagaatcactgttgggatgcacaccatcagcgcgctcttcgccgttgctgccctcgccggttgtgcggctaccattcctggtgtagaccatctggaggaaaagcagacggggggggggggaagaagaaaaacagatgctcaagaactaagctttattatataggaatttaaactgcaattgttctgatctgaattaaaacacttaaacagcaagcaaaatccttattaagacagccatatcataggcacatgatatcgaccgtcgactgaccccaagcaagcaacttaaacacacaaactaacaagcagaagctagacagtcgataagctaatggaaaacgagcctaatgctcggaacggctcctacggtcggtggagtcgaaggcgtcctcctgctcgtcaccaggtccctctgagcgactcctagagcctggcagataagtctcgccgctgcccggctctgagccactggagctgctgctgctgaggtcgcgactgccactgggagtagctggcaaccaacctccattgccactggcggggaccctgacggctaatgcaggcgcgaaggagagagcggatgcaggagctgacacgggaacgagagctggagctggtgctggagctgcaggaactgctggagctgtgggcggaactggaggtgctgcgggagctgctgatggaggtgggttcctgggcgcaagctggatgcacacgggtgtcgttgtcgacttgcggggcgtagtgcggatccggactcctcctggcgcgggaagaccctttaactgagcattctccctcttcaggcgcgctatcttgtccttcagagtgacgatcctcatgagcttcccatcattcaaggccttggacgccttgtgcagatccgagtgcatcctatccaatcccctcatcacagcacacatgtgaccaaaggtggtgtcgttatcgccggctgtcggacggaaagtactgacatcatcaccgctggctcgacgagggtgaaatcggtacgccgtgtcgtggaagatgtagttgtggcgctcccgtagtttggccatcatcaggtatgctgcctcctgacaagcgtgatctgctgtgtctccggacgcctcaaccaccatgttagcgaggcaggtgcccacatagccatggacctctaggcggacacggtgaggaagctcgccactgagtggtggaacagttgtgtactctggcgcgttggggtagcccaccaccagcgtcatacgtgctaactctgccacaaagtcaatcatgccttctccgtggtggttgggtgggtggccggctatctagagaagacaaaggagtaggatcaatgcatgctcaaatccaaatttaaataaagcaataaaggactcaaataagagaatcgaataagagcaagattttatgcatagatcattttgcatgagggcgaataaataagacagacttacataacgatacaataatggggaaattagatacatactaataataacaataaaagcagaagtaccttgcaacacatattcctgagctaggacctaatgcatttcacccatcaaatcccaactgattgacgaataaaactcaagtaattttactaaaaccctagactgacttgttttgacaaatctcacttaaacgagcgaccaagatttttcccttgaaccacaagaacagatcccaattttcccggaacaaatccaattgtaaagaacatatgcaatgaaaaggattcagagggctcttaggtttttccatttggcttgtcctacggtcaaggtcggctctgataccaacttgtcacgcccagaaatttccgaatagaattccaagcagaatgtgcgttaaaattcccgtccaggaccggccggggtacacaaacgacaatgttgacattcagatccacgtcttacaaacatcataaaagtcttacataaatgcagcgaaaaaacgaaagacaacaggagctaagccttgactagatctgcagcgggaacagcactccacaggcatcctcgacggcacggacgaagcctactcctcggagaaacctacatctgacacatactcgtactctggggttgggaaaaaatagagcaagactgagtactacccactgtactcagcaagtcataccggaataggggtatgatgcagggaattatcaaaggagagctagagtggttcatttgcataaagcgagcatttataaacagaagtttaaagaagaaaacggtcataataattaatcaatattaatcatctactgtccaacgctataccacgttgcgacaggcccaaccatccacctatactatccaatttcaaaagactaaactaggtgagactaattacggtgaatctggttgaccgcccataaccgcgggcatggctattcgaatagttttactctgatcagagatgtacaactgtacccacaagacatagccccacgacacgtttccgtgcgccgacatgccaccacgacataccggaaagaggccgtgacaggactcttcgcataaccccctctagccaagcacaccacacctcaggtttcacccccgtccccagtgggcgacgggcagtcccctctcgtgcctaggtgaatccggaagccgcataggccgtcgcagggcccatccaaactccatcacgcccacccttgcctggatgcgtcagctagagaaaagctacactgggtgcaggaa

SEQ ID NO: 27104 - DNA, 712 bp, Oryza sativa
gttgaaagaaaaaaatcgtgttttggttgagatggctagaatgatgttggatgaatacaacactcctagaaaattttgggctgaggcgattaacactacatgttatatttcaaatcaagttttcttgagatcaaaacttggaaaaacttcttatgaacttttaattggtcatgaacccaaagtttcacatttgcgtgtttttggttgcaagtgctttgtcttgaaatctggaaatttggacaagtttgaggcacgttctaccgatggattgtttcttggctaccccgcacatactcgtggctatcgtgtacttattttggagactaacaaaatcgttgagacttgcgaagtttcttttgatgaggctagtccaggtactagacccgaatttgtaggtacactgtcacaggttcagggggaggatggtcgtatttttgaagatgagagcgactacgacgacgatgacgaggtcggctcggccggtcagaccgggcgccaggccggtcagaccgggcgccagcacacctccggtcagaccggctcaggaggagcggtcagaccggccaggttcgtcgggttcaggtactgatgatgctgatcgagatggacctccagagaattcaacttcgaccagtactgaaacagaacgtggatcaacttcagaagttgctgctcctttacacattcaatgacgacatccgccggaacaaat

SEQ ID NO: 27105 - DNA, 4334 bp, Oryza sativa
catcttctatatgcttaagtggatattccgatgctgattttggaggttgtagaattgataggaaaagtactagtggaacatgtcattttcttggtacatcattgattgcatggtcttctagaaaacaatctagtgttgctcaatcaattgctgaatctgaatatgttgttgctgctagttgttgttcacagattctttggcttttatctactttgaaagattatggtcttacttttgagaaagtacatctcttttgtgataatacaagtgctattaacattgctaagaatcatgttcaacactcacgcacaaagcacattgacattcgctttcactttctgagggatcatgttgagaagggagatgttgaattgcagtttttggacacaaagttgcaaattgctgatattttcactaaacctttggattctaattgctttgcttttcttcgtggtgaattgggaataattcatccttttggcatggtttgagggggagtttgtacctcatggttttatcaagcaaaaatatgacaatgagaaaaattgataaaaaaaaagagctttgtttatgcatattgtattttcttgtgcatgctagcaatactttgaaggtttatttgtctctagcatagtttgtatgtattctagtcttttcatgagacttagattttgcttttaagggagatgatgcatgacacttaaattctatacttgaattaagaaaatatgcaatgttggtgctagcatatggtttgatttataaatgctccatatatatgctttattgacttgttattcctcaaatagctttaattgctcattgtgaaaaagagaataaaaatatgaaaaaaaaaatgaataccgaatccttggaaacagtcttgacgacaaggacgtattcgatgtgagcaaaataatgggtgccgaatccctggaaacagtcttgacgacagggacgtacccggaataaaaaaagagaaaaatatgagcaaaaaggctcaagaaaagaaaaggtaaaaaaattctctttgttgttttgtgctaaaaagttatttgagaaagagtgataaatgcaataggtatatgtgtttagtgtttattcttcaacctatgtgcttgttaagatgttgcattataaatcgtatgaaaatcatgaattttgattgttgattcaagcttaattgtaaaatctttggttcatggttatactttaatgcatgcttgttatattatagatgggttcatcttctttttattgcaacacatgacttgatatgctatatgtatgctaagctcttgaacattaatgaacataattcctatgcttgatgaaatcattttcaaaagagggagaagtaatgtgaaaattttttggagcaaggtgaatttttggagagttgttgagaagagcatgttttttggttcaattgggaatttctttcttttaaaaagggggagaagttttcttttggatttttgagcacgatgtgtacgtttttacgaagtgtgctttttaccacttttgtttttatttttccaaacacaaaaacatttttaatgggtttgccaatgtgttcatcaagggggagattgtaaaatcaaaggtgtttattattattattttgtgatgaacaattggcatcggagattattggttttgttatttggaatttatttacgaagtggttttggagatgattggatttgcaggtgctgtgattttatgtggaccggttagaccgggcatgtgctgccagtcagaccggcgtgtatcgcgcggtcagaccggcgcagcccgcggtctgaccggccgactctgtgtcggtttcggttttgggttgtttatttggatatccgtgattatttcatgattatggcttctagatggatactatacgaatgtaatactgttgtttgctactaatgagtcaagttggagatagcttggtctcggaatatggtttctttgtttgttccatgtgtaggtgactcgatgcctcgggagagtatttgcggtgatagaccgggagtcggcttggggataagacgacgtccgtggtggtcagagatcatgcaggatacttaggctagagttgatgcacgtggttgatggagattccatatggcatacgatggagttattgtgtgcgtatgggatgcggagtcgaatttggaaggagtccaaatttggtacgattggttatgtaaagtttctttcttgtactagagggtttcctaaggtgtttaggactcctagtatgagtttggttcgtggctctaggctgcctacctcgggtataaatagagggggagcgtgaggcttcctggtatcgcttttaagagaaattgagttgagttttaagttagggtttcgagtttagtcaaaatttttgtaaggagtgctgtaggtgcactttgtaaacatagagagaagtaataaagtcgtcatccactttaagagttcttcgatttgtgtttcaccgggtttcggcggtctaaccggcgacacaccggcggtcagaccggcggcatcgcggcggtcagaccggcggcggcgacaggcgcagcagggatttcagggcggtccaaccgggagatctacaccggtcagactggcggctatgcttcggtcagaccggctaatctactccggtcagaccgatctcatcgaattcgagagtaacttttatttccgctaaaagtttttggtttttgggtatatcaaccattcaaccccccctggttggcttagttcttgctattcgatcctacacccgctggttcggttgtagagtgtgtgttcgtctcactgctgaaagcccttgtcaggccgaaatctgaaatctttgccttgaaatttgcagtaagaaggatgttgtgggccttcacatctctatggatcaatggtggactgcaggacctgtgcaggtattccagtcctacatgcatgaatagttaaaaaataaaacatcagatatggataaatgatcataatgctgaaaatttgaagtattattaagaggggcattcaggtcaatatacagatatcagcccgtattatcgaaagagagaaagaaaaacttcgaagcttgttggttaccattggcagagtccaacgcaatgttaaggcgttgcaaccaagtgaggggttcagtgtgaagatcttcttgacctgtgaaaaagaaatcatggaatctgcaatatgaggcttatctttacaataatgaaaaatcggcttctgaggtaaagttctgcaaacctctcaagtggtctgctaggcttcccccatccatgtactcatacacaagggctagatgtttcttatcgttgcaatagcctattaatgacaccaggtttctgtgatggaccctggctaagtgctgagcctgtaatacaacaaatgagaattccaagaaatttatgataattgataaattactatacttttaattcatcagttctaactacacacaattgtataatccaatgatcaataacttcttgtagtccattgtattggcagagtaatgtatgtgtacctcagccaaaaactctgttttcccttgattagatgtttgtgatctcatcttcacagcaacgggagttccattctctagatagccaaggtatacaggaccaaacccaccccttccaattatggttttgaaactatctgcgatgagcttgagttccttgtacttgaatctccggttctcaaatggattagttgcaccagtaacatctgctggtcacatgagtataatatcaactggaagagaagcatacgctacattctcatagtgaagctaaaattctcttctttatgtacattcatttagttacctggtctcttctttctgcagtaccaaaatatagcaagtataagtagaactacaaacacaagtacgactgggggaacaacctcaagcacaagttttgtctttctcttgctttgattcagaatcagatcgcatttgtcagttccacaaagattcggattattctcggtcctaaaagaacaaaatatattggtcagattgcaatatattggaagtaaggaattaggtcttgtcagatcccttcatactttcattgagttagaaataaggtacatctcagtggtatagcgcaaggcagttcatatgtcactgctcgaggcgataccatgatagtggcataacagggccttaggattctcatggttgacaaaagtgatttgaacattagtatctagcttatgaatgaaagacaagaatccattcaaacacaactgaagttctgagagacttgagtgatattttccatgaaagtggggtttcctttcaatattga

SEQ ID NO: 27106 - DNA, 28546 bp, Oryza sativa
ccatagactaaaattcgacactatgttttcccaacttctactaccttatttttcgtgcgctcacccctgaaatactcgacgatgtatattttgcaaaaaaaaaaaactatacaaaaattgctttaaaaaaatcatatttgtccatttttaagtttttaagctatcactcccttcatctcaaaatataagcgattatagatagataggatacatcctagtactaagaaactaggtagacttttgtgtacattcttagaactataatgtatatcattcatccaaaatctcttatattttagaacggaggtaattaatcatgcgcggatgacttaccttgttttccgtgccagagaccacaaccttgtctatatctctactattttcctcaaaaggtttctgtcccgctaatccaaaaggcaaaggcaaattcaaacaaaatcagtttcaaaccataattttgatgggatcagctgtatggactcaatatgtcgcattttctactagggagcacatgaaacatgataaggcatatgtgaaaaatcaaattaactactgccaataaaaccaagtgattcatcaagcaacagcataattatacagtatctgcactacattattcctacactggttatacaagatgatccaaaagggttatgaggtgaaatcactatgcttctccattgacttcagccctcgaatccaaatgcgacttcccgtcgtcgctgccctgcaatgattcgtccattaaacggaataaagaagagttcaacaaagaagttgagatgattctggtaagaaagtagatggctaacctttatacagacataaatatagtgaacatcaggttttgggccaagaagactaacaattgatgtgctatcaccatctaaaggcagtggcttcgtcagttcccatgaaggctcccgactcctttcccatctatctgggatgtcgagagtgtcaattcaagagtgtaaattaaatgtgttttagcacaactataatgagtggcaggtaaaatgtttactccgcacactaatggcgataccaattgccctttatagcttgacaattttgaagtaccaatgaatggacaaatggtttagctgatctcacggaaaaaaacttactaacctatgacatgaagctttactgtccaaagctgcaggtctttaaggagacgcaatcgataacttgggtcgccataagtgatctgcaacattgtgggatccaaagttaagttctagacactataaaagaacagcatgcttgtgtaaacaaataatatagttcctttaccagaatataaactcccttgtccttgagaattctgtagatagaagaaagaaatagaagctatagtaagttaaacggagatttcacaaacaaataaagtgcgtgatttacctattgacctcctctagcatctgagacgcattctcttgtgaattttggccacactgcaatacaagaaatgcaaatctgagtaccatgaaggaagaaaatttgagtatgttgtacactggcaaaaatgggctcaccattatagaatctagcgttcctgcaaacaacagatggggttagaacccaatgacatgttgcatatgcacatagcaaatgctcctggtaagactgtaaccactatatttactatggtacctttgtcaataacagcatcgaatgaacctgactcgaattcagccatgttccttacatccatcttcatgtctgtgtaaggtaggaaataaatagtaccacatgacaagataaactattacactcactaagggattcagcaaaaaaaggctggggacgaagagtatacatttaaggtgaggcttgtcacgatatttcttcttcatttgatcaatcaccactgatgatatatctatgttgacgatgtcttgataaccatcatcaaccatgttttcaccaaaaactgttcagtgtttaaaggcagattatttaaacaagaaatgccaacttaaaatagaaaaatccactaggcaggaatgcagagtaatatacagaactttggagttctatacataattgttttttgagattaatgactgaaattgagaaatatctcagtccccaactatcagcaatacaattaataacttaaaatagagaatttagatggtcatgtagttcaagatgttgaagatcatcgatggcattcctcgattttcatctgttatttaaactccacctcaaaccattgtcatatgttatttaagtcagataatagtataaatcaaacagggggtcttttctgtataaaagaccaatattatgatcaaaatactatcacagttttgcttatgaaggaatgtagtacatgaatttccctattgccactcaaaaaagttttccatattgacagtaatgaaggtttgttgattcaaattgctagctttctttgtcactttatagtacaaggtggacctgtcttgctgcaagtgcattttcatatgctgtggcactaaccagagcctatacacagtgctgtccatcattttgtgctatgtgcatttttagctggacaatgcaatgttgacaaaggacaggggaccataatgcaccgcattccgcacatggttctagacagaccgatcaaattcagcaggtatttcgacaaattgacaggccatgccactctaaacccatcgatcgcacccatgttgtcacgatgtgccaaaatggcaagttcttcgattgtaatgcatttcttcaagcatatgaaccctaatgtcgaacggatgcagtttaatcatagccttaatttctaggagcagcattgaacaaaccaagaaattccaaggatccatagaaaatgtctagctgcattacactccgcgctgatccaaacaagaaaacggcggcctgcgttgcactatggcgctgattcaaacaacaattttcgcccgggcctgatccaaacagtaatcctttcaggaatcccaacccatgtcgaaatcacacgaaacctgagtctgatttcatcccaccagcaatcccgcgcggaaatcccaggaaatggacgagacaccaatcaaagagccctcgatctagtagcggcggaggggagggggatgtatgatataatcagaggggctcaggggagtagtgtggcagtgcactaaccggagttgccgcagccggcgaggaggaggcggtggtggcggcggacgtagacggcgagcagcggcgcgagggcggggtacttctggtaccagtcgaacgggccggcctccttcctgtaccgctcgtcccagtaccacgcctccccgtacgcctgcgccgccgtgcctcctccaccccctccccctcccgtcatcctcggcgccgccgcggatctggccgccgggaatgccccgcctccgccggatcggtggccgcggggtcgcgtcgcgtgtccccttcttcgctggtgccgacgcgacgcgaaacggtggtggataaggatcgcctcgccggggggcggcgagaggctgagatgggccggaggacgccgggggtttgggcccagctccggagtggttcgaggtgggccgccatggactttcggcttcccaaattttgacgatcatctcttttttgaaaaaaaaaaaaacttgttcccaacttattttgaaataaaacgtaaacttgcacgctgaagttttggccgcgttgaagggagtagaagcggcagctcacaggcgtatggtgcacatctagctggagtccgactcactgatgctggttcaagctctgaaggaaggtaatctacaatttgcagcgatgggggtcttgtcctgggagcgaagaagattatagcttcgacttttatttcttttcgagttagctatttgtccccgtgaatataataaattggcagatgctatagcatcgtttggctgtaacagtccccaaaactctgttctcagttgggacggttcacctccgggtgtggaggtcttggttatcggcgattctgttgaaactatgggttaatggaaacaactagttttcctctataaaaaaaaggtaaatttcactacttttaccaaactatcagaaaactacatatttaagaatgtgtatcataaaactacatatttagtgcaaaatttattacgaaactatagatttaaaatattgtatcacaaattatagatttacagtaagacaaattttgctgcagggtattgtgactttgcgttttagttataggacactgtactaagtgacttttaagggaatacactctcaaagttggatatttactgctggacacctcacccattaaaataacaatttctggttgaagaagagataaaccacgtgaaatgtcagaaatgcccttagacccatatgttaactctcttatctattttctctctctatccccttctttcagcgcggcatcggatccccgcgagctaatgctgtaagtttggttattgtttgaggtgtttggtgagttttcctcgtgaagaagctaggtgttctcattttttctcataactatcttggtttttactttttcttattgacatatataatttgtactttttctacctgattagtttaaaaaagcctgcatatagcgtcacggcggtggtaggtcggcgccaaaacacccggcgttgagatattggatattagcactatcaggggtgaggctgtgggtagtttttcattttaagtttaggcattggcctattatttaaataagtttttttttgaagggccaaactctcaaatttggtgctttgcttcttctccttggcgtcctcgcatcatcccaggtgagtggtgagcaaccgttgcttccaacggaggcgacgtgccgtgcattgcaaaactggaggatatgtttcgcttccgtcgccggcgacaattaacgccggcaattacgcagcagctagctttagctctagcagtgacaggacaaaagacgcgccttttgcaggggatctgtacaacacgtacacgctgacgctgaaaagagagagcacgcaaatttggcaatgcgattgagctgaaccatgaacaacactctccaaatcaaattacacttatagcggtatattttaaagcaaagcgaacggctcaaaattacattgtagtaataatatataaattacactgcagttgcatatgagtcataatataattacattgtcattgtactgtattttatatctgttcaattttagaagaaaatttattgataaatatctagcaaaaatagttggacaatggaatatattaaatccagcctaaaatcaaatggacacttttttgtgatcagcgtcgtgtggctcgtgccgaatgagtccaagagcgtgtacttaattcaacgaataataaaagcatatggtgtaaggtagtagtatgcttaatttaatccaacttgggctgatctcttgtggcgtagcacaaaatttaggtgtctatctaatctaagctttagattagcaaggacagtcaaaaagggatgggcaatatcaaagagacgcgatcttgtggaattttgtcgatccctggcattgatctcagagggagactttgagtgattgaaaaattatatgctctacacatgctactagatagatacatgcattaattacatgagagaaagaaagaggaaaagaaaatcacagacaataagagcaggtacaatagtatactataagccagctataaacatattttaaagagataaaggaagagagagaagagcagcggactacagatctgtagccagctgcagcgcggactccaagacgcaatgtgtgtatgacaggtgggatcgtatagtaagtaactattatatgaattagctataaatgaattggagctagtagtgggctatactattaaacttgctctaatcttatagctaattctactattttcatgacacacatgagaagaaaaaagtgcaacatgcaatcaactcaaattttaatctcttctcgatacaccaccacagtcggcagctctacgacaaactcttcaaccttttaatacaaccaaatcaaattgttccaaaattatttaaccatacatttttgctcctggggtagggtgttgcggttccggatgacgtccgttgtgcctgtgcccctccccaatagttctacacgaccagctttgttgatgcagccatagcgccgcccacaaactcgtagacgtcgcgtctgtgttggagacaggcctataattttgctggaatttttttggtggtggggaggagacgagcgagctaggctggacaaaggcaggggcaggcagcgctgtggattgaaaaacagtgattaatttctatgtcttgggctctgctcgatgaagagggcggtaacgaccagggacagggagtgatctctgcctccacatctcggtgacgcatcgacataaacctctacagccgccttgaaccgtttgggctaggctgctagggttattgcccccggaatgaataaattgtggattacaccctctgttaactgtaaaattacaatagtatcatgaattccttttttttttcagagttgcccctctactacacctagtacactcgttacccccttagtagaaatcaatctcctccttattatcctatcttatgaacggctaacattcacatgtgtactttaaaaaattcctagttaggagttagctccactattaagggctcattcagattgaggggttttgaaaggattctcatgagagactgttgacagaaaacttttcctttcctcccatttggtggctcaaaacggtcataagataaatgaaggaagttttgggcattatctaaaaaaaatgaaggaatatttcatttgtcactgactcactgtccctggaggacaaccaagggaaaaaaaatctgcccaaatctcatgtgaaaaattctatgcaccacaccaccgacgagatcaatcttctttctttgctcactgaccatgtgacagtgctagggcccagttgtcagctggttttaaatttgtttgtcggttatttatgttgcattccttcaaaaaccattcttatgttttttcaaccatccaaacgcccatcccacaattttttttcgaatgcgcaaaagaattgcacgtcaatatattaaaagaaaagagttatagttacaccacgtaatcaacaagaccggcctatgccaggggaaaggaggaaaagcaaaaaaaaagaaaaaaaaactgaagcttagaaaaaactatggcggctaaaacaaaactctaaacatcgggaagggactgagccacgctatactcccaacaagtccccaaaagcggcaacgccagctaacgatcatagacagacctccgagtggatcaactccagaaccactgagatagaagagagctcagagtcgaaaaccctagcgtttcgctcctcccgcaactgccaagaccgtcccacaaaattcctatatcatcagatcctctgttttatctacgcgttcctatcaaattcctttgtttttctcattccttcatttttccaatcacgtattccggacaaaggcctaaacctgctctgatcgagatagaggacgaaagattatagccctcctgaatcctatgcacgcggtggtggtgtgtgtacaggcgctcacgcgcggcggcgcgcggcgcacacgaaacgcgcggggcgtgtgggcaattggcaaagcagcccgcagcagcaagatccactaggcgtgacgcgggcatgggcgtcggcgtggcagggaaagcgggcgtacgcgcgtataaaaatgaggcaccaccccgagacggaaggaaaggaaaggagcggaggcgagcgacgacacgcgcgcgacaaaatatagcagtttagcaatcagccaaaattaattaaggaagggggaggaggaggattacgttgccctcctcgccgctaaaccaaccagattagctgccgggaattatttcatcccggcgagacccttccgcccgctagctcccgcgcgcgctgttccggccgccgccgagctggtcggagtcggaggcgaccgccgatagccctgccggcgagagatcgatcgatcggcgtcgccgatccgacatatccaatggtacgtgtgttcatccaaatgcgcatatatatatatatatatatatgctctatctatctttcggcgatgaattcgccgccgtccggccacgcgccgccgtggtcgcgcggcggcggccttcgatgagattccgatcgatggttctttcgacgacggcgacgccgatcgacatgcatatgcctgccacgccacttggcactagctagctccatctatcgattctttcttttctttctccctgctttttgcaatttgcatgccctctctcttccgtctccctttccgttctcgcttttggccttcgttactttcaaatctcttgacatgcaaatgcattgaaaaaaaacatattctcaaacttcataactcatcaggtccatatgtcagcgacccacgttaaaaaattgcattcgaatcgaccgacctctcttactgcaagctctccatttttctcaccgtcaaccacacaagatagcacatgacggctacagatcgaaagcttacacgaatatatccattctgaaagaagaagaagaaaaaagaggcatcggttaatttgcttttcgttgcagaaaagaaaccaggcgtacgcaactacgcatacatacatgtcggcctcgatccacactccaaaacggaatatatttctttttcccctccttgtttttcttggcccgattggccggccattgcatcgctgacctcttctccacccttgttgataatttgatttataatcgagtcgtcgttctcgccaattggccggcgacaccttcagctacctcttagattcctttcctctcatcgttttctaaaatcacacgtctacatatatagtaccgaaagaaaaaaaacaattaaaaagttcagataaacatattctgtcacctactgctaataataatgggaatattatactacgtcgtgttgtacagaaaaattcgatcttggtcagttggtcagacgtttcgcgtccttttctcccctcccactacctcccgttcgttgtaatttagctcatttcttcgcgttgccgatttggaaattggaagtttcacacgcagcatcgcttgttcttgttcttaattggttatctgactgcgacactacgtacaataataattaaggtagtagtagcagcatatttttttttcacttgtgtgatttaattcgtctccttgcatttttctggttctctgttgctgttgttctcttgtgccagcctttcgttttcctctgtttgcttcgatcgatctgaaactctcccatagttttactcgtctctgtctgacaaaattactactgtagattaattactcttttgtattaatatcatattttgcatcgaagcatgcaactggggttgcttggtcattttctgagcccgtgactgacgacgagacgaacaaaaacctcaccgtccagctctcgccaatcgatgctgatgcaggttgagtcggggagcgaggcggcggcggcgacggcggcggcggtgctgacggcgccgctgtccctggagggcggcctcgcggcggagctccggccggcgaacctcgtgcagcgcgtgctcagcctcttccgcaacgtccgacccggctccgatctctctcactttcaggtaccaaatcatcaaactgaaactgatccccagctcagctgctagccattcttgatcctagctaggcatagcattgtgtgattaattgtgtgcatgcatttgaaactccaatctcgagagtgtttaaatttggatttactactagttaatctaatcacttcaggtcaggagcattatatcaccctgaaatcagcaatgattttggggagggagtgactagctagtggagtagtgtactctactccactaattaatcatgaggattagtttttgcttgtgggatatgaggagtagtagtaggtgttgagtaaaccaagagaacaagcttcaatacttttaagagaaaacaaaacaagcttcaatagttgaacaacacttccttgctcacttttataaggagtattttgatttcgagaaagtcaaatgaactttgaatattttggctaacgacggttagtaataatacaactatatttggtgcataaaagttgtgcctatatatttgtatttcaaatcaggagctttcacataatactgctctactaattaatcatgtggattagtctttgtttgtgggaaatgaggagtagtaggtgttgagcgaacaaaaaaacaagctgacttttcaaaaaataaaatcaacacaagcttcaagagttgaatagtattgctacttgcgtagttgcatatgtaagcatgatgaacggcatagtccatgggggcacgcctgtttttcaacaaaaggaactcaaatttcggatgtggattcgtgattgcttagtttgacagctttcggtttctcagtaggggataaatgttaactaatgtggtcaacactttcagtttcctggcacctagcctaatcaattactatcatctaatcagtcactgtctagcagtaatttcgcagtcaaaatgacgttaatttgactgaattttttcatctgaatttgtctgaatttttgtcatcatcagctgcctgctacgttcaacctgccgaagtcgcagctccagttatacggcgagggagtgtactgcgtcggaaaagactacctgcggcggtgcgcgaaggggagcgacgccgtcgagcggttcgcggcggtcgtcggctggagcatctcgacgacgaggcctcccatcttcggcttcgcgccgtacaaccccgttcttggagagacccaccatgtctccagcggatcactccatgttcttctcgagcaggtgattcatcacaatgtcatgcgttaaatttgtagtttcgcgataaatttggtgttaaaatatgtagccatgtatctgtagttttgtgaaatttacagatgatttgtttctgaatctctgacagaaaattgtggtctttttcaggtgtctcatcgtcctccggtctctgcactgcatgccactgacgatgacggtgagatcgagctcgtctggtgccaaaacccaatcccgaaattccacggtacgtaggccagattcagaatgaaattctactccatttcctgcccatcaatttccaagtttcagagtctgaaattctactccatttcctgctcatttctgaaggcacaagcgtggaagcgacagtgaaaggcatgaggcacgtcaagcttctgaaattcagcgagaattacgagatcgactgcccaaacctgctcatcaggttgctgcctgctccatcagcggagtggtctgggacagtcaggatcgtctgcaaggagtccgagctcgaagcagagttgatctactacaggagcaacgctttcctgggactaggtggcgatccaagatgtgttaagggtaagatattcagctcaagatcaggagagatcatctgcgagattgatggacattgggatcggatcgtgtcggcgaaggatgcgaagaccgggaaggtgtcggttctgtacgatgctgaatccgccattgctgacctcaagacacctgtggtcagaaaccaagaggtaacttctttctgacaatttgtgctcacaagaaatctgaactttgtgcattttttcatgctgcaagttcagatggcagtatcccagagataaaattcagactaagtccacatatgattcaattcaacaactgcaacgtacaaactaagcaggaaaaaagaaaaaaatatcactgaattaggaaccaaagatgtactaacttatgaaaacctcactgaccattgttaccctaccaattatgttcacaagaactctgaactttggccatgtagataaaattcagtctaactgatttcattttcagtcgttcaacaaaactttaacctacaaactaagcagaaaatcagtgaccaatactgaatttgtcatgattgtgtttcagggcgtgtcaccttcagaatctgtggtggtttggggcgaggtgagcgatgccatcctgaagaaagactgggagagatctagtcaggcgaagcgacgagtggaggacacggcgaggaggctagacagagagaggaacgacaagggagaggtctggattcccaagcatttctcgctgtctcaggacaagaacggcagctgggaatgctcgccgctggagaaatctgtgcctccagctccgatcattgtcccctcatgactgtagattacatgtaacagatgatcctatatatactatataaatctataacatagctgatgatttgattttttttaacttgtcaagtgaagtatggccgattctttgcgtttttatagttttcttcaataacagaattatctcaaacagtagctactcataagatcgggccgcatgacatagcctaagattggttgagctacaaccggtaagcggtagaaatatgaaaaaaacgatcatagtaatttatagggaaaacttttatatttatattatgaacggtctaaaatacaatggtagattacactaaattcggaaaatagactatgatgaaaaatcacaagatcagctttaaaaacaagtttaaaaaataaaaaaaattagctgcgacgatgagagcatacacagtggcaaatcatcgatctccgctgaaacagttagggagcaatttttttttcacaaatatgtgctatatttttcatttcttgtaatctatctacataatttcttccccacttgttaattaagttagcagtgggagaaacatctaggagtaatttgtaagcaagttttacaactgctatacatacacgaggagttctgaacttctgattactattgtcagtgtcagaaaatcctacaataactcttgcttgaaatggaacaagagcaatgcaggtagcagcagcagcagagaccacagctggttgtgccgcgtgctcgccgccgacgatgacggcatcatccgcttgctcgccgacgacggcatcgtcatccacgccggctgatcggcgctcccggcaccattgatgtcctccgtcggaggcggctggtagctgattatcccggcgccattgttgccagccggaggaggtgtgctgcctccggcgccgttctggccattggccggcgacggcgagctaatcagcggagtgacaccggaggtgttcgacctgtgcagaccatgggcaaaagatcgtcggaatgtgagtgttgagatgcgagctactcccttcgttttatattataagactttttcgaattgtccatattcatataaatgttaataaatctagatacatatatatgtctagattcattaacatatatatgaatcatgaatgtgggcaatcatataaagtctcataatatgaaacggaggaagtagttgaaaagagagaaataaatggttgatgaattggggttggttacccggtgggagggaggcagaaggcgatggtgtaggcggcggcgctgcaggtgaaggtgctcgtgccgtcgtcgtaggcgtagctgtaggcgcgcgggcacgccgtcttgaagatggccgagtacgccgtcggccggcacgtcgccggcgtcgcgtacgcgccgctgcagcagtactcctcctccccgaacgcctcgcacgcgctccggcacgccaccgtcccgctgccgccgccgccgtcgacgccgtccacctgcaactccttcggacacgctgcagatatatgctcacgtcagcgcaaacacgtacgacacgcgtgcatggatgcgcgacacgtacagcggttgaggtcggccgtgcagccggtggtggcgcagccgccgccgccgccggtggcgccgccggcctgcgggacggcgacgacggggaggttgtagccgtcgacgaggctcacgtcgtagtagtccaggtcaccggcgccggcgccgccgccgaccttccccagcgtgacctcgaacagcgtcgccggcggcgtggcgcccgtgccgccgcactccaagcggccgccgcagtcgccggtctggcacgcggcggcgccagcggcagcggcggcggcggcgccgccggcgccggagaagtcgcacccggtgcgcgcccatatccggccggaccaccccgccggcgccgggacctgcacgctctgccccgggtcgagcctgaaccccgtcgtggccagctgcggcgtgccggcgccggccagcgtcgccggccatatcgtctgggcgcagtggttggatatcgtgaagctacagctcgccgccattgacgagctccaccactgcgccactagtgcgagcacaaagatcacacacgctggagctctccaacttcttggtgcttccatggcgtgtagcctagctagctaagctaaagtctctagatgagagagacttgccactgttcttggttttggagggaaatgatttgagagatttgagacatggatggagactttaaactgattggagtttgtttgagatgtgaaagaaagggtttcttggtgagattgatttagcattttgcattttgcatgtatgaggtggcctcattgagaagatataccttatgtaacaatggaagggataaaggtgaaaatgaaattaggagatgactaacagttttattgtacttggtgagtgtgtataccttcagctgttgactacatatgctttgtttcatcagccttaaccaattctcattgtccatataaataccatttatacagcctaaaatactatgttttatgtgaagtatacataaatgataaatgatacaatgcagtgtgaaataagttagggcattcaaattagatcaactagtgcaatttaatatttatgtaccagtctcacactcctatttgtgagaatatcctatgattatccctgaacagtgcttccaaggggacaattttggctatgcattagtaagaagcaagaactacaagaaaggtatcaatttctcacatctaattatactgcatacaaatctaaaaaaattcatcagtataaaactacagactaggtatccaaaaaatatgcctaattctaccgctgtagatccagaaaataaacataccatctttcctaacagattggataaaggatagcttccagttgggtatcacaaataaagaataaccatccagggacaatgaactttatgcttcagagaaaatacgtgcaactactctgctactataggatctatcacacacaaaatgatctcctaagatattagcacatacccagcacaacccttgctaacttcttcctgtgccttactctacccttgtcccttgaagaagccaacaagtgaataaagaccgagagaaatataatgcatgcaagtttgtaaaattcattggaacacaacatacaaattttatcaaaaagaacaactcatgtttccaggttcgtgttcctgagaatagatgacaggagcatagatcaataaagccggtcagcaagaaaggtcacaacatactagtcacaggctcaaacacccatcagaaaggccacaaacagtactttttaatcttgcaaaaccacacaatatgctaaaacagatatatcatcatgcctcatctatgctgtctcctcgttaggtgctccatcaccactcttgggagtatgagaatcatcaacaactgtgacaccctcaaggtctaaggggcgcccagtcatgggatcaataggacgtctgtcgcgaggcccacccttgtgggccatagctagcattggaggtggaggtagaattccagcacggtagaggatgcgctccacaggatccgatggctgtgctccaactgatagccaatacctgatccagggcaatagtggcagatgatgaactttggacagtgtcaatgaagaatgctgaaggatgcactcgaatggtaatgcgtcaattaagcaattagacaacacaaaagatcgaattcaggccctatggctatcagacatcaataggataaaaatgataataaaaacttcacactcattgctatgactaatgccaagttgcttaatttgcaaatataaggaattgcatcatacaaaagtaacaaaacagcttctttctgcataaatctatgagaaaatctaaatagagaatgaaacccccattttttagaatcaacaagacatgcataaaaaaaaactgtctgttatttaccagaaactactggaattttttttagactggtagaaactactgtaattacattatgtcaaaataattattgctagtaatactctagatattgaagattatgcgttcatcctaaagggctaaggcaatatttaggtagatcttgatttgagatttttagtagcaacaaaggatgagtaaattagttgcactttgatctttctatgcttcaagctgtcaacaaaattacaggcattaacaccgatgactagctggatagttgcttcattgaaaaccaacaaaaaagaaaattacgagctgacaataacccaatttcagattgttctgacatgactatgaaccatggtgttcgtttatgatcggttactgtaacaaggataaacactgaaagtatactcacttcacccggtcgaattttaaccccattctcttgccaccatccttccctgcaaaacagccaaatagaatcaccacacttatcatcaaattaacattacacccttcaaactccctattcatcccaagacaccatcaattattgaactacaaacatcccaacatttccaaggcaggtggctctcccccccaagaagacacgacgctggatgaggattccggaagagaagatcacggcaagaggagaatcaaggccaaaggaggagagggtgccgtaccggggagcgggtcgtagtagccgaggacctcgaggtgcttgccgtcgcgcggggagcggctgtcggcggccatgagccggtagaagggcctgttccggcagccgaaccgcgccagcctgatccggacaaccatctccccgccctctccacaccaactcctccgccggcgaccggccggcgctcgccgccgctctgagtctcagaaaaaggcgagggttttaggagaggagagagagagagaggaactggaggtagacgaaagggcaggtatatgggccttttttgggctttttttagcaagttggtccatgattttagagaggtgggcctcttagcaagatagggcttgttgggctttttagcgagatggtcggtaatgggcttgttacttttgttgtgtgggccgtaatgggcttttttagagagatgggcctcgttggtctcactccagctattctcgccgcgttcctcccgcctcatcgccgtatttggacttggaaggagctcactgacctccgcctgccgcgcgtgtggctccagctccgccgccgcggtcgcccgccgctcctcctcgtcggcgagcacagagaggaggttgccttgcttccccgtcaccggcttcctccccacccatcggccggcggcgccgtcctgcccggagccccagagagaagaagagtgagagagaagaggatggaagaaattctctatgctggctgaagcagttcaattgctacaacagcaatccctgccgatcaagtcctatttttccttctagtacctctttatactctggtttttattcagttctcttttcattgttggacttgttcatctactttgttcttcattttctttttattttccttttttttttacagttgcagttcctgctttatttttttccccatgtcttgttttatgtatggatgtctttggtatggtaggtgttgtgtttgctgccaaacttgtcactagaatacgagagaaatgcatgcgtacaagttttggtattggtttacacggggtatttggattaacctcttactaaaatattggccctactaaattttgatagaaaagcgaacaaaattaactggctctaatataaatattaggggatcccaaatattggagtgcttctaatatcctagcaatttccttaagctagggctggtataagcagtaaatggcttatgagcgacttaaaagtaatttgtgggtaatttttttattgatatgttcttaatgatttagaagctaataccaaaaaataaattacaacaaaagaccctaaaatcagcttcaaattaaatttcaaaatttaaatttcgacgatggctaataagctgatacgcatattctcatgctggcttcctttctggcttttgcggtttggcctgacttcaccatggaccatcctgggagctgcttctggaagttcaatcactcatcgtcagagatcgatcagagatttgatgatctgtctcatctccctccctgtttgcatactgttgctcacgcctgacgccacacaccaccgaccatgcactgaacagttaacgcgggagctttatgtcacagcgacagtgtcactgaataatttgcagctaattttacatttactattttagagattatcgatgccaagaaacaactcaacagaatctctgctcaaattaactgattattttactactagggctgtgtttagttggatccaaagtttaaattttggttgaaattggagatgatgtgactgaaaagttgtatgtatatgacaggtggatgtgatggaaaagaactgaagtttggatccaaactttggatataaagacagcctagcatagttagcatggagtgccagcagatggatgattcttgtatagtttcctggttcactctaatttcagtctgtcagaatttgatttctacgatttacatgagagagagatcacattgtttcctctgaaaattttgcttctatcagctgctcactagaccaagatacaaaaaaacaagatgcagctagtagtattattgagtagcaattcatttttttttttggaatgagtagcaggtcgcaattaaggaataactaaatagataatccaccaattggtgtctgctgttcagctgcacgatgctaggtacatgcccccacatggcagggaataattcgagatttatatctgctactgcaacttagagacaaataatatgagccatacaaaaatgcagtagagttgtaccaattaatggagcaatatattcaagcctgcctaaatagataggggcttttaactatttgccacttttagatttagcaaataactatttgccacccctatctttataacatgtgagtccatatgtgtctataatatgtgggtccagtggcaaaaagttaattgacacatctaaatgtgccaaatggttaaatatctcaaatagatatgttcgaatattagttagttggacctaggagtagtagatcactagttctcctacaccacatccatttaatctggcactttaatcttgtcttttattagttttttaaaggaaaagagaaaaaaaaatcttgtcgtttggaataattatgatatgccatcaaaatacaataatgtatactactactacatacattaagactgatgttcatgcatgtgacacgtttccctccctttgcattgtgtacacaaattaattaaactcctttttctgttgcataattctttacacgtatttatgtgatgacgtccaagctgatttgtcgctaattacatctttaattgctaactagttttactagtagtacaatgagattaattgttgtctccttctcttgatgacgatgtccatttcaaaatgcaagctgtaagaaggcgattttatggttgtaaatttatgtcagtttgtgaggtttcagctgataaagaagtgattagtctgatatgaatgttgaggtacgtaagcatctgcatggttgcttcttgcttgctgtggatggatgcttcttgcttatcctttcaattttttgcaattctgcctgcagagaattttattcttgttgctttcatgcactcccgccacacctttttatatcttccaaattcagattatgtgaatgtaagaaaaatcttcagtcacccttgatgcttcaaagttactagtgattagttactgcaattttctgttctgaatgatgaggctccattccatgaggttacttcattttggctttgtttaatttaaggcccggttttgatttagattattaaacatattattgccattgatttaaaataagtggtctaagcaatataataagaaaatataaggaaaatggtttttcgaagcgtggagcaaatatctagccatttttgtgaaattgttaggctggagctctatagtgaattgaacgagaaaattgacattgtgccatcgtcaaaagtggttttcgcccaaatgccactatcaacacatggttacacgctaaaatactatctaggaccaaattaccctcctctcctcttcttcctccctccaacatcattagctctcgccggcggcaacaatgccaccatcggcagcggcgtgggcaggatggcaacggccacatctgcctctgcctcctccgccgcggcgttcggcgccaaaaccccacgcctgggcccgagcccgagccccatatccacattcgcgaggcctcctctcgcgcctcggccgccggcaggctccacgccagcctccacctcgacggcgcgagcgggagtgcgagcgccacgggcagtagcagccggagacgatgtcgtagccgcgccgcggccgctccgcctcgcgctcctcctcgggatcctcctctcgctcgcagtcccgcttcgtctcctcgggctccggctcgtcccgattgcgctcccactcctactccttctcgtcgtcgtcgtccccttcacggagccgctccccacccgctgccaaggccaggtgacatcccccgcctctcccccacccccacgataccatctgcttgtcctgcgcaatcgattgtgccgtcaacggtgcaatgtggccgccggcgagagctgatagtgatggagggaggaagaagaggagaagagggcgatttggtccgaggtaatattttagcgtgtaaccgtgtattgacagtggtattttatcgaatccattttgtagggtggtatttgggcaaaacccacttttaatgatggcataatgttaattttctcgaattgaacggacagtgcaatggtccactcaatttgttccacatttggcttaattttgttttatcgtttaacgaaaatgaaatatggccataacttggtgacattgggacaatttcttctactttggtcggcttctttacattttctccctgctcataatgtaacacctactactcataatgcccatatatacaactgaagcaagcaaacctgaaatcatgcctgtctctgcatcaccaaatcttctgaaatctaagctgcaaattaacttgccgtggcaagaagttctgatagttacatcactcaatataactttgctttgcctttttgtagctgtgttaccagcagatcagaaaacccaaaattaaccacaaattaattcatcatggttttcatttagccacaacacagcattgcttagtcggtagcagaaagcgaccagtgacaaaactggagaccatgaaactgtgcctgtatttggagctaagctgctaataattattggcaccatcactcgctgattaaaaagtcctaagtgccggtgtgatgtgaggctgccattggcttgaaacacaagcaaaaatggactctgaccaaacctgtctgcttgcttggccgcctagcttgtcgtcagggcataaaccaccaccgaccgctaggtaatcaagcataaaatatattaaattttatacttcatcagttagggaatacgcaaaagatttatacatatttcattataaaatatattatggatgtatctctagtaccttccaatcgccgaaaaaaatgtctcttctgtagcaatcattggagatggattaatcagtaaccaaacttgtcgagtgaaataatgtagtcggccgtatagttaatttaaccccgccaaacgggaaaaaaatactttatttagtcgctacatagaaatagcgatgatgtatctctagtacctccaaattgccgaaaaatgtctcttttgtaccagtgaatgggagatggattgatttgtaacagattgtgcaacttcgaattttttttgtaaaatagatatatggtggttttttgggtttaaagaaacaatttggagagagttgcacatgcatatatggttaaggatatgccacttagtttggagtatatgcacctggcacaaattctttttctgattgagaggatcacgaggaaataattcaacaagacgagaattatatattggagtgttggatctaactatgcaaacacaataagataaacaaataattgcactagaaatagtagtgcagtgcacatgactagtagtagtactacttgctgtgaaacgagtgctaaagagtactcctactgtctgaaaaaacattccatgcctattgactgtttgacagatgtacttacaccacaatttggtcagatcgatttatctaaggaccattgatccacaagccatcaaccatagtaccatacataaattaagttgcaaaagatattaactaatattttggaaaatgtttctaatcatgcttcttaacactgaaattcacaagagttggtgtcagtatatgaaaaaggagttgcactttttatgtgacatatttttcagtcgatcaataattggagcttagaaaactacgtactgcgtctgtatctgtccttgctgaaactgaatgccactggcattttcggagaaagctcaacatggagccaaatgttcagcccagcatgtacacgtttgcaaacagtcactgccaagctggaccttgctgaattatcataagcagacatggaagaaaatgtgagtgatccgaaatgaaatgttcagatgtgcagccagtaggatacttcgttgaaacacccaaggttactacttaggaaaatacatgacgcatgttttgttaggataagactttaaataaataattactatattatgatataatgttgttagattcgtatttaaaagtacttattcatgattatacttttgtgtcatataatatattacgtaggataattatttgtcaaaatcttatcctaaaaaaataaaatacatctcataataaaaaaaaacaggggtggcactgtcaattcagagacatacaacttcctcactcgaattctaattaagtttccctatcttgatagccaaccgagctaataatactactagccagtagcaccccaatagtgttagtattcatattcaattagaataaattcgcaatttggtggctataacacacaatcgtttaccgaatctaaactaattaaacagggtccatgtcgtcaggctcgaccggatcgataaacacgcgctagtttaccaattttttttttaaaaccaaatacatacatatatacgatccattccttgcagctgatgcatcatccattcttataatcttaattagttaaaaagatttatccaaatgcttaaccaagaaattaattaagcagtgccatgtcatcatcttatcacatggtaaatcacaatcatcatcttgtaaatcagtacatcttgtggaaggagagaagtaaaacgattgcttcctgctactacatcttacgtatgtgataaaatccttaattatccgtgcatttacttgcacgagaggaacagaaagctattactaatcatggtgattactgcgtgtcgcgatcagtaatgagctggagaacggaaacgtaccgggacttgctgctgtcactgtcgctaataccgaagagaatacgtattttgtctcgtggttttagctaactacagtgcaagaacattcttaggcagagatcgtgtggctctcagacttggtgatgagattagcaggtaatctagaccgttgatttgatcctaattaagctactagttctggggaaatttaagcatatgccaaggtgctagtcaatggatgcttagcttgttgggtatatggtggtatacaatatacatcatgaatttaataaacatgagaagttatcctggttattgttgaaccatttgccaaaaaaaaactttaaaaatatgagctattttgttatggacttatgatgccattagaagcaagctgaaattaactctacagattgctgtagcatgcaagaaatcttcagttcgttttcgacgtcaactgcagagacagtaatgtataaactaccagagccaatgctgctaagtaacttgctactgtacgtgctagagaaattgtcagaagaattatgacgccatgtcgccacatatatatttgttcttataacttaattaatttcctttggaaattgagcacactattccttctgaaagcatctcagaatcagatggaaatatttaagctcatttgttaacattaaactgtattgcattgatcgcacatcacatatactgagagactttgtggtgttcttataattatatgttaggaagaaaatttctaactaatttgtggacaccatttaatatttccaagaaatgaatttaaagtggatatgattaaataagaacaaccagtcaagcaaaagtaaatgatgtttattactagggttctatttcacataaattgtctcatatatgctccattaaacacctagcagaatgatcaaaaaaatgcgcatgtttcccaaacttctaaatagtgtgatttttatttgtacataacttttttatattttttggataataatttaaattcatttttaattttataatattttattcgtctataccctcaaataattatcataaattattcaacaatcaaccaataaaaaaacaaccccttaattaatcaatcggaaaatagtgatctttgccactggtgttttatttcacatgcattatatatgtgaaaaaatgtacaatatgcgacataatggtattcctactatgaagaacttaatgtttttgacatgtaaaactttcatagttcgtttttgtccatatatttttaccacagaccatgaaatatcacacatatatatacacgtctatacccacacgttgattaatgcgaggaatttcttttgtttacaactagtcgaatacaagtcttaaaaattcatagaccaaagggtatggactcaacattcaatgcttcatctccacaaaaatagtccacaaagcaacaacatcaccaccacatcatccctctaccctacctccccacatctcatccatgcattatgttcccttcacaacctaacacaaaacaaaaccattcaatttctatagaaaccacacaaacatgtttacaataataatcaaacaatactaataaacaaataaataagatttacataggaacaaaaaatgaagccaataagctagcccaccaagccaatcactcactcaccaaggtctcccactcctagtcatcatcatcatcatctccctaactaaaaccacacctcccctcaccactatagaacaaaatccccagcctctctctctagattctctctcctaataaaagagagaaaaaaaacccaagaaaaataagagagagaaactctctctctctcatcacccacccaaccaagccaccccctctctctcttccttgcaagcatccatctcatcaaaggccaaaccctcctcctctccccaacaagaacaacaaggaggcgcgattcacgcgaacaatcacaggagggggagagaaggggagaaatcatccgctcatctcccaaaatcctccaaaaaaatccatctttatcccgaaaagatcctccttttcttggggtttctgacaggcgtgcacggctatctttaggcgttctcggcctcatctctcgtggaaaggttcttcttcttcggggttgtttgctgctgcttaatttgaggaggaaaagcccaattcttgtggggagtgaagggagggaggaggggggcatggcggaggagggggaggagaggcggcggttctcgaatcttcgcggcgtccggtggcgggtcgatctcggcatcctgccggcttcgccgggggcgtcggtggacgagcaccgccgcgccgccgccgattcgcggaggaggtgaggctcatgctgcttgtgatgccccgtgttttgcgattctgtgccatgtgcggtttgttcttgggttcgttgatctctgcttagtcgatgttgttatcgattcccctatttttggtttggttcttgtgtttgtgtggtataaaaggtttttgttttcacttcccagatggttttgattggcatgaatttctggcttggtttgaggagaaaccatgcaatcgtgatttgtttagtgtcataacttagcatgaaataatttgtatgttggtaatcttttgtttgtgatggtgttgtgtgcacatggtgatatctccatacttgattcatgagatggaattggtggagaaatttctgctgaccttgtcaattagacaaatttgtcatttttatatgattggagcattggtccttcttattcctttcatctatatatatttatttaacatctgatttgtttgcagatatgttagtttgagacgacgtcttctggtagaccctcatgttccgaaggaggagggcagatcatcaaacctcattgtcgacaacccgctatctcagaaccctggtattgatacaagcatgaatttatgatgatgagatgctaagcttaagatttggtcgatgatatgttagaatttagaacatttatgcacttgtttcctaccttcttatttggtggtgaaagtcttcaaatccttgcatgatctataaagagtaaattcccatagatagtgtggagttatcgtcatagatcgggataatgatgtattagaacatggatgcacttgtttcacacctgcttatttagctgcgtgagaatctttaaacatctgcatgatcattattcattaatgctgatgaacaaccataagttgatgcccgcttatcagcatagatgtttattgcttaagttaatgctctatatgtgttagtaattattcaacatccctctgtagatagtagctggggtcggtttttcagaggcgcggagttggaaaaaaccgtagatcaagatttgtctcgtttatatcctgaagatggaagttactttcaaacgcctacttgtcaggccatgctgcgtcgaatactattgatgtggtgccttcagcacccagaacatggataccgccaaggtaaggaactccttttgcatataaaatttacaatagttactaatttctcaattagagttgatcgaagtaatctgattggctctgccctccctgtcgcaaatttgaatggagctgacatcctttaatgtcatttagcttagcttgttgttagaagttcccacttatgggcatgaaaattgtaattctagaatacattgttagggcatattgataagctctgagatccttttacaagttaataggtcctgagatcctttcacaaggaaatacataaaaaaaacgttcattttgttataaggtttaaactcttgaagtgctatccacctataccatgtagtgttttcggtattgatttttttcttttaaagatgtggcattgaaattctgattacttagcatgacccaattgattatcatcatctctccaaatttgttatgattttatttgattggcatatgtggaaagacttatcgactatttttgtcacaggaatgcatgagctattggcccctctagtgtatgttcttcaagttgacattgacaaactatctcaagtacgaaaattgcatgaagattgcttcaatgatgattttgatggagttcctttcccagataccgatatggttttcagctataaacctagaaaggacccaaaatggagttttggagctgacaatcagaatgattctgaacgatcttccaaaagtaacactcttgatgagcttgatccggacacaaaagaaataattttacttagtgatgcatatggcgcggaaggcgaactaggcattgttttgtcagaaaggtttatggaacatgatgcctattctatgtttgatggtttgatggatggaggtagcggagtggtacgcatggcagagtttttctccccatcctctgttggatctagctcaaatctaccacctgttattgaagcctcatcagcattatttcatttgctctcaattgttgagccaaccctccataatcatttcattgagttgaaagtggaaccacagtggttcgcacttcgttggttgcgagtcttgtttggacgagaattctgcctcaatgatcttttggtagtatgggacaaagtttttgcttgttcaaacaatatgctgctaagtagtgatgaggaatataactttcgtatcttgtgttcagatagaggagcatttattgcagccatggcagtttctatgcttcttc

SEQ ID NO: 27107 - DNA, 9507 bp, Oryza sativa
  unsure (1)..(9507): unsure at all n locations
agttcacagcaatctctcttcttcaactcctccgagaactccattgcatcctgtttctgacagtaactgggaagagaagtggaggaatgtgcacaaggacggaacaacccccaaggaggttgagaggggcaattcttttagtaaacaattaaagaaatctttgacccagaagcttggtttatctaggacagagtcagatccttctccagtgaaggtcctcagtgtgagtagtaatgatactcggaattcagtaagacgttgccttctgaatactttatcagatgatttggattgttctaatgaacttgccgggaaaactcaggaagacgaattccctatcatctcagttcacagggagcatcctctgagctctgcagagccttccaagttaaaggcagctggtgaaaatgtaactgtgagcgcatcatgtgtggcaaaactcagccctctaaaaaaatctgtggttgagccagctaatgagaacgcaacacaggggacaaagtgtgtaccagaagcttgttccagcggtgagaactctccagtgttctatgcagccagagccagtgctggtaatgaacctttgaatggccaggacacggattctgagagtagcagtgttacctcaaattcctttgctggtgaccatgatagggatgaaattctgaaagatgagccatccagctctaatgatgataacaaaaccatccaagattcagaagcagcatcttctgataaaagtccagaccgaaatggaacctctgagagggctgtcgtttctaatgaaagaaagccattcattagtaaattccagtggctcttgaagttgggaagaccttcggttgaaggcaacatggagaagagtagtggagagacatcagctgataaacaagacggggacacatcctgttctccttctgatgggaattcaaataactcccgtggtagcgtaaagttggcttctggtgataaaaaggtcatgggcagcctaaagaatcttggacaaaacatgcttgaaaatatccaggtactgtattcaatattatttttcatgtacttaaagtaagcctgaataaccttgtctttacaaaatgattaggtgattgagtcggcatttcagcaagaccgtggtcagcctggccctgtggagaacttctcaaacaacattcttggaggcaaaggacaggtcactgcaatggctgctctgacggagcttcgcaagatcagcaatctgctgagcgagatgtaacagtgtaagatgtatcgcccattctttcccagctttctagctcagctaaggcctggtagtaataagtcaggtacctaggtctttttcattcagcagtgcttggcactgcttgaatatgtatatatagattcgattcgattccattccattgagtaaatcatgtaagcattgtacaaggatcacccgtggatttacctggcgcgtgatgagggagtagttctctccggcattaggaagctatctaatgatggatgaaattttgtaagataaactttttaaggaagaataagcagaatatgttgcaatatgtgcgagctacaatgcagctggatgatttgttcgtcaggctgttctatgttcagttcatgtgcagtaccattcagaagcattgtatttggcaacaataagaaaaatcactgctgctctttctggcttccagtgcgatatccaggtttgcaatgttttagccattgtattattatgcagctggcatatctctgaaccagaaatgttcagcccaatgtatctgatgatgaatgaacattgatagtactatctagcaactactttctcggttcataatcttttcagggcattgcaccaaattgttcagagattttgttggcagctgtattatttattagctgggctcatgctgtccatgcatcctggcacaacccagagacagaaatgcagcaaatgctgatgtttctttcacgcatactttccatatggctatggtaggaagccaagaaagcgacgtacactgcttctgtagctgtagtgcacgactcaagcaaaatcttgcatgtttaatggcatataatggtgtctgctttctgcacgcattttccatccactttcttgatcatttctgtgtctcttcctgaacgatgttgtgaccgggacaggcagtttcgagtctcatttgtatacgcaatcatttagcactaccacttgacacagattaattagagaataactacatagcagcaattggttgtaatgtcaaagacgacaacaattctctgctgctcttattataaccgaggccctgttctttctcttcaagattacaaagattatatattatcacgaatacattttttaagttcctaaacgatacatctttttttaaaaaaaacactttcaatatataaattgttcaaaatattttttaaaaaaacttttcacctttttaatagttattaattcattcatctgtaccctacaacatcaccataaaattagataatctatcatctatttagaacagttaaacatgacgtgaaaggggtaaattcagaagaagcaggaaaacttgttaacaaacaaaacacacggtgtttcggtccacgggggatgcgatgagcgggtacggatggtgtgcggactggactgcaaaaacggctggatgctggcgaattccaccgtgtcggtgtcatcccacaacagcagcaggagcagcgtcagctggtccaactgtccaagaggaaactacccacagggtccaactgcccattccatgtggcagtgagcagagctgacccagccatcctgctcaccattcttatccactcaaacagctcctggccatgagttttttttttaagaagggtgcaacttagcacgcacactcacacaccataacacacgcacacacacgctaaaaataagattgaagaccactaggtgtctcagtgcacgcgcatacgtgtgtaccctatttctagtcgaaaataccccgaaggacagtccttaggaaagacggaaaaaaaacccgtcgaggtgaggtcccacgagtcgaactcgcgaccgccgttcgctccactgcgaatgtgccaaccgagccatgagtttgtgtctgatgaatgatgatgattcagtgctctgacagcgagcaaatcttgtctgaagaagagagagaaatgatgggcctttgcttcggtttgatggcctgaaaattcaagctaaaattttggcccatcatgaattcataatcctcatccatccctctgtatgggctggggagtttgaactaattctggcccatttatgagataggatgggaagttgggtcacttaacaaatcatacataagttgttctttttttccttccataaaggaaaatttgatgatgtggttatattgtggttgcacaaatgatcacattattactgctactgccaaggatctcttgaccatttaccacatgaagcatgatggggctagaaaaggttacaggacttccaggtttatcaacctctgaacatgtagaacttatggatgaaaattgggccaaaaatgatcaatggcaagatcaacaatcttctctgtggacaaaatcattaacagagatatacacacctaaagttaagagagggagaaaaactccagacaaagttggggcaacctattggtgtgcagcaaaacgagttgcttagccagcaaaaaagtaagttgatgagaaagaaaaatataacatatcaggctaatcatctggagtacagggtgtgttgttttttgttgaagctacctctgtcttgaatttctcccagacttctaaacccatggggtgccttactacataacgttttacgaaatgtttgtctgcagtggctaggagagtgctaagagctagtccagtagcaatcactcctttctccaacaaccaattgtacatcaaaaacctaagcttggttctctccacggtaaacgagaggaatgaagggaaaattaccagggtactcagaggatatcccatatcatttacaaggaaggatatcttggattcaaggacatggatcttctgattcagaacatgtggagccatagtgatcatctgcaccacatgttccgggtccaaaccggtcttgaccaagaagtcgtagcgatcttttagctcgtcacctttaccacgaaatgctttgagtcccctcgtcattcgttcggatccttccataaatcctaagttctgtaaaaatttcaccttctccttgaaggatgcttcatggagatcaactttcggtatgcggctgacctttgcccctaatgagaatttcatcaacagttgtggatcctccattaccatcctgcaaaggcgcttcttccctacactgagatgtgtcataatgctgtttggtttcttcaattggacggaaccaagtattgaaccgttagacaccacaaatttcttaatgtcctcttcactaacaccaatctcagctaagaagaatatgccccttcgcaggttcctcgtgaaattgtcgactgacaaatttgggaaattcagaaaaagatcaaccaattccttttttccaaacccagcttttagcatgacgaggactgccgagaacagcatctttcctgaaccactaaacaagaaatcgggattctgtctgaccaatttgccaataccttcattagtgaatcctaaatcactgaagaactgagggacttggaccatctttccccagttataagacttctttacagataagaatcggccaagccagtctctctgaattccaacatcatctagccagcgcagaatcttcaattccacatttggatcacggaccagtatgacagggctcgacatcactagcttgatcacactggtcttactcaacccttgatcctcaagggccttcagcttcgacgcaagaactccatggccaaaactaaacacttcggtagcatccctgtatatcctccctatcttggtgcgcgcgatgccatagttgcaaagcacccggaaattgtcgagcatcgtctcatcatcattgagaaacatgagatcacgaggcaacaatggctcatactcgcccggcgcgatgccgatactctcgaagaacggctcgaactcgttgatagggtggaagttgaacagccgcaccaacgccttgctgaccctctcatccctcatctccctcttcttcaccttcgacctgaagggcacctcctccccctcctccgtgggctccttcgccgcatccttcaccttctccagcagcttgctgatgaagatcggcgagcgcttgctcatgtgctcggcatcactgaagcaaatcccacgcgtgacatggaggtactccatgaatgccttctgcgcgatgcgggcgtcgcgcctcctccgcatctgcttgaccctccgatcatccacatcctcaatcccatccccgacgatcgccggagcggccgagaatggccgcagctgaatcctgtcaccaacctgactggcccagctccagctcgacgcacatggtgatgatgaatcatggacatgccaagaactgacagcagcagcagcagcatgacaatgtggggttctggatgagcccctggcaaggccattccatggaagccacctgtggcgagcggctggcactgaccggagcatggagattcagctgaatcccccaaaactttttggagaacaaactgtatgtatcactgtatcagtatcactgacgcaagaaaagaaatccacggcgaactgggcactccctccctcctagaaagaaagatttggattggatgaagagaactggatgaacaaacacactcactctcagaataatccgagcatggttgggcttgccgccaatctccactcggctacagtccagtagagcggagagcgaggtggaggtcgtgcttcggtggtggaaggagggctcgcggaagggaggcgcgctcgggggagccactcgccggcgccgccgccgcgagggggggaggaggaggaggagcagggaggggatgcgcgggtggacggcggcggcggctgtgttttgggggcgcggcgatgagagagccgtggccgttggatccaagcccagacggaggcgacggctctgagcggccgcgggaatttgggccgaaatttacttgggccccacgtgggcctttgaggccgaaagcacgtgtgctcaagtggttaggttaatctcgtaggtcttgttcggttaattcatgagagagcgattgaaggtgtggaattatttttcatcaatcccctccaattcttttcaatcctctctaaactaaggatgcgttcgttcattggagataggggagattgtcattcatttttcgtgcgcacgcttttcaaactactaaacggtgtgttttttgcaaaaaaaaattctatagaaaagttgcttaaaaaatcatattaatccatttttgaagtttaaaatagttaatactcaattaatcatatgctaatgacttacctcgttttacgtatctttctaatcttcccaattatctcttcctcaaacacagcctaaataaggcttactgcggcagatgcaccgcccagcttgggcgagcaattgcttgggctgcgcacgactgcaaacgagactgaatccatagacttcccagcggtcttatatgaggggaataagctcatctgagacgctcatctgagatcccctctccggtggggatcgaccagatgttggcgcgtcggcgcctgctctccaccgcgcgtcggctcaaaggtctggagcttcgggagttcgtgtggagcttgtcgatccggagggagctcttgttggggtgtgggttttggttggagtcaactgaattacgcgccaaatatgccctaaaatctactactcccaaatatgcagcaaatgtacttgtgccttgtttggctcaataatgtaatgtgatgagaaagaacaaaaacaatacggggacttggcgcaagataatcatgaattaacagtagtgtttcatatggctgtatacacccccgttggtgtatagaacccgggttttataaatttctattatctaaaaaacagtagtgtttccaccaactcagattacaagacttccacgcgagaaattggaaaacaaccttaaggtgcacccatgcacatactaattcttaatcgatcgcacacaatgcgatcgctcattattatcatggcctaatacggacgatcgattccacacagggcagcatgtagtgggcaacagggagctcaccaatgcggaattttatcccattccggtgatcatacgtcaagtcacgcgccatgtcgatcacttcttcgagcgacccatcacgcaggtcgcacttgtaaacgtaccagccatcaatggataggaaaacctgttctcgatcggccagagaaacgcagacggatacattgagctgtgttatgaaaatagatgcacaacggagacacgaattttacatggaaaacccttgcgggaaaaaaccacgggcgccgaccggcaatgatcactatagaggagatgattacaaacgtaggggaatcacaatgggaacgtcaccccttcccgtacggcttataagagtatatgtaggggaaatagaaagacacctaataggaattcctactaggaaactaatccgaatatattgtgggcccaaaattcggatcacatatttaacaatctccaccttgagacgaatttcctcttgtagcataaaaacatcaatcaccaaaaatacctcatgtaggtaaaatcaccgcgcgccaaatagtctctaggactatattgtaacaccaaccaagcttgagcaaagctcaaatttagtagcagaaactggctttgtcatcatatcagctgggttatcatgagtacttatcttgcataccttgacatcaccttcagcaatcacacatcgaataaagtgatatctcacatcaatgtgctttgttctctcatggaacatttgatcctttgtaagacatattgcactttgactatcacaaaatatattaatgcaagacgtaactccacaaagcttagtgtacaaacctctaagccaaatagcttctttacaagcttcagaaatagccatatactctgcttcagtagtaaataaggcaacagttgcttgcaaacttgccttccaactaacagcacatcctccaatagtgaaaacataacctgtgaacgatcttctcctatccaaatctccagcaaaatctgaatccacataaccaacaagtccatctatagatctcccaaacagcaaacaagcactagatgtaccacgtaggtatctgaaaatccattgaacagctttccaatgctctttgccaggattagccatgtatctactgacaacactcaatgcatgtgataagtcaggacgagaacataccatggcatacataagtgaaccaactgcctttgaataaggaactctagacatgtattcaacatcataatatgactgtggacataaatcaaagataatctgaaatgtgcagctaacggagtactcactggttttgcatcatgcatattgaaacgacgaagaactttttcactataacatttctgactaagatataacttgccagaatgtctttctctagtaatttccataccgagaattttcttcgctgcacccaaatccttcatctcaaattcactactcaattgtgccttcaactnttctatctctgatttatcttttgcagcaatcaacatatcatcgacataaagaagcaaatatatagctgaaccatcaacaactntaagataaacacagctatcataattggatcttctaaacttctgagaaagcatganagagtcaaatctcttataccactgtctaggtgactgcttcaacccttaaagagatttcttcaatctacagactaggttctcttttccaggaccaacaaaacctccgggtgctccatataaatgtcctcttctaactccccatgtgaaaatgcagtcttaccatccatttgctctagttcataatcatgcattgcaacaatactgagtaaagtacgaattgaactatgcttcacaacaggggaaaagatatcattgaaatcaatacctggaatctggctataacctttagcaactaaccttgctttgtaccttgcctcatcacttggagacataccttcctttcttttgaagatccacttgcaacggataggtttcttctcctttggcaacttcaccaattcccaagtatgattcttttcaagtgactccatctcatcatgcatagcagttatccatctattgcaaacatcagaaacaatagcctcagaatatgtagaaggttcggcattaccttcaatttcttctgctacactcaaagcataagcaactatgttcgcttcttcaatatatcttcgagaaggtttaatatttcttttgggcttatcttttgccataagacggtttggaggactgctgaacaatagaagaatctgaatcttcaata

SEQ ID NO: 27108 - DNA, 14001 bp, Oryza sativa
cactctttaaacacatcaaaagctcgatatttgtgcttaacaaaataatgccaaactttctgcgaataatcatcaacgatagtcatcatgttacgagcaccttcaaaagatgtcttacaagcaggcccccataaatcagaatgcacataatcaagaataccttcagtagtatgtgtagatgtgttgaacttcaccctcttatgcttgccaaagatgcaatgctcacaaaatttgagcttcccgatgctttgtccatctagcaatcctcgcttgctcaattctgccaaaccaatttcactcatatgcccaagacgcatatgccaaagattagtagcatcggaattagataatgaatcagaaactactgcaacattacctaatatagttgtacctcgcagatggtatagattggcagatttaatatcagctttcatcacaacaagagagcctttagttaccttcaaaattccgtctccatcggaatatttgtaccctttgcgatcaagagtacataaagagatgagacttctcttcaaatttggaatatgccgcacatctgacaatgttctaatacagccatcaaacatctcgttctgaactgttccaatacctgcaacctcgcatggtgtatcatcacccatcaaaacagtaccaccttgaacaacttcataagtggcaaaccaatccctattcgggcacatgtgataggtgtatgcagtatcaagtatccactggtcactagtttgtgcacaaccaacataagcaacaagcaattctgcatcagacttctcatcagtaacaactgcggctttaccttcctcttctttcttaccttttggtatgtattttccggttctcttgtctttatcctgtagcttccaacactcagagatatcatgtccatctctcttacagtatttgcatgacttatacctgcctctggactttgatctcccacggtagctacttgagcttttatctcttgatttgttgtttgtgttcttctcctgttgcctgcctcgaacaaccaagccttctgcttgtgaatttgaaccttcagagggtaccatcttcttcatcttttctttggcatgcaaagcatcataaacttctttcaaagttagagtatcacggctataaagtatagtatccctgaagtttgcatatgagctaggcaatgaacacaatagaataaggcctaaatcctcttcatcatactttacctccatagactcaaggtcagcaacaatttccttgaaagcggagagatggtccatcacggactcatcatcttacaacttgtgcaaaaataacttttggcttcaggtgcatcttactggtaagatccttagtcatgcatatctgttccagcttcaaccacagcccagcggctgtctcctccttaagcacctcatgcaaaatattgttagatagatgaagatgaatatatgacatagccttacgatcccttttcttctcatcaacagaccaatcctgtgtcctcttatcaaatctagaaagcgcatcattgaggtcttgttgtgcaagaacggctcgcatcttcacttgctaaagtaagaatcttgtgtcttggtccaggagaggtagattatacttcaaactcgccatgggaattaatcctgaatttgctagtaagaaattagggtaatcctagcaaaaacgcgaaacctggtacacttctcgtgtgtctgtagcgtagatcagtaaacttcctggtacaagctttggtgcgcgtagcaattttgcctctgaaaaaacaacctaacagaagctctcggtggattggtttttcgcctcgggaaccgtgcgctgcagatggattggcttcggctgattttcttctcccgcactgctgtactgctgcttttctgacacgcgcggcaggaaggacggcgtcgactcggagttgacggcgactatgctttggattggatttcgccgaacagaatttggacggaatgacgaacacgacgacgcgtactgccgattagatcgatttcttcgatccgaaaaatcacgccggtggtcgggactgcagtagatcttcaatgttctgatactacttgttatgaaaatagatgcacaacggagacacgaattttacgtggaaaacccttgcgggaaaaaaccacgggcgccgaccggcaatgatccctatggaggagatgattacaaacgtaggggaatcataatgggaacgtcacacctttccgtatggcttacaagagtatatataggggaaatagaaagacacttaataggaatttctactaggaaactaatccgaatatattgtggacccaaaattcggatcacatatttaacaagctgtttaggaatcggcaagcggatgcggcagcgcagcgaccaagcaaggcttggtccatctgctgccaaccaaatggctaactcacatggcgaggcggagtggacatagcacaacttgccaccaagctggcatagcatgtcgttgttgctcagaaagcccctgcatggagggttgggatggacagtgaatgtttcatcgcgcaagctaaatcgaaggataacatgtgagctcaccttgctaaggccatggccggtcgtggagtggagagcgctccagtagaagaaccctgggagacagatcggagtcctagcattgataggatatggcggatctatggtcgccttccatttccaacaatcttctccatcaccaagagtcaagatctcatgtccagcccgggattctcctccgctgtgtgatgagcggaggaagtgcctagccaccttgtacttgccactccaagggtcgaacccgaaggcgaccctgtgctccagtgcaacactgtggcttcctctcggcagctcaacgaactcgctggtcgtcaggttgcacacgaagatctctcccgagacgcaagggatcaggatgaggccgtcgcagtgcagaggcatgctgaacattgggatcccacggggaaatctcttctctaggatgagctcggcaaccttgctctgccctggctggaacctgtagaaagtgacaccctgaagtttaaacttcttggggttactcagaaacatccgtggcatgacgaccatggatggcctgggcctggaatgctccaggtggcggcgcgcgaagctggtgctgattatggtggcgcgccacagcttgcacacggattggaatcgcacaaggcacttcgcgggaagtcggacgaggatttcggagaaaagtatatcatcagggataaagccaccgccggcggcggcggcggcggaagctgaccgcggcggcggcgccatcagacggcgtcgttttgggaatgggtggttctccatatggatctctcgtttgtttgtgccgattgccggcttcaatctgtgtgatcagatgattacataatcagaaaatagcacccaataattcgactcggattcagggatccactttatctaatttgactcggattcagttgatgaaccacattttcttttcgggggaaagaactaagtgttattatttacttatagtaatattaatcttatcttaatcttaactacttcgcgattttgggccgtcgtccaagttcgcacgcgacgtccacacgccccgactgcgttcgttcatgttcttcttcggttcacgcctaggcgcctagcaggcaggcaggggaagagcgggcgcacgacgtcggtgtccggtggcacaacggcggcggcagcggtgcctcgacgcgttcttggacacagcacaatggaggaaggcggcagccggcgtggggagcgagggaagagttgggaacgccggcggcgagaactcagtccagtcggaaaaaccaaactgatgtgaggtgtgagagaaggggggaaatagggaaaatggactcgccggagtgaggagatgctggtggcgagatgagacggcgagataagctctaggggaggagatcgctccgtcggggcagcggcggcggcggcggcggcgcgcacgcgtgccatgcgcgccctccggaaggaaggaggcggctggctcggctgggttgggccatgtgcgggagagaaggtcggaagggcccagaaagcaaggtgatgtcagcccaggagtgacatgactggttggaggatttcggcccaaaagaaatagaagagttttctgaatttttggagggatgattttaatggaatctaaaagaaattcaaaagaatttgtttggagataaattttaacaggtagttcatggactctatacatgtggggggaggggttggtttatttttggcaatggaagtttagaggggcttttattttgggggtattggtttaaaggaggagtatttgaataaaggaatagatatttgaatttggaggagagtctttggcaggaaaactttagaatatcattggaggcaaaaattatggaatttagataaaatgaaaaagacaaatggctaaaagagtaggttttagctaataaaaaataataaatcgggatgtttataaaattgaggaggaacttgaacaatagtatatagatgtttgtctttagaatatttttgagaatgggacttaaccaatggtgagtttggaagaaagaaacaagagcaaaggatggctaaaggaatgaatggtatatcgagaaattttttatatggggaatttggagcttattcaaaagtaaaacaaaagatttgaatagatggatttactaagagtcggccaaaaacttggttggctagtttcaaggatacaggaatttgaaatttatgcggaggtcgattggatctagatgaatttgggtaatgggaatttaataggaaataaatgtgctaataaaatagggtttcggtaaaaataaattgaaaggtttatgctactgttgcatgcctgatgacgcgaagacgacgacgaacaggccgtgccgcagcccggagattgactccttcggggaggcacgcggtgaagactcgacaagcgaaaaaaaaagcgaaacaggtgaccgtccccaggagcgagatcgctcctcccgggggcaacggaagcggaagcggtgagcggaggccttaggtcgtctgctctgataccatgttgaatagtacagggagagagaaatacagcgtaacgtggatacattgtattgagcttcaaggggccaatatacatggattacatggattcttaagtaaactcagaaatagagatggatactaatcctatcctaccataacaaatcggatacaatatgatcctatccatatactctaatagcctgcttgggaagtctctccagcagatggtccacacactcacaatggagaactacacaaacgggatcagtgaccaaaatgctgtaactgacaacttcgcaaagccaacatcaagtatagcacctgatgttctagcactctgagcggtgaactcggcatcatcttctccagcaacatcaaccccatctgagttgcctctccaagctcttgcattgagcttgagcactccatctttgtcgacgacaaccacccgccgtgagatctgaacgacgccgtcgccatcgacgggcaccggccggtcaccgtagtcgatcagcaccacttcatcagcgataccgcccatgcgtgcagcaaaccgtgcaccgaaatcgcttgagccttcggtgatcttgatttctatggttgcctccactgcttttatcgaatgtccatgtcttagagacatcctttgtatgcaagaaggcacgaataggatcgtatgcccaaaaatcgatgcttagaattctgtcctctgatggtgtttcgcctttgactttgagttgaaattcgacttcggctgtgtttagttcacaccaaaattaaaaatttggttaaaattaaaacgatgtgatggaaaagttagaagtttgtgtgtgtaagaaagttttgatgtgatggaaaagttgaaagtttgaagaattattttggaactaaacacggccttcagcacattgacgaagctgaactgcacgaacagggcctgtcagcaccaaacaagaatcctgcgtataagagcagaacagtaaataattatattgtccgttaaagaaaaaggaaattaggtatcttattatgaccatattcataaaatatttcatcaaccctgttgatttcaactagtttggtataatggcccataagagcacccataatattcagttaaggaacaagaaaagtgtagcatattgtatttctgctgttctttacatctttgggcataaggtaaatagttcctctttccctggttttcatgaacaaaaatataacacatacagcaatcactgtgaagaatatacaaaagatcgcgtaaaaaaagaatatacaaaagaaagctgtacttttcaaaaagggcatgaaatagctcaatataaataacaaatcaataaatcatatactgctgactgaatgctgtttccctcgttctaggaaatggcgctttactgtcctggttttagaactttgcagtcgattttcatcctctatcaagagagcaatgttagaaaacgataggcaaacaaacgataaaaaataatagatcaatcacaaaagacacgagatttaacgtggaaaaccctcccaaaacaggagagaaaaaaccacggacgccagccagcaaaatatcttcactatatctggcggcttacatcgccgcacgctccggcccaagcctcccagcgacgggcctccgctccactacggcagaagaaatgattttggatcacaattcaacaagcaaaatattggtcactctgtagtttgtacaacggccaataggtgaatgagataaacgctcggtggaagatagtgctttagactttgagtcctactccggtactttctacttgtagtagaaagtaatctgaaccactaatctcatttgatcaaagggtttagatcaatttctactaccacctcacttaatggtagtagaatcgtggatgggtattattgtccaagaacaaatattagtggaggggtataatcatcatctatatacaatcactggccctagccatactctctcaatctttcctcacgtcggccaaagagaatcgcgtgactcccccaaatcgcatccggagacgacgccgagtatctcctccctgccgccgcctccgccacccgatagaagtacaccaacgccgggcctcacgtgttcgtgacgatgctcctggccgtggtgctcacggcagctgtggcgctggcgctcgtcaacgccgtcaactcgcatgacttcgcagcgcacctcgccggcgtggactgccgcatggggctagctggtccagcacgatgcccagcctcgggcttcatggagctcctcatgccggcgctacatgtgattggatgcgtgctcgccgtcttagatcgcctgcatgcctgcctagtgtcgccctctcgctacacctttcgattgcatctccatgtacacgtgccagtggcagcacggcgaagtgaccaatatacatgaagtatatgtgctaagtaggattgaatttgttccgtatatggtgaacactaaaagaaaacctttctccttgttcgttcagcagataaaaatgtcaaacagaatcattttcttattgcttcaagtcacattaaggccgtgtttagttacaaaatttttcttcaaactttcaactttttcatcacatcaaaactttcctacacacacaaacttctaactttttcgtcacatcgttccaatttcaaccaaacttttaattttggtgtgaactaaacacagcctatgcatactattgctactgctactgctcgagttcatacttcagacttcaaaaaggccccaccaattcatgacctcataaaatctgatttggaccagcatattgatttaacaaccagaaaaaaaaattggacatgggcacacctgttgcctcgaacaatatttttgcagtattagaactagttcatataagttgtacagtctaggatgcactgaatgaatacagatagaaaaggattacaggcaaggctctgactagaagctgcaaaaacatctaaaacaggcaagcaccggcgaacaaagaagtactggcgagacggccgtcggcgccgccgccaccggaatgtatcggatggtgcccctacacgcggcaaaatggggcgacaaatggaggagaatgagtggggaaagaatggccgccggagtagactgccggcggtgcgaggatttgccgagcagtggagatggctgtcatcaagaggagatcgacggtggtgggaggatttgccgcagcgaatggatgcgtcgtccagtcgccgatcgagtgcctagcgagatgaatagataaaatcccaaataccaccattacccctaatcactaagtagtaatgtactaatatgcccttgtgaaccgacgattcagatcaattctacttgtagcataatactacaagtagaaagcaccggagcgtcgctattagactttaggtgtgtgtgccgcactgacaaacttctacagcacataaacatatcaccatttatcaaactagtactccctcctccgtttcaggttataagactttctaacattacccacgttcatatagatgttaatgaatctaggcacacatatatgtctagattcattaacatattgatggcttcatgcgggtggccttggacttccacagcttttcgttggcctttcttctattccggcatgcttgtggctgtgtgaggaaatggatgttgacaagctagggtgttagctttaggttttggtgtttggttgggtaattttgcaggtgttgctcgtcaattgttatcttctgtgaggtttttctctttatctgttttctcctctttgtattccccatatattctattctcctatcctccagggcccctgcgcttgcgtaggtgaagcctgccctgtgtaagatcatttggctcaatatattcaggtggggactctctcccccccggtgatttagtcaaaaaaaacatatatatgaatgtgggtaatgctagaaagtcttataatatgaaacggaggaagtacatgttatttgctaagttactgaagttttctttcagaaattagttatgaaacaatagaaatgcagctgctggaaatctgaaccgtattttggtatggcatgagattggtatggtccctcaataaaatggtgccatcaagcccttgaagtgaagaatttcgctcgttccgccattagaaggcaagaattctgcgtgtgaacctttttttttaaaggaaggcaaaagctttgtctcgtaaatattaatagagatggagaaaaaatagatcaaaaatatgtatagggtaagcctcgaaagctaaacccacaggaacccaccaaaagagattaagtgatatctcccaaaatatcgaactcttgaagcttcgaggctctagccttgacccaagctcgagcttcctccttgatcttggcaacgatggacaccggcgttgaggcggtgcttcggaagattcttgcgtttcattcgcaccaattttcccaggaaaccaagatcaccagggttcgtaaaggaatgcgggggttatcaggggagtctaccacaaggctccaccattgttccaccgagtcatagtcgctccatttgctcatttggaggtgagtttgggtccacctttgtatttctgtccagaccctctttgtaactctgcagtgtgccagaaggtggaccgctgattatacagcacagcgggtaggtcttctgattttgccaacctcttttcttgaacctgtcagctgtccagagtctattttgggtgactagctaggagaagaatttgcattttagtggggcccagcgtgtgcactttcaagtagtaactaaacagtattatctattcatcgacagcacaagagagttcagagcccattcgacttgaagtgaacatatataggttttccaagaacttgcctatgcagtgccggtgagtctctgcgcgtcgtccctgtcgcggttgaagatgaaattgctcttgtgatcaagcaaatcgcggacagcgatgaagccgaacacatggagcggccactccaatccccctctcaattcggttaccttccatgagtagatctccatgcatcgaaaggtttgtcgttgtaggtgtggctcattggccctctagtagctgcaaaattaaaaaatatatataaaaaatagataaatcgccatcagttaatcgttcctccaactccagtgcgtggaacaagaagggttgaattgaatcaatagatcaactacactggatcaaatcgcaagaagaagaaaatgtactgatatcctcgaaaccgcacacgtcggcccaaaaaagcgagaatatgaaacggtagtcgtcagggttgggctcctcgtaatctccggtccgcggcttcttcttcttcttcttctcctccgagtcgctgctgcggttgatggcggcatggttgctttccgagtctcactgttttgctgtgctgccgaccaactgcactgcaatatgccgtttgcagtcttcattttcaagagggttcttttagtttgtatgagcctttcaattacgtttctgtgcgattgtatgtgtaatgttctagcagcagtcatcgattataggttccattgtttaaatcctgctcacatagtcacatattttgatgcagaaattcagttaaaatgaatcaatgctgttatagctggctgtcttttttttatctataaagatatactaccaaattgttctttgttaattcttatttctttgccaggtttcataagcatcgactgtggatatactgcaaccccgagttacaccgatactgtggatatactgcaaccccgagttacaccgataccaacacaagtataacatatgtgggcgatgaaggttttatagaagcaggcataaaccacaatgtagaccttaacaacttgcagcagacagatcttgcacggcgatactcaaccatccgtttctttcccaatggaacgcgcaattgttacacgttcaagtccctaacaccaggtagcaagtgtaaaatcaaaggtgtttttgattattattttgtgatgaacaattggcatcggagattattggttttgttatttggaatttattcacgaagtggttttggagatgattggatttataggtgaattacaggtgctgtcattttatgtgaccggtcagacagggctctggtagctggtcagaccggcgtgtattgcgcggttagactggcgcagcccgcggtctgaccggtcgacgctgtgtcggtttcggtttcgggttgtttatttggatatccgtgattatttcatgattatgacttctagatggatactatacgtatgtaatactgttgtttgctactaatgagttaagttggagatagcttggtctcggaatatggtttctttgtttatttcatgtgtaggtgactcgatgtctcgggagagtatttgcggtgatggactgggagtcggcttggggataagacgacgtccgtggtggtcagagatcatgcgggatacttaggctagagttgatgcacgtggttgatggagattccatatggcatacgatggagttattgtgtgcgtatgggatgcggagtcgaatttggaaggagtccaaatttggtacgattggttatgtaaagtttctttcttgtactagagggtttcctaaggtgtttaggactcctagtatgagtttggtttgtggctttaggctgcctacctcgggtataaatagagggggagcttgaggcttcccggtatcgtttttgagagcaattgagttgagtttttagttagggtttcgagtttagtcgaaatttttgtaaggagtgctattggtgcactttgtaaacacagaaagaatcaataaagtcgtcatctactttaagagttattcgatttgtatttaccgggtttcggcggtctaaccgacgatataccagcggtcaaaccggtggtggcgaggcagtcagaccggcggcggcgacagcaagcggcagctgatcttggcggtcagaacggagatctaaactcggtcagaccgacggcaaccaggcggtcagaccggcagggcaacttcggtcagaccgcgatccgtcgaatttgagggtaacttttatttccgctaaaagttttcggtttttgggtataccaatcattcacccccctctggttggcttagttattgtgattcgatcctacagcaagtacttgctgagggctgcctttggctatgggaactatgataggataaacaggctccctacctttgatctctacctaggggtgaactactggacaacagtaaggattgtcaatgccagtacagcatatgtgtttgagattatcgcggtgtccccagccgactatttgcaagtttgtttggtgaactcctttcatttcagggcttgacttgaggccattccaggaaaaaatttatccaggttccaatatgacgcatgctctagtcttgctcagcttcttccgtaacacggtcaaattcgggcccaatcgctaccactttggaactgatgatcatcaaatcaggtaactattcatgcaatgctttgctatgcaatttttctttgacttatgcgtttacctgctcgatgttcttcttaatctataaggttcccagatgatccccgcgataggatatggcagaagtatgaagatgtctcagaatggacggatgtgccagataccgtcaatgggatagtccagaactctcccaacgatacatacaacgtgccatctgcagtgatgcgcagtgtatccactccgttgaatgattcaagaatggacctgtcatggagttcagattcttccatgaacgttgacattgccaccaagttctttgttgttctgtattttgctgaggtggaggccatccaagggaatgcattgcgtcaatttgatattattctggataataacacattagttagtgcattcagtccaatctccatgatgactagtgttttctcgggcattgttcaaggttctggcagtcatggcatctcccttgtggcgacatcaatctccaatcttccgcctttgattagcgcaatggagatattcgtggtgcgcccactgaatgaatcttccacttattctgaagacggtatataatatgaccttgagaactttcatatttgtttcgtctgtccacatgttactgtgagtgtcatattcgctatcaagataagattcaaactaactaatgtctatttgccatcaaaatacaaacagctatcttgttttcggtatgcagttgtttggggctggagcaccttgtgatcagaactgtatatagacattatttatcagtgctctgaaactgatgtatataacttacttacattattatggaactcaaatagttgatcttatgttaatgtatctaccattggggccaattttgaactgaattagattcagcatgcacggaatcttcattattgagtggttgattttctttctatttatctttgctatcttcagcacattctatgatgatcatccagacaaagttttctgtgaagagaaactgggcaggtgatccatgctccccggcaaccttttcatgggatgacttgaactgcagttacactccccatggtccaccaagaataactggcttgtgagttctgaatgaacaagataactcaattacatgctgtgataaaatgcatggataaaacattgagttgtagtgttcaatttatgtgatgatggtttaagtttcctgcagatatatgtcatctagtggattgactggtgaacttgatgcttcgtttggtcagctgacttagctccaacacctgtatgttttgtatagtacgatttcagactttccatgttataataatacctcttgcattactgtttagccactagtgcttgttgacttgctttttttttgaagtaatttactgcaggggaagccccca

SEQ ID NO: 27109 - DNA, 715 bp, Oryza sativa
cctgcagccccgcggcagtgccgcctcctcgccgacgcctgcgcgcgcgcgctcgccgccgtcacggggcaggttcgcgccgagctccgcttcgacgagcgcggcgccaagtggcgcgccatcgaggcgccgctccgcgagctccaccgcgccttccgcgacgccgaggcgtacgtcaggcagtgcctggacccccgcggcagctggtgggcgcgcgcccggccatggcgcacggcaccgagtgcgtggagcagcacctccacaatgtcctgtggtgcgtcgccgtcgcgctcgaggccatcgacgccgccggcgagatcgccggctccgacccggacgagctcgccagggggcggctggtgctcgccaggaagtacgacagggacatgctcgatcccaagctgttcgagcacgcgttcggcaagctatatctggtctcccaagagctcgttgcaaggatggacatggcgtggaaggaggacagatgggtgatatcgcaaatgttcgacgaaatgaaaggccctgcggcgtcgaaacctctgagcaaaaacgagcaccgcctcgccgagctcctcgccgcggcgatggggaagctgcacccggcatctgtccttcttggcagcgactacagcgtccggaggcggttcggcggcggctcaaggaggtgcattggatgggggagagctttgcgatgaacatttcatcggggacaccg

SEQ ID NO: 27110 - DNA, 34774 bp, Oryza sativa
  unsure (1)..(34774): unsure at all n locations
cggcgccgacatgcggggcccaccggtcagcggctcgggagagagggaaaaggggcgccgcacgcgggccccactcggcagcggctcaagagggggggcggtccaccgtggaccgggaccacgcgggtggtacaccgccggtccacgggaccgacggcccagatcgcccccggggctgatcggacgggcggcggcgacccggctcagcttggctcaaggccggccgaccggccacggcgatggcgacggcgcgcacgcgcgcacgcgttgccggcaacagcaaccggcggcggaggcggcggcgcgaaggcggtggcgctaagcggcggctaggaaggagagggaggggaatagaggggagagggatgcctcaccgagagtggccggcgcggaggaagacgacggcgaacggcgacggtgaccacgggcaaacggcggcgacgggcggacgaggtccggaatgccctaagggaggaaaagagagaggttagagggagagagatgaaccacggcgatcggaaaccatggccgaaggcggcggacatggcggctctcaccgtcgcacggtgggaacggcgctccagcggcgaacctcgacggaggaggggtggacggggtggcccttgaccttgcgaacccaacggcggcgacggcgcggtgcggcggcgagcctagcggcggccggagcggcgggaaaggcggcggcgggtgggtgcacagcgcgagagcgatggggagcacgagggagttcggcgaaatggggaaaaagagagagggggcgacggcggagcttaaataggggaggggagtctcggacgtggccggtaggggcgagattccgccggccaacgtgggggagtgggagaggagagagagaggcgggattcgaaaatcgaatcccggccatctcgggcgcgggcgcgggcgggagagagaggggagtgggcgcgggaggtgcggtgcatgcgcgggcgtgaccgacgtggcccggaggaggcggaggcgtgggcgcggcggcgcgggtggggcccacctgtcggcatcccgggtgggaggagggaggcggccggcctagctgggccttggccttcggccggcccagcggaggggagaggaggaaagagaatgggccggcggcccactcgaaaagaaaagggggaaaaagaaaaaaaaagaaaaaaagggagaaaaggattttccctggaattaaaatattgcttgctcaattttaattggttaaaattatttctagggctctgaaaattccactaaaaatcctgttagtgaatttcgacatgtagaactcaaggaaaattccacatgccagattcgattattatttgtattactttcttagggttttctcttgatttgcaccggcattttcttagggttatttataaattaaattttaggcttgggaggaaaactttagggtgtgacaaacaaaaactgggaaggcttatataggagagaaaagcatgtcattctggaaagaattgatgccattgacattagagtagtagaaagcatgggtatgagtggttctgatagagaggagagaagggagcttgaaaagagactcaaatttgttattagggaagagaaactgaggtggattcaaagaagtaaagagaaggaagtattagaagggaattgtaatactaagttcttccatgctaaggcaaatgggaggaagaggaagagtcagattcatagtttggtgcatgaaggagaggtgattgaaggacaagataagttattgctttatattacaaatttttacaaagatctctttggacattcaaaggaaaataggttttcaattgatatggcaaatgtatctaaggtggcagaggaagatatgaagaagttaaccactcctgtcactttagaggaactcaaaacaatgatttttgaactaaaaaagaacaaagccctatgtccagatggattaacaggagaattttacatgtgtttttgggacttggtcaaacaggacatgattgacttgataaatgattttctcaagggtttgataaatatttatagattgaactttgtagtgattactttgattcctaaaacaaaagatgcctatcaaatacaaaaatttcgtcccatatgtctgttgaatgtaagctttaagataataactaaagtcctcatgaatagactcaacacaatcatggcatacattatctctaaatagcagacaacttttctgaaaaatcgtttcatcatggaaggagtggagatattacatgaagtgctgaattcagtacatcaaaaaaagcagagtgggatcttgtttaaagctgatttcgaaaaagcatatgataaggtggactgggtctttatctatcgaatgccgaaagcaaagggattcccagatcaatggtgtgattggagcatgaaagtgattatgggagggaatgtggccgtcaaagtgaatgagcaaattgatccttatttcaaaactcacaaagggttaaggcagggagaccccctctcccccctgctgttcaatttggcagcagaagctttgactttgttaatttagagagctgaggagaatagtctgattgaaggtttggggactagtggagataacaaaattgctgtcttgcaatatgcagatgacacaattttccttattgatgataatctggagcatgcaaaaaaatttgaagtacatcttgtgtctgtttgagcaccttaatggacttaaaattttaccaaagtgagtttttttgctttggggaagctaaggaaaaacacgtatatagcaatattntcacctgcaatgtgggtgatttacctctgaaatatttgggtattcccattgaccaaaaaagaatactaaacaaggattggaaggtggttgagaacaaaatggagcataaattgggttgttggcaaggtaagctgcaatctattggaggaaggctggtgctccttaattcaagtttaagcggtgttcttatgtacatgctctctttttatgaactaccaaaaggggtggaagataggatggattacttcaggaaaagatttctatggcaagaagatcaaagtattagaaagtaccatctagttaattggcccctaatttgttcactcagagaccaaggaggtcttggggtgattgatttagaagcaatgaacaaagctttgctgggaaagtggatatggaaattagagaatgaagagggttggtggcaagagatcattattgataaatattacaaaaacaaaccactatcaattctgaaactcaaacctggtaattcacatttttggcaagggattatggaggtgaaagatgttttctttagttcgtgcatataaaaaagtgggaaatggagaaaatactcttttttgggaagatagttggataggtggtagaccttttggccttgcaattccctgagatttataacatagccttgacaaaaaagatcaccattgcatacttgaacaaaaagggcattggttctataaaattcagaagggatttgtatggagccaaactaagagattggagaaaaattacacacagctaggaagagttggatttgaaagaaaattgtaaagacaaactttggtggaccttgtccaaagatgggaaattcactgtgaagtctttctataatgcacttaaaatgaagcaggtgaattatcctcatagaaaaaatctggaagttcaaaatacctttgaaaatcaaagtgtttctttggctctttaccaataataaaattttgacaaaagacaatcttttcaagaggggctggaggaaaggtgataataaatgtcagttttgtgataaggaagaaacaattcaacaccttttctttgtttgtcccatggctagattgatttggaatataattgcttgtgctctaaatttgaatccttttttgaacatgcaggaactgtttggttcctggattaagaatgctgacaaattcacaaaaaatctcattctggttgggatagctgctgtgatatggtctatatggaaatgtagaaataaagcttgctttgagaaaaaaaacttccaaatgatcccactgttttaattcacatggcctgcaattgggtggatgcatggtcaattttgcagaagctggaagcaagccgaagaagtttgcagctgggagccaggttgttaaaacaagtagcacatgaagtctacaactcaagacatggctggtgaggagtacacaggatcgcaggatgatgaagacagaagatggcctatgcaaattgttgcctgatgtccgttttgtgttgttttctgctcaggaagtgatatgtcccagactactcaagtaatatcagtcggtgatttgcatatttttataaagtctggagaaggccaaagaatatttcaagctccatgcagtgtaccagtgccaacagatggatcactgtatgcgatgactctggtgggtgtgttgattgtcccttctttggccttctatctagatctattgttaatcttctatgttgatcttctatctagatctattgttccgtagactctggtgggtgtgttgattgtccctcctctcctcctagggggtcttgtatttatactcataaatgtcccattgtccaagtagaactagggaaaccaatatggatacaatccgagtagtccttgtcgtttccatatagaactctggttgtctttccttatccagaactcctcctatatccgcaggttgtttccgtataggacatggtacgtggtgggtcctgccgagatttagtcaattactattaggtatgtggtatccatagccttgacacaaataagaaggctttgcgtcagtccagatactctaaaattgtgctccttacaaattgacactccaaattttttgttttgttgtactacaccaaaatattctggcaaaccgccactggacactgcatcttcattgaaatataatatgtacttaactgcggaaacgtaatgaccgggacatgtctatttttccacatatctcgcgcttaaaagaatatagtctgaaaaaaaattcaatactttcacaccctgaaattgaggcttcaattatttgacattgtggcccaatatcattaactcagcttgtcctatatcccatcatcacgagtgtcaacattatcaaagtggcaacaaatacaatgtcaaattagcaattctctcattaaaaaagaacatatgaaggccaacttcatttttggaacatattactttcttagagatttaagacaacacaatttcaagaattttagtttagaattatgtgctttggatcatacttaccagcttaaaaaaataaaacgtctaaaacagaaccaaagaacatttttaaaaaagccttatacatataagcgttcacacatatatgataataacttaaagcaccatcaataagatgcccgcgcgtgtgcgcgggcttccctcctagttgtccacaaagcacaaaaagagtcagccgatgaagcaacaagagaagtcatcacaaagcccactttgaaccgaaggaaaggccatagaacgatcctacaagtaaagcccaaaaatgtcgagtctttagggccgagttattactgaatggcatgtaccatcaatttgtcttcttgtgcagttatagaatccgattgacccgcaggccgcaggcagtggttgctcaatgcacattttgtttcagtactttatggaagcctcctcatagctacatgcctgcatttttttggtcgaatggcctagaaatctagaatcctaccctttgcgactgaagacgtgatctagctgtcgtccatctcttcgaggttagctatctaacctggtcactggtagccatggcatcaacgacgatcgacgagcttaattaattaacaaatgggatcaatatccatgcattgttgggcgttgataccatggatagtactatcaactaaagttttgctagctggtaccctctgtttcaacagaaagctcaattgttccatcattccatacgtgcacgctctagctcaagcattccactgttttccaagaacagcttgcacctacctaaccttgctacccatctgcaccctgtttcacacaattcccattcatcgctcatggatgtaacatatccacggcacacaaggacagactagcctagctagctacacatcttaattttctgttaattcatgccatcgatcgatccatcgatctggagtatatataaagacgtcacccctgcctccaatcttcacaccaaacgtaaatcccaatcaaccaagctctcaagtacgtgcttagctagctagctagccagtaactgaacatacattattcatagtgattagtgagctaataatggcgctgatccgacgccggctcctcccaattctgtcccttctcctcgccgtcaccttcctcgccggcgttgcgacggcgaagaagaccggccaactcaccgtcttctggggacgcaacaagaacgagggcacccttcgcgagacctgcgacacgggactctacaacatcgtcatcatctccttctacagcgtgttcggccatggccgctactggggcgacctctccggccacgacctccgcccaatcggcgccgacaacaagcactgccaatccaaacacatctccgtcttcctctccatcggcggcgccggcaatgattactccctcccatcctcccaatccgccgccgacgtcgccgacaacatctggaacgcgcacatggacggccgccgccccggcgtgttccgcccattcggcgacgccgccgtcgacggcatcgatttcttcatcgacaacggatcgcccgaccactaagacgagctcgccgtcaagctctacgcatacaacaaattgtaccgtgctcggacgccggtgaggctgacggcgacggtcaggtgtatgttcccggacatgaggatgacgaaggcattggacacgaagcttttcgagcgaatccatgtcaggttctacgacgacgccaagtgctcctacaaccatgggggcctcgccggcgtgatggcgcagtggagcaaatggacggcgaggtacccgaacagcgaggtttatcttggtctcgcggcggtgaacttgccggggaagaatgacaatgtgtttgtcaagcagctctactactatctgcttcccaatgtgcagaaggcgaagaattatggtgggattatgctttgggacaggttctttgacaagcagactggttacggcaaaaccgtcaagtactgggcttaatgatcagttaattacctgcttaatttcggtactaaatactatatgtgttgatttgtgcgtgtgacggtgtgagtgcaagcatgtttcagaataaaaatggttgtgtcggttctttacgtattgtatgaataaaatgggatcactgtgtaacgagatctcaagttgtttgttggtcatcaatggaataattaagtgtttatatatgcaacttgtcaaattaatgttgaccatcaattgtttgatactttttgtttgggacagaatggcactgcaaagagaatttgttttttaagtaaacagtataccctgtttcattgaataaaggaggagataaaagtatttacaggaaagaaattctgcaagacaagagactgatccttaattgaacaagctaagcaagtagatcaggaacaataagttttctatgggaattgaggagaagtcagctacctgtaagttatgttccattcagattggtccgtcagctttaatcgaggagaagtcagctacctgtgagtgcatgcatgtttcagaataaaaatggttgtgtcggttctttatgtattgtatgaataaaatgagatccctgtgtaacgagatctcaagttgtttgtttgttggtcatcaacatcaatggaataagtgtttatatatgcaacttgtcaaattaatgctgaccatcatttgtttgctagattcttgtttgggatagaatggcactgcaaagagaaattattttttttacgtaaacagtataccctgtttcattgagtaaaggagtaaaagtatttacagcaaagagaaattctgctagaatgcggcgagaaaagtggacaagagactgatccttaattgaacaagctaagcaagtagtagatcaggaacaacaagttttctatgggcatcgaggagaaatcggctacctgtaacttatgttccattcagattggtccttcagctttgattgatttgaaattctgattcgttctaaacgcggccaacctacagttttaaggtcctttttgaggtaccttacattactcctggtcaagtacaaaaaagtcttttgacttttcaattttcttaaacacgtagggataggcaagtaacgttgattgattgtttttaggtttagcgtgttgccttctcatttaacggctcaaattacaggatgacgtggttgacaaaatcattctgaaaattattccctttttggcgaaaccgctggggaacaaggctgtttggttccccgccagacttcgccacgccttggatgcggcagccacgcaaaacaggctattgtttggtttccacataagttgaggcagccacacaactttacagtcatttctgtgatagtttatgccataagtgcggtgagcttttccttcgccacaaaactgtggcagcgccacaacctggctggctaccaacggcagcgaaccaaacatcccatattcggtgcccaatcgattttgcgaacactgcatccatggcactggttttatctatcttcacatgatactaggcatactctgcttcctctgttctattttttttttcttcacgacatatgtgacaagtaatagagtattgagcttcgctcggtgctccttactggcagtataaaacaatatgaaccgttagatttataaacttttttcagtagaaatttggagggttcgatcatctaaggagaaaaaaaggccgtggagggtagaattgtaaatttgcatctctatctaagtgatgcccccaccggaatcgtggccaatgcgcctccaccgtcggtaccaacgctgaatcgcaaccgaacgatccaccgttcatttcgatggaatgaagtcgatcggatccggtgccttctattgttttattgtttcatgaagcagatcagtaaatgactaatatgtcctttcaaatgaacgatttatattatttctactggcagtataatattaccagtagggagtaccgaagcgttcctctatagtattaacatgcataccgcttggtggatccttaattgaacaagctaagcaagtagatcaggaacaacaattgatcaggaacaacaatttttctatgggaattgaggagaaatctgctttgaaacgacctgtagggttatgttcttttcagattgcttcttcagttttcattactcggaaagtgtgattcgttctaaaccaggacatcctgcagttttaagatcctttatgacttatgaggcgctttataaaacttattgtcaagtacaaaagggtcttctgagtttttaattttattgaacgcgtagggatgggcaagtaaccttgattagttgttgttagagcaggtacaatagcaggctataagccagctgcaaatatattttaagaagataaatcaggagagagaagagcaacagactatatatttgtagccagctgtagcacggactccaagacgcagtgtgtctatgacaggtgggactaggtattaatagtgtaatatgtaactattgtatgaatgagctattagattggctatagataaattggagctagtagttggctatactattgaacttgctcaagagcacccgcaatggtaaagtaaggtgctctttataaaacatgtacatctcagcaatatattagattaatagtaaatcatctcaatagtatgtctacatgggtatctatagctctctcatgcattatctcgttcatagttagtagatagctttgctctctctcttcatttaatgtcttccaagtaggaaaatatgctgacatggatctcttgtagagagtttatagataaccattgtaggtgctcttaggttgagagtgtggagattaatcatttttagagtactgcgtttttcggtgaaaccgctggggtcggtacccaaccacaaggtccacaatttgcgaacagtgcagaatggcactgatttagttattttatctctttacatgatactaggcgtgctctgtttttcctttcttcgcgggatatgtgacaagcaagcggtaatgtattaacatgcataccgcttggtgtacaaccaaggtttgcaaggattaacatttggtaaccgcacagagtcgttcaatatgctttgcctattattcaattcggtaaaactaattgaagaggcctctccaattagttttaactagagacatccacgtgctagtactttaggagttttggttgctattaatccatttagcaagtagggaaaatattcctatcatctatgcttcaaataaaattttctcttcaattactcatccgttttacaatccgattacaccgttgtgtttgtaataattaaatctttacaacaagatctcacatgattatattttgatgaaaaatcacaaattacttttatgatatgtctaaattacttttagatttcactaagttacttcttagagatataaaagtaaattcagtaaagcttaaaagtaatttatatatatattatatagaagtaacttataataaaaagaaagtaactttaattaatgacttttttcactgaacaaattatatatatatatatatatatatatatatatatatatatatatatatatatatatatatataagttacttttagatttgattaaaatacttcctatatattcataatgctctgagatgattacttttattattttttagttaattttataatttgtgctgattaatttaatttcgatctgcgggtggcgtctgccctcgccctgcccgtgccctgggagggcgatgctcgggatcctcttctcgtggttcttcgagtactcgaccatcggtgtttgtattcagattggcggcagccgctagcctggccgctcgtgctgctgcttctgcgtcggctgttgcctcctgattaaccgcggcagttctccttgccacctcggaattggttggttcaggtggtgtctcattgttagcttctttgaacgcctagtcgaggtttgtggccattgtgcgaatacgctcggcccattgtgctatctccggatttgcggcggcgtcaaagggtgtctcgttgagtatctctcgcatagtcgcgaggtgttgtgcgggtgtcccggaggttgaagccgtgtttttgccgtcattaatggcgtagactcctcttgtgttatcggactcagacgccgagtaaccgtcatcgccatctgacgtgtaggattcctgttcgtcgaaaataatggctccaacaaagcagtcggagctatattcctcttccgtcttctccgtgtcgcgtcgggcccgagtgcttctgggcgcttctcgaggtgcaacgtacttcacagccttcaggaaaaccctgcaatccaggatactatgcgccttactgttgtggattggacaccaattggcgaacatacgtgctccctcttgttgtccgttctcttccacataggccttgacgcgttgtaccgccttgtagtcttccaaagagtgcttggtggtcttatggatggcacaccaagtagtcaccttgatgcgaacttccctagccggtgcctgatatcggaaggtggcctcgggaggttgctcctttgttgtcataatagccagtgccctgtcctccgcctgggcgggaagggtcgtccacttctggttggacttcccctctgcatctgctaggttcacgaccgccggttgaccgggagtgactgtggcagtagtgcagactgggaaggcgatcgatccgacttgagtccacaccaacgttgtcggcatgggtgctgctggggcatggctggcgtagtagtcgatgtaacttggcagcatgtcgtgaggcccttgaacgccaagccccctacttggtgtgccactgtcaacggctggtatccgtagacggggtatgtagaaatcggaggaacattggcgctaatgtagtacgacatcgctggaaagctaaggcaaggattttatattggttcgggccccgagaaggtaataaccctacttccagtttatatgggattgctggtgggaaagatcccgagtacagagtacaatatgtggaaacaggaatccggcgagatcgtagtcggaagaatcgaatacaatctcgacggttttggtggctatggctacggaattatgcttctgacttctgttgtggcttgattgatccgtcctcgacccataggggtggtaatccttttataccgtgagctaccagcagtcctcgtgtaggactcggaccgtgaggcccgcacggcttaggaaagcccctatcttctacgagtaggtctccgtcttagtctcttggtatacggactccttccgtattctcctatgacttccttgtatatcttggtcttctttctgtattcgtgcaggtatacctttgcttgtactctgtatttcatttccgggtaacgaggatatcccttatccataatcctgacaaatacatatgaggcaaaacttttgccctcccttcaaaaaaaaaagaatcaaccactccagtccggtttagtagaaacaccgttcatgcaaatgaagtgcttggaaccgactgaaccggttttgccataaaccggggttaatccaaagatggttggactggcggcgtgcgaagggatgggctccatgtttagtaatgggctaaagaaggccctgtaaagtttctgaggttcggaagcgttcaacccattagaggccgcatctttgttaatatatagttggtgaaaacagccatcaccgggtttacaatcctgcgcatgtgatggccggatagatgtaacaaacatactccctccggacactaatacatgacgtttcggatagctaatttacatagaaatcaagcaaaaaaaattgtcgaaaacaacatctatagaaatatggagggagtacaataaactcctatagtgaagctagaagatctaatccatccgggccaagtctcatatgcacacacatatactccctccttccacaaatacttaacgtttttgagctaaccaacgtcaagtaaataaaaccggagggagtacatatataagatcacaaactatattctaacaggcccaacatggcctaaaatagtcccacaaaggcacttttaaggcaaaaatctcccgaaatgcaacaacctatatagtttcattgaagtaaaaatatgcatatgttttgtatggtgtggttcaacatttgaactatataggcgacccggcgaaccaaccagagtgaactggttttagtccaacaacccagctgggtcaaccttcggtctagatttttccactatgcatggtaagcgctacaccggctggctccttgggtggtcggatgggcaagcctgaggatcaacatatttcttttatttgaaatttgataaaattcaatccaaatttgaaactttctgactagagattgtatgccccatgcaatatttatgagtggataagggaccggaagttgtatgccccatgcattcgcgcagagaaatgtactataattaaccacacgagggtcgcgcgcgtacgtagaaaaatacatatgtgccggagtgcgtgcgccagatccgcttctcacgcgcacgtagctagagtcgtcgcctgggagtagcaaaacatgcatatataagcataaattataagcaaaagatgattcgctatttaaacgagtgagagtgtagtaagcatgaactaactatatccggaaacattatgcactaccctcgtgacactgacatacataatctaatcaaattatgtactaccctctcgatcgatactatgcaatacataaacttatcaaattatgtaactattctcgcgacacgtacacaccaacacataaacaaatcaaagtaccaaaccatgtagcccatgccactatatatatgcatgcacatcatcgatcagattgcaaaacgaagaataacacactaacttcaccatgcaaggttcagtaggagtccatggcatcctcctcctcgccgccgccgccgtgttgacgcagtgtctcctcgccgccgccgttaatactccggtggtccagtgcgcgtcggggacgacgaaatgcaccgtgaccaacgcgttcggcgcgttcccggacgggtcaacctgccacgtggccgccgcggcgttcccggcgacggaggaggagctcgtccgtgttgtcgccggcgcggcggcgtcggggaccaagatgaaggtggccacgcggctcggccacaacttcatgaagctctcctgccccggcggcgacggcctcgtgatcagcacgaacgcgctgaaccgcgtggtgggtgtgaacgcggcgaggatggagatcacggtggagagcggcgtgacactgtctgagctcatcgacgccgcggcgcacgccggcctcgctctgccgcacgcgccctactggctcgacctcaccgtcggcggcctcctctccaccggcgcccacggcagctcggtctccggaaagggcggcgccgtgcacgagtacgtcaccggcatgagggtcgtcacgccggcgccggcgagcgaggggtacgcgaaagtccgcgtggtcaacgccggcgacccggatcttgacgcggtcaaggtctccctcggcgtcctcggtgtcatctcccaggtgacactcgcgttgcagccgttgttcaataggtcggtctcgttccgccgccgcggcgacggcgacctcgccgaacgcgccgtggcgttcgccggcgagcacgagttcggcgacgtcgtctggtacccagcccgcggcgaggccgtgttccggatcgacgaccgcgtcgccaccaccaaaaccaacacgatctcctccggcgatttccagaacgtcatccagtcgtcacggtcaacggagcagcagcagcacggagacgtgttgccgttccaggccggcatcagcgtgccgctgtcgagggcatcggcgttcatccgcgacgcgcagcggctgctcgacatgaaccccggcgcgctctgcggcggcgagaacggcggcatcctgatccgctacgtcaaggcgtcgacggcctacctcggcaagacggaggacagcgtcgagttcgacacgaccagctgccgccatgacggcgacgcggcgatgccggaggagatggagcagatggcgctgcgcaagtacggcggcgtgccgcactgggggaagaaccggaacgtggcgttcgacggcgccattgccaaattccccaaagccggcgagtttatgaaggtgaaggacgcgtacgatcccgatgggctcttctccagtgagtggagtgaccaggtgctcggcgtctccggcgccggtggtgtgaacgtggcgaggaacgggtgtggaatggaggggctgtgtgtttgttcggaggacgagcattgctcgccggagaagggatacctctgccgtccgggaatggtgtaccgtgacgcccgtgtgtgcacgccgtgtcgccggcgacgcctacgccgatgcatgatcgaactcgatcgtcagaacatgacacgtacgacggcttgtatgtacgtgtagtgtgtgtggccatgctatgcaggccgcgtgaataatgtagtagtactggcagttaaatctgcacgaatgtactgctacatgactgcaatttctagttttcaaataaaacatgtttgctcagatcagatcaatggcgtcgattttctgaacatatgtttcattttcgattcaatggaaaaaaagtagtaaaacatttcaaggctcaactcgatcgatttggttttaaaataattgtggacactgcccaaatcaactcgatatggcccgggccaaaaacaacaccatcatcatagtatgagctgctgaagtaggtatggcaagtcatttcaaaagagtagggatcgatggcaatggttcagatgggacgtagagcaagaacatgtccgagccatgctcgcgagaactagcccggtgttaacagaattgatatattcggttttatctatgccgaacagcttctagatattaggagatagttatcacatgtgctgttatctcctgtaatctagctctatagttgaaaccttgtacgccacggcttggggctattccagccatcgctatttaacacgcaaggcagcgcagcacgcgattgtgcggttgctttcaccgaaactttacatggtatcagagctgtaatccaatctatctctacctctcaatcaatggcgtcctcttcctccaacgccgcaaccagcaaccttttccaaggacacccggtctctgagaagctcgggaaaaccaatcacgcactctggaaggcccaagtcaccgcaggagtgcgtggggcgcgcctctacggtcatctgaccggcgtgactccaaaaccagatgaggagatcaccgtcaccgaaggtggaaaagaggtgaagaagccgaactcggcttatgcagattgggaggctcaagaccagcaagttcttgggtacctcctctcctccgtcacaagagatgtactcgtgcaagttgcaacctacgaaacagcagcagaggtgtggggaatcatcgaacagatgtacacctccgactctagagcgcgctccatcaacactaggatagcgctcgcaacaaccaagagaggaaacatgaccatcacggagtacttcacgaagatgaagaccctaaaggatgagatgcaggccggtggtaaaccactggatgacgaagattttctgcagtacatcatcaccggcgtcggccctgagtttagcgaggtcgtgtcggtggtgtgtgcacgagtggaatcaatctcaattggagagttgtactcacaactcctcaattttgagactcgcaaggtgctgtacaatggagcacaagacactggagggtttgccaatgtcgctaatcgtggcggctttggtggacatggcggatctaacgtttgtcgtggcggcggcgctcaacgtgggcgcgggcgtggcggcaaccaaggaggtcgcggcggcggtccaggaggtcgtggccgtgggcgaggatatgccggccctgatctccgtccgacttgccaagtgtgcttcatgaaaggacacacggctccagagtgctggcacaggttcgatgacaattatgttaatgatcaaaaacatgttgcagcagccacttatgcagggtatggtgtcgacacaaactggtacatcgataccggcgccattgaccatatcaatggcgagcttgataagctcacaatgaaggagaaatatgaagggagcgatcagatccacactgcaagtggagcaagtatggatataaggcacattggttctactattgttcatgcccctaataatcaaaaaatacatcttaaaaatgtcctatatgtaccacaagcaaagaaaaatctagtttctgttcatcgtcttgttgatgataactctgctttccttgaactccatcgtgattatttttctcttaaggatcgggtcaccaggaaaacactccttaaaggaagatcatggcgcaggctctatccccttccaaaatcatccttgaagcaagcctgcagtgttgaaaagctctccttggcccggtggcacagtcattttgctcatccctcatcttccatcgtcaagcaagtagacaataaatttcatcttccttgttcgagtttagcaagtgagtcggtttgtaatgcttgtcatcaagcaaagagtcatcagttaccctttcctatttccactagtgtttctaggcatcctttggaactcatatttcctgatgtttggggtcctgctcctgagtctgtaggaagaaaaaaaatactatgtgagttttattgatgattttagtaagttcacttggatttatctcattcaatataaatcgcaagtgtttgaaaaatttcaagagttccaagttatggtggaaagaatgtttgatagaaaaattctagctatgcaaaccgactggggaggtgaatatcaatcattaaattccttttttcgcaaaattggcattgttcatcatgtttcttgtcctcacacccatcaacagaatgggtcagctgaacggaaacataggcatatagttgaagttggtctttctctcctatcgcatgcctcaatgcctcttaaattttgggatgaagcattccaagctgccacatatctaatcaatagagttcccagcagagttactcaaaacatttctccccttgaaaaattatttcagcaaaaaccggattatgcctctcttcgaacctttggttgtgcatgttggccacatttgcgcccttataacaatcacaaacttcaattccgctccacacgttgtgtgtttcttgggtttagtaatatgcacaaggggttcaagtgtcttgatatatcatccggtcgtgtgtatattctcgggatgttgtgtttgatgaaaccatatacccattttctgagcttcatgcaaatgtgggcgctcgtcttcgtgctgaaatagcacttttacctaatggggatgaactagtattgaatcatgtggctaatccattgcaaaataattttcctgctcataatattgctcaagatggtgcaccagaattttcagccgcagaagatcccgtcagcgatcccggtgatgattctctggagcagtcagccgagcggtatggggacgaggcgttcgagttcagccagcatgtcgagaaggtctacagaaaagggatctagaagatgtgagaaaaggcttaatgcagtcaagattcagtgaggtcgatctacgaacctaagttgtggtgcataagcggagccaagtcgagacctgaaggggagtgactagtcgaatccacgacgcgctcatcatctctatctatggcccctgggtcccgaacaggggaatgcgggctagtcgatgagtcacggtgttcaacaactgaaacatccgtgctaacgtttactctgcaaaagcaccttcaagacatcacaaggaaagacaagacattctcacagagtaccgaatcgagtacttaagagtttaaatattacaaggccttttaagaccactgggttataaaaattacccctgatagaaggggaggatgctgtcggcgatcggggcgacctcttccgcaaattggagatggcccgagttcgcctcgccatggcgaaggatgttctcgaggtccagctccgggtaattggccctgaagcaggcgaggatatgcgccgcgccaatacggactccggtggtcgcagtctccctcatttggctggtatacttcgggacaacgctttccagcactgtcacgagttccgccaaggccgccgtcatggacgtctcgtccccgaaagcaggagcctccacttctcccagactagtggcagtttggtggagggctgtgtagctaacccggagggatttcttcagctcgtccatatggccgtggagctcgtccaatcgtgcctccaggcccttgtaccggtcattggagccggcgtagagctccttcatcttggcgaggtccgcctcagacacctccagtttcttctagaggtcgtccatcctctcattcgcggcatcaataagagtactcgagttcgcaattgaactcgagagctccttggcgccttcctcgagcagacgacgcccctccgcaattttctccacccagttccgaggacgggagatttgcgggaggggaggggtcgtacttggagcatcagggccgattcggacgccgcaacaacagccgcttccgcagcttgatctttccccgaagacaacgtagtcgaggaagctctaaaacaggaggtcgacaaaggacgtcgtcaggagaaatcaaaatatcccgcgcacctagtcgagcgaacaggaaaatttacctcgactgtgtgatggggatcagctttgaaagagggaccagcggggcaaggggctttgcgggaccctacagttatcagaagataaggatacggcataacgacgaagatagtgaaaagcgttccggttgaaaaactcaccttcccgctgctcggtggaaggggcatgatgagccgccaggacgacggagccgttccttttgcagaaggagacaacaaggcccccgatgaactcgggacaacctatagaaaagagatcacagaatcaggacagagaagatgtgtgtttcgcattttccagtaattaattttctcagaaaactttctcgttacctcagacgatgccgctcctcacgttttctcggcggctatggttgttgggacctgggaggccggggctgcaggggttgagaaaggcgtagggatcagatcatcagagaaatgcgggagctttatccccacagaaaccctaaagtaatcctcttcttccaaaatgattctatgaaagaaagtcagaagatgaagatctgaggagaacctggagcgacgacggtgggttcgtcctcgacggttgggccgccgtccgcggttgccgtgtcctctcggcgcggcttcttcgggaccttctccgcaacagtcgaagccttgttcttcgtcatctcgcagtatggataagaggccggcggggaggagaatgaagatcaaaaggcaatggtggaaggaagattagagaatgaaagtgaaagggcgtcgagcgaagtgaacggctcgcccctgtggagatccccttttatagcccgatggcccaacggttcggtttccgagatttttcccacctaagttttcgggagtctgttgaggaaagtggatttagacttcaaatcaaatgaacagatactagaaccctggcattgtcctcgggatcaccttgccttctcgaatttccgagaacggtcataagggctcacatagacaaccgggtacgaaacagacatcggatgacatttgagttgaagtcgggggctactgtcaggattacggataaggggtatcctcgttacccaaaaatacagagtacaaggaaaggtatacctgcacgaatacagaaagaagaccaagatatacaaggaagccataggagaatacggaaggagtccgtataccaagactaagacggagacctactcgtagaagataggggctttcctaagccgtgcgggcctcacggtccgagtcctacacgaggactgctggtagctcacggtataaaaggattaccacccctatgggtcgaggacggatcaatcaagccacaacagaagtcagaagcataattccgtagccatagccaccaaaaccgtcgagattgtattcgattcttccgactacgatttcaccggattcctgtttccacacattgtactctgtactcgggatctttcccaccagcaatcccatataaactggaagttgggttattaccttctcggggcccaaaccagtataaaatccttgccttagctttccagcgatgtcgtactacattagtccttacgccaacgtttctatgattgctacataccccgtctacggataccagccgttgacagtattgatagagaaggagggagaggttgattctgggatttttcaggttaaactgatgggccattttttctatggcgcttgcataaacagtggatgaaaactttgctcagcgcacatctatttttctgtcgatgactgataaatcgaatacggggtcgtttgtacccagaaaattcgttgataccaagactaacaaaaatacatgataaacatagagggagatatatttttatacaggttcaaccccgtcaaggttagtagcttacaaaagcacgtagcgatgtagggtatccaaattgcgcagataataatactcaaaatactagctttcgctagcaagataaaaaagggagagtacagactgatacgtcgatcacacatgcatgtatggcggcacaccgagttgtgcacataaaaaaaaaacactagctttcgctagcaaagattacaaaacaacatgtactaagtaatgattactgtgatagtgattgagctatatgcacgcacggattggactgatgatggaggcacacgtatatatagagagattatcgttggttgatctctgaatcttataattaagcccaggcactgacataccgtccgtagtgagtgatggagtcatagtagctgttccaaagcatcactcctccgtaggtatccgtcttctgcaccgccggcagcagcttccggtagagctcaccgacggcgaccatgtcattcttccccgtcaaattcgccgccgcgagccccaagtaaatcttcccattataagggtaactcgccgaccacctgttccactgcgccatgacgccggcgagcccggcatggttgtatgaacacctcggatcatcgtagaacctgacgtggattcgccggaaaaggtaggtttccagcgccttcttcatcctggggtcagagtcgtcgtacgcacaactcaccgtcgccgtcagcttgaacccgatggggtcacgccagtggcgggtgtcgtagttgatccgctcggcgatctcgtagtagtggtcgggttgaccgcggtcaatgaagaagtcaatgccgacgactgtgacgtcatcgccgaatgggtggtagactcccgggcggctgccgccgaggaaggagttgtagaggttgtcggcgacgtcggcggcggatttggaggaaggtagggagtagtcttttccatcgccgccgccgatggagaggaggacgtagacggccttgaaatggcagtgggtgatgtcggcgccgatgtggcggaggtcgtggccggagaggtcgtcccagtagcggccatggccgaagaggctgtagaaggagatgatgacgatgttgtagagtccactgtcgcagactgaacggaggctgccttcgttcttgttgcctccccagaagacgaccacgttccgtctccttccggctggatcgatggcgccggcgaggttggccgtcgccaagaaggagagaagaaggatggcggcgaggatggtaggtggtgatcgccggcgttgttgttcggacgccattgttgtgtaattgtgtgtggagtgctgttgtgttggggggtggagaaattagttgcaggtaagttcgtatatatagagatgcatatccatgtagatgtatgtagggccttgctcaggaatcattaggcgtgtcgttgtagccagcaacttgcaagcttttttggacccatggatatatactgcgtgctgtgcttgcagctgcattcatcaatcctctgtttctgaaggtaccattctaaagccttgttctatggaatatcgatgggttgcacctgcaaaacaagggatgaaacattacaggtcagtctttgccttaattaatcaaccatttctcatgaagagaaatgctctgtttttatgtcctctgtttcgtaccatctgtccgctctgtttttgcatcctcatgttttcccgcgactagtctgctttaatagtcgactagccaatgagtcgtgcgttacgcgaccatcagaaactgtaataatcgtttaatgtaaaatataacatatatacaattttaccaaaaagtacagtaatagttgataaaaaatatttgaatttataatctatgaatgagtatgctgtcaagaatacccatttacataagaatagatataatagatgatcttataacaatcggcaggcatacatagtttcgaagatcaatgagatattgtaatgggtctgttgtgaaaaaaatgttggtaagataaagcgtaacaatatgacagtctcataatataggaatcaccataaataatgtttgtgtttgaatattgtaaagatttttttacaactcagaatattgtaaagttatatagtgatagagtgctcaacattgtagatagatataaagtggtttgacagtgtttataaaacaaaatatgaggatttttatcttcttctgctacttactatcttctcttatatttttacatgtaagagacaggggaccaagagtctagtagactctagaggcctccagatttaagatttgctaggagtcaaccacatagttcacctatcttttttgaccctactaactgactactgcatgcaccaatccaccattcaaacttaatcgaacggcctacaatccactaaggccttataccattatatggcatcgatcaatgatggtcactttctaggccaacttttgcgatgtctctgcatgcggaaaaacggattgacaagtcttagcttatcgtcttatccaggcatccatgcatgcgccatgaagagagagcaataatgctctgttttttacgtcctctgtttcgaacaaacgaagctgttgaaagcagagtactgctctgtttttccgtgacgaatctgttttcccacactgattttaccataccggcagcgcagcacacaggaagaggctagctaacatgcatgcatctcctgccctgttatcaccaaaaaaaaaaaacaaacatactcatgagaattcgcttttgtgatagacaagtacccaaaaggaagatgagtggcctaattccctgccccttgcgcaaacgacaatgcaatatttgcagaatgctatccagctgttgcccttcaagatgtatgaacaacatcctagtacatacatactccctccgtcttaaaaaaaaaaagacaaaccctagatttccgtgacaacgtttgactgtccgtcttatatgaaatttttttataattagtatttttattattgttagatgataaaacatgattaatactttatgcgtgaattatctttttaatttttttataattttttcaaataaaaaggacgatcaaacgttagacacggaaaccagggtttttttagatggagggagtacagcacgacacgattagttagttttggatcgagatcgaccagcaccgatgacgtggtagccgctggtcgagtcaacggtcaaatctcatcaacatatccaacccacatgcatcaaatccatccattaacctatacgcatccaaatcacgcacaccacaatagaccactacctaggtgcctagcagcagctagaccccaagaaaaaagattgctccctctggttttcaatgtttgacactgtttacgatagaatatttgaccattcattttatttaaaaaatttatctaaatattattctgaagtatttattttgttacgagttgatttattacaaaagatattttaagcatgacttatatttataaatatttaaatattttttttaataagacaagtggtcaaacgtgcactacacaatcaacggtgtcaaacattaaaaaccggagagtacattacataatcacaaatctcttcttctctacatttaagcaattctacggtacttgaggagtgtcaaacattaaaaaccggagagagtacattacataatcacaaatctcttcttctctacatttaagcaattctacggtacttgaggagataccatgaggtaccaaaattttagtgtaaaggtaacataagatatcaaatttataatagaaaaaataatactttatagtacctacttaagaaccgtaaaattgctcctctacacataggagtacatcagaaatcacttcaagcaagctcacagccactgtacactgacactgtcgttgcaaaatggctctccctcccttaccctttgcactagcagcagcattgctgctcacaataatctccggccatctcgccgcgccggcgacggcggacggctacgtcggcggcctagcaatctactggggccgtcacgccgacgccgacgaaggcaccctccgccaggcctgcgacaccggccgctacaccaccgtaatcatcacattctacaacgtcttcggctaccaccccggcaactacaacctcgacatctccggccatgacgtcaccgccgtcggcgccgacatcatccactgccagaaatcaagaaacgtcacgatcctcctcgccatcggcggctacggcggcggatactcgctccccacctcccaatccgccgccgatgtcgccgacaacctctggaacgctttcctcgccggccgccgcgccggcgtgtcgcgtccgtttggccacgaggccgccgttgacggcgttgacttcttcatcgaccagggcggcgccgatcactacgacgaactcgctcgccgcctccacggctacggcgccggcgtgatctggacggcgacgacgaggtgctcgtacccggatcatcggctggagaaggcgctggcgacgaaggtgtttgatcggattcatgtgaggatgtacggcgccggcgagatcgagcggcggtgcgtgatatcgtcgaggtattcgtgggagaaatgggcggcggcgtatccgggaagcaaggtgtatatagggttggtggcgtcgccggagcaggacgaggcgtgggtttttcagaaggatctttattatgaatatctgcagtttgttaccaagctgcctaactatggtggtttggctgtctatgataggtactatgataagaaggctaattacactggtgagggttaaatggttaacgatcgatcgtctttgttgatgtactggctgaataattaaagaagatccctcgtgtttgtaatgttgtgatggaagaataatggacgaataaaatgaggtctctaaagaagttatgtatgtaacagatgtcagttcatcatataataagggcctcatcggatgttctaaatggccaaaatacggaaaatgcgttttcataaataaaaaataatttaaatgtaaaacttttgtacatgtgttattcgtgcttcaaaaaacaaatatagaaaaaaccacgatgaagaattttaaaaatcaatcataaaattgagtttgaaaattcaaaatttggcttcggattataatccaatggcgaagcgatgagagcctaagtcgttttaaccaaagtcaatagtggagcgagtaactagcagcactgactgtatgacatttttgctgagcgtgtctatgtttcacttcatagcatctcaatatataaattgttgggacatgaatttcacaaatttgggttttctgccctcattcagtactaggtacagcgaagaatttagccgacaaatacaaggagcacaatgcccaggatgtggatcctctttagtagcaacatactacactgcagtaatatgtggacatcagaatagcccaaaaataacaaataagaaaacaaaaaataaactgcttgctgatgacctgcaacgtctccttgctcagttcctgtcagggagaacttatgatcacattacaggcacaacaaaccaagttcaggtctagatgaaaacaatataactaaagcagtaatgaaatccatacttgtggataaaaaaaaaagttggaagaccacaatgcaagtcaacgggcagatgtttctccgatgtgttcagactcaggcacaccaacagactcagcatcaccaagtgtcccagtggagctgcccctcatagaacgccatgaggtctccagctgcaaactctcccttataccttctgccacctccgtcatctttggccgatcacgccctgcacgcctagtgcagagcgagatcggccaccttccatacagagttgagatcataatctgctcttatcctcgggtcagtgacgccctcgatgtctccttctgcgagcctctcatgcacccacagcaggatgttctttttttccgtgtcgctgatggggatgattgctggctgagctgtgatgagcaccaagagaacgacttcaaagctgtatacatcgctcttttcgcttagatgagaggtttcgtagtacctgaatgctcatgatataaaaggattatcacatcagattcttctccaattgaatgccagcagttatgctaatcttttatgtaaaatgtaataattaggggtccaggacatgcatactcaggatccaagtatccaggagtacccgctgtaaaatcaaatgtgtttttgattattattttgtgatgaacaattggcatcggagattattggtttttgtcacaccctgaaaatcctaaatttataaattgttgtttaaattgaattattagaaatgattttaaaagcctagaagaaaagatctaattttaaataataaattccaatatagaagtgggccagataaaattttattaaatacttcacttgattctatagttcctagatttttctgggatttatttgagccaagaaagtatttttaataaatggaattgcatttcatgaataatttaaaaagaaaaaggttttaaagtcctcttttagctttgggccgaaagtcggcccaaaaccccctctctctctccccggcccaagcgcgcccggcccagccagcccgctgagccgagccgccactctccctcctctctcccgctgacaggtggggcccacctgtcagggtcgtcttcctcctcccgccgcagccgcgccctagccgcgcgcaagccgccgccacctccttccaaattcggccgcgtctttcccgatccgatcaaattgctagaggggaaatgatcctcgggatctcctcttccttttctcttttggaaacttcatctaatttcgtttggaaatcgccggatttgatctcgattcggatttgattttctttcctaaccttaaaccttccatctcgccgccggccgccgtgggcctccatcgctgccccctaccccatatataaggacccccgggacctcctctcttcgtcgccaccctcgccttagccctccaccgccggtagagctctagccgcgtcaagccgtgcgccgccgtcgccgccgcaagtccagtcgtgcgtcgccgccgctccggttgtcgtcgtcgctcgggaaggccgccatcgggttcgccaagtcgtcgctgtcctcgtcccatccttcgtttccgccgaggaccaccggagcatcgccgtcgtcgtcgacccgaacgtctccgccgcttcgacctcaccgccgtcgccgtcttttgccgtccgccgtcgtccgagccttcggtgagttcgccgcgtcgcccactacccgctggtgccctcgtttgcgccgccgcgccgtcgttcgccggcgagcacgaggtgccgagtcgccgccggtgatgacgtcatcgtcgacgtcagcgccatgtcagccgtagaccgcggtagatcagttagatctcggccgttcgtttggattagattagatctcggccgttcgttttgtagaccgtctccgtgcacccggttcaccgtgaacccgagccgatgacgcaataaatcctttttccttttcaaaaataattctttattgcgtcataattcaattaaaatctaaataaatgatttaatccgatttaatctttaaaaattcataactaattcatcttagctcggatttagttggttcaagtctctaaatttttctaaaattgagatctacatgttaaaaatatccacaagtgctgtttatgattttttatgtactgttttggtgatttttgctcttttatgcttacattccgacgttcccggagagtctgagtttgcaggagaagactttgaagagttccaaggtcagcaagtcaagtcacacagatcctaaacaaccctttgagcatgttgattccgtttaaagctattgtttctattcaactattgcatttattttgaatgtcattgggtgggaataacctattgcctttgttatagccctttgttattgcttacctatactttgtcacctggttaataattggattagctagaacattatatggttttagctaaagcaattaggatgcttagccatgcttagagacactagctcatataaatgggataactaatgattcactattactaaatgatggattaatggtagctcatgatggttaatcatgataggatgattaattaatttgccaactaaaacatgataatggtgggttgtgagcacatggttttgatggtcgtgctcatgacaattaaggaccggttcacgattttcggttgtgaaacattaaccgtgccaaccacaagccagcgtgggcaacgggtttaccttttgtatagtgtggttcattgtggagcaccagactgtgaagtggcggagataagcccacgggggtcgctggggagtccatgccttgtttataagggggtgattatgatccaggaacgctgtactgcttttaattgtgttatgcgaatggtattgtcacaatctctattcgggtacttgttaagtattgcgacgcatggttgacatgatgttgaggttgtgtcttgtgggtacagtggtacacctctagctagagtaaaactattcgaatagccgtgcccgcggttatgggcgggtctaacaatgtctttcgtgattagtctcatacctctcaccataataaatgatgctgtaattggtaataacttgttagctcctggtttggaatgatgtattcctggtttggagatagaactgtgcagccgagaatggttattcagaatggttgggcctatacaacgggtatgttgtatatcgttggattaatattgtttaattaaatactttactgttttactaaattctgaagtatttattaaatgccatttatgcaaatgagactatattatgccatcctttgttatcccctgcacttgcatatttgttgcgtggcttgttgagtatgtcatatactcaccttgcaatcattcatcagaggaggagttctacagtgatgctgaaggtgtggaggattaggcgtagcgctggtcaagctgcttgtgggatggagacgcctgcgccgtttatcttattttccgctgcttagatttttattgtttgagaggaactatctacctctgtaatgactttatattcgcttattaattagagtaataattgtactctattatcaatttgttattgtgtgcctcggctgattcctggacgagggtttacacacatgtaagcgtttggaattttggatagaaattccgggcgtgacagttttgttatttggaatttatttacgaagtggttttggagatgattagatttgaaggtgaattgcaggtgctgtgattttatgtggaccggtcagaccgggcatgtgctgccggtcagaccggcgtgtatcacgcagtcagaccggcgtagctcgcggtctgaccggccgactctgtgtcggtttcggtttcgggttgtttatttggattctagatggatactatacgtatgtaatacagttgtttgctactaatgagtcaagttggagatagcttggtctcggaatatggtttctttgtttgttccatgtgtaggtgactcgatgcctcgggagagtatttgcggtgatggaccgggagtcggcttggagataagacgacatccgtggtggtcagagatcatgcgggatacttaggctagagttgatgcacgtggttgatggagattccatatggcatacgatggagttattgtgtgcgtatgggatgcggagtcgaatttggaaggagtctaaatttggtacgattggttatgtaaagtttctttcctgtgctagagggtttcctaaggtgtttaggactcctagtatgaatttggttcgtggctctaggctgcctacctcgggtataaatagagggggagcgtgaggcttcccggtatcgcttttgagagcaattgagttgagttttgagttagggtttcgagtttagtcgaaaattttgtaaggagtgctgtaggtgcactttgtaaacacagagagaagtaataaagtcatcatccactttaagagttattcgatttgtgtttcaccgggtttcagtggtctaaccggcgacacaccggcggtcagaccggcggcatcgtggtggtcagaccggcgggtgacctgcggtcagaccggcggcggcgacaggcgcggcagggatttcagggcggtccaaccgagagatctacaccggtcaaaccggcggctatgctttggtcagaccggctaatctactccggtcagaccgatctcatcgaattcgagggtaacttttatttccgctaaaagttttcggtttttgggtatatcaaccattcatccctctctggttagcttagttcttgctattcgatcctacaagtggtatcagagcgttgttttcttctttggatttttatcgatctagagtttttgccatggctactcccgctcgtttttcaactaagcctaatgttttcgatggaatggatttttctcattggtgtagtaggatgcaatcttacattatggctgaagattatgatatttggagaaaagtttctcatgcttatgtgattcctgaagccattaatactgctgctgaaaaaactgcttttgaacaaaattgcaaagctcgcaatattcttttgagtggtatttctcgtttggattatgatcgtgttgctcatcttctaactgctcatgagatttgggttgctttgagtaattttcatcaaggaacaaataacattaaagagcttcgtcgagatcttttaaaaaaggagtacattaaatttgagatgaaacttggagaagctttggatgactatctttctaggtttaataaaattttgagtgatcttagatctgttgattcttcttataatgctaattatccacaatctgagatttctcatcactttttgaacggtctcaatatgtctatttgggagatgaaagttacatctattcaggagtctgttaatatgtctactttgactttgaactcactttacaccaaattgaaaacacatgagatgaatgttctttctcgaaaagttgattctaagtcgactgctttggtttcttctatttcttcttcggatgttgatgtttcttcatctaagccttctttgcttgctgtttttaatgccacatccgatgatcaactcgaacaaatcgaggaggaggatttggctttggttgctaactgtattgctcgagctatgaataatgccaggaacaggaaaagaggtggtccaaatcgttgctttgaatgtggttcaatttatcatcttcgttcgcattgtcctaagcttgggagaggcaaaagagaagacaaagatggtgagaagttcagcaacaacaagcccaacaacaacaagccgcagggttcatctcaagcgaggaagttcaaggagaatcttaggagggcttttgatcaagtctatgcctcatttgagccatcaagtgatgtagatggtgagagtggagatgatgataagggaaagaacatctccggtgtttgcttcatggtgcgtggtgaatcagacattgagtatgaagatcatgaggtaagtgcttttgaggaagctattaatattttgagtgcaaaaaatatgaagtgtgagaagatgtatagaaaacaggaatttatcattgaatctcttaaatctgaaattgatagattaaaatctcttattcctaatgatgatgattgctcaaattatgaggttttaatgaatgagatttcaaaaattagaaatgttaatgctacacatgatttgaaaaatagatcttctcttgcttgtagtgttcgattaattttttgccaaaattcatagaaaaaataatatatcattgggcattaatttgcagcccaattttacgaaatacacgtgaaatgtgtctctatgacgtgtgggaccagaaaattcaaatatcatacgatgttcaaatatattcaaaattggactcgttttgttgtatgttttgattggaaaataatggttccgacagaattcatatttgatatatgattagagagatataaacatttgaaggagaagatcaactagtgttaaccgtatatccttaattggtttgctgctcctcaccggttggtaattatccttatgaggtgtggcgtccactgtcaattagccaagttaatcctcgtgattatctccagcacacacacgttctttttatctggagcacaaaattctttttatcacgcgcaggtcgttggattaacagacgcgctggcttatccagagaattaacgcgtgatttcgctggcttgcgctggaatctcggaagggattaggcgaggacgccggccgtcgcctctacccttatataaggcgctgtccctcacgacgccgggggagattggagaaaacccccgacgcagaggcggctggcagaggaggagacgtagcagggcaaccctgctgcgtgctctgatctgatcaatcacccatacatccagaagcctatatcaatagatacacaatcacacgccgtcgccggcgtcgggcgctgcacagcacgcaagcctgagccggcgatgaaccttaaaccacacgtacacgcacccacaaatatttgattaggagcttgattccgattaggcaaaaggagattaaattccatcggcggcaattcgcgaggagattaatcattgccggcgacgattgtgccggtgttcgtcatcaagctaatctgcatgtgctgcaggcctgataaaacatcaggggagcaaaaagatcagatgcacgccgtagtgctgcgcagttgcgtggccc

SEQ ID NO: 27111 - DNA, 1880 bp, Oryza sativa
gctaaagctagcaaggctacagctattcattcatttcatttgtctatgaccgagaaggctagacgaaaccatggccgagtgccgacaaggccaggtcactatactattaacacgtctaaaacggacgggaaccggatgcaccgttgctgggcaccgacaaggcaaaagcaacaataaaatccatgtttgatgaaggccggggtacatgactgggcaccgacgaggcaaaggtcacccgcttcaccaaattctctccgcactccgacgtggtggtagtgtactgtgaccgggttttggtgaaacaaagccatccgttccacattcactgtattcaacattaaatctgcaccaacctcaaccttcggcgagcaaacaactttgaagacgacgatcataaagcgcagcttaatcggaggtattacataggctcgtcctgtggatgtaattaaccggtagcctcattgttaggcgtcgggaatcaacggactgcacgcaatctccagtcagcataccttttcattaagcattcctcacgaaggcaaaaggcgaactcctgcgggagctctcatgtatttgtaaacattcatgttaatgaatcatgattaataaaatacagggtttccctattttctgtgtgttcgttgttttgtttccatcaaacatgtagttttgctttgcacacacgcactttggataagttgtttttaactaaaaaattgtttcaaaaatatcaaattacttttcatgctagtttgatgtttaacatgatttctgctaaaaagttaaaacaatctcatgatgttttggattgcttaatatgtaatttgaataagatgaaactaaaagatgctttaggtcgtgttgagtacatggaagatgttgtgaaaaacaatgaagtgctttctgccccaaatgtcataaaagcaaaggtgtcatggtagattgtgaaaattgtgctaatttggaaaaagaggtttcttatttgaaaaattctttgcaaagattttctgatggtaaaaagaacctcaacatgattttggatcaatcaaaggttagcacacataatcgtggtttaggttttaattcttatgctcataattctagacatcctcctgttgtgttaggtgttggtgctagaagtggtgagattttggttaaacctgatactaataaaactgtgtttaaatctgctggcatcatgtctaccttgaatgcatcttcttcaaaatccaatgttgtgcatgcaaaacctcctgttgttgcttgtgttgctaaatcttctaatgctaataatgtgtctaaacaacgtgaaaagtatacttgttctttttgtggcaaagatgaatatattgttggtttttgtttcacattagctcataaacagaaaaaggagagagagattacttttgcaaaatcaaagtggcaaaaatcgggttttccctcgaggaaaccggtcataccgcattgggtcccgcggtcggaccggcgaccggtcagaccagctgaacagccccggttagaccgaccaccggtcagaccggcggtgaagcctcggtcaaaccggcccccggtcagaccggctgcacaccctcggtcagaccggcctcagaggattttttctgaaaattctaaaattaattttgcacgtggatatatgcctattggatcttttggtcgtgtgtctcagtactggattcctaaatttttattatcatctaaccccagtactgaggcttcgacttctgtttgtgtgtaggctttggtagcaaggaaggagaacgtgtggatcgtggattccggttgtttgcggcacatgaccggtgataaaaattggttctcctccctcaaaaaggcatccaagactgaatcaattatctttg

SEQ ID NO: 27112 - DNA, 730 bp, Oryza sativa
gcacttgttcatgatctcccccttgctccccaccggcatgggcagcttgctgagcttgagcagcgaggcggcgaagtcgtggtcccagagggcggcgttgtcggcgtactcgcggacgtggccgcgcgcctcgtcctgcgtcagcagctgccagtccgagttgaagttgaccaccttgtcgaggttgttgcggtagtaggtgttgtccagggcgctgaccggccgcagcttgccgacgaacgccggcatgaacctcgccacggtggcgaggtcctcgtcgcgggcgttgttcaccaccgcagggtcggcgccgccgccgcgggagcacctgtagttgagcaggttgcggtaggacggggtgatctggtcgggcggcgcggcgaggcgggcggtgaaggaggagcagtggccgtcgccgacggagtgcgcgccggagaggacgacgagctcctcgacggtgaagttcttgcgggcgaagttgtcgatgagctgccggatggtgaaggtgggatccgggagctccgcctgggcctcgtaggcggaggagacgacgccgtcgaggcggcccgcggggacgtcgaagcggacgcggccgttgctgaggatgctgctggcgtcgcgggcggcgaagatgaggatgtcggcgcaggagaccacgccggggcacctcctctcgagatcggccttgatctcctccaggatgtcgaatccttccagggggcgcaggaat

SEQ ID NO: 27113 - DNA, 1457 bp, Oryza sativa
agcgaaagtcagtgtcgcgataagcgccgatgcgaccaacacgctttcagtcgactctgaaagggttttcccgtgcttttcttgttcttgagagctaccaccacggatcagttcatcacgcctacgaggactgaagacggctccagaatgagccaataccctcaccatccattctgttgggttctgcagggaaggagacttgaaatgtcaggagatctgttttgtatgtattttaatttatgccaaaattttgatggttttatgcatatacctggggagaggcaaagtagtcttccatccttatcacttttgcaagatcgagtggtgtatagccttctaggttgacatggttgagctccacggccttattctgtaggagatacgtgaagatgtactcgtctcttttctttacagcaagatgtaatgcagtattaccgtcgttgtcctccaaattcagagtttccttgaacctcggatctttgcacaccaatttgactactttgtacttccgattctcaatggcgatatgaagcaatgttctacctttaacattatcacgaagagtggcacagtcttgatcggcattgaccaatgaggtgattgtgtccattgaaccaacagaagcagctatgtgtatggggaacatcccattgttgtcgggccgttgggtgtagtccgttctgcgatcttggtctatgccatcaagcagcgcagttgttacgccctgaactcctactgatgctgcaaagtgaagaggtgtacttccagaccaatcagctttattcatgagatctcctctccttcctagaatcaattcagagttctgccatcgagtatttccgttaattagtacctagctagttatgataccaattgtgtcaaagaatgtacaacctaaattctatggcaaagaacaaatcaaactttcattccaaaataagcactcaaaaagattctggaggatgcacagccattaacacgtacgtgagccttttactgttgctaggagactacctcaagattataattttttttttgataaaggagcttttattaatctcagacgattacaacaagttaatagaaccatactaagaaaacttccggcttctgcataaatgcacataaccaaaacacacacaagcccataaaagagtttgtaacaagagaaggaaagcagtaaataatgtatagtgttgatcaatgatttgatcaattatgaaagcacattgttgactatctgacaacaaccagatgatgccaaggggaaaggtgctatgtataatgagtcaagggcgaaagcataacaagcaagtactaatgtgatattcaggagaaatacaagcaccacctgaaggctatgcgaaagttaatggtgatgccagggtcagaaaagaagcaaagcaagtgcaggcattattgtagacattctcataaaaccactggcttattgaacc

SEQ ID NO: 27114 - DNA, 1196 bp, Oryza sativa
agtccaggcgagattttatcccggcccaccccagtgttttcccctcgtcatcggccgggaaatattcagcttctctggtggcgaggaaaaaatcctctcgacgcagcgacgcaatgagagggggcgctgcggcggggaccgctgcacggcgcggcgcgactaccacgtgacggcaacggcacgctctctcctccggtggccaccttctccccggtgagttcattcccttcccatctcccctagcctcctcttccactgttagggtttcttgccctcgtgacctcccgctattgccgccgccaggagaagcacgagggcatggatctgttctttgtccctcacacggcgtctcgatctattcttctttctcccttgatttgctctgagcaatattcctaccctaggctgaagctctgatcatgtccttcctggatctgatcctctgtttgtagtgccctagtgagaatatgctgattctcctggtagttgagtagttgaaagaccacgttttctgattctcaatgtgagttgttttaaatttgtacataaaggttatgaaaatggtttattcttaaaattagttggcaggtaatagtaatgccacaaaaacatgcagtgcgtaataatattgaggcatcagaagtgaatgctgttcatttttcagaaatactagacaaatgttgttcatcagaagtgattccaacaagttgtctgctcttgtaatctcacccatacttgacagtgcccataatacaagtagatcaatgagccattccacatgccatattttctgaacaaagtacaaagttcaaattgaagtagtaagaaaaatgagtcatgtgcagctttagttcaggcctgtaaaaagctcttggcagtcggcagaatacaacttaaatctgaactattttggtacatggttcaaatggtctaaaaaataatttcctaggttggtccatttttagtagatcttgtagaaccatgtaatgaagaaattctggatgtaaaacatgatttttgcagctattgcttgcttaatctgcagactactgatttttgcttctactatagctactattgaatccagttttttgcttgctcaatcttatatgtgtcctaatttcattttgatatctgaagcactgctagcattagtctcatatgcatatccatgtttctagccctgctagctattg

SEQ ID NO: 27115 - DNA, 773 bp, Oryza sativa
  unsure (1)..(773): unsure at all n locations
gctttgcttgtgtgcttcgcgtagcttctgtcgttccggaggttctcgaagcgtggtttgcggtcgtcgccgaaggttcggaaggccgttctctctgagtaaggcaagtcacatcatccttgaacatattgaatcctagtttataaaattattttgatttaaattattgcattatcgctttatttaaatttccgcgttatcactgttttatctagccatgcctatttacttttgttatgaccttattattgctattgttattattatcttgttcaccctaggaaaataaaaccccaactagtgggtactctattcatggttccactagtatgaatttaggtagatgcttcgctgattaataggacaacattaggtggtttttataactttagactttgggaatattcatatctcttggatactatggaatgggtggcttatggtggaattggacatacccctctcttcctctttcaaagcccctaaaacctgtntttcgatggggtttgggtgcatgccagttgtgggaagtagcaccccgaccaatataaggactaagctcgggcctctattgcaaagcactatcgtacttccacatgtctagtgggtaaggcttagtttgtggctcagtctggttataaacaaaagtacacggatggagatggacgaagtcgggggtcaatggacatctctaggacaaatgaaggctacacgagctgcggcccggtagtcgagatgtcatggcacagggccgatgtcctgctgctgggggc

SEQ ID NO: 27116 - DNA, 732 bp, Oryza sativa
cggttgcttttagtttctggatatttctctggccagtactcaaaaactggaaaagaaatgaatttttagaatggtgattttgtatggtttggtcttcttattttctacaacgtacttgattgttggactgtgaagattacggaagtggtttcacaaggctggaatggaaggttcattgttcagaatttggcgctgtgagatggaactgtgcactacataatataatcatacagttgctatgatactgaaaagctttgagatatactgagagaacaaaatggtttcagtgaaaaatgaagcaggagcatttgccacgtgttttcaaaaacacacagatgtcacaatgatttattgtgcaacttgccattcaagtccaatcttttccattgtgctgtgtgattagtcagctagtacaaaataacactacgagccatgaattgctagagttggataatcttgaaataatattgaatggtccagatttgtataatttgggatcttgggtacctcctaacttacccttcaaagtttcaagttactatcggtttctttcaattgacacaacaaaggtgtgttatcaggttttgtactttttttcaatttgttaattatgtgctcattttatgcatgaagtgaggctgaaatttatctatttggagcctgcgtaacatcttggaaagtccccagtggaaaagacctcctatttgtcagaccagatgcggtgttcaacgg

SEQ ID NO: 27117 - DNA, 58752 bp, Oryza sativa
gacggcggcagctggatcgatcgatcgatcatcacccgggacgaaggaaacgtacggtgagaatgagatggatgagggggatgcgatccatggcttggcgtttagggttggttgtttgcaaaagcaggaattttcgaggatatctatggagattgaactgattattgttgtgagatcatgcaaaaccatgtgttccactggatgttgtacgagacaagagcctaatatcgtttcctcgaaaaaaaagtagtataatatcattttttgaaagacaccttacaaaaacaggcacaaaacacacgtacacaatcatccctataacgcgctcacatgtgcacgcattaactctataataaacaccttcaaaaactggatgacatatattgagattaacgacgtaactataaacatctcgctgtcaacggatgtcatataccactaagaataattaatcgtaaatacgagcatctgcggtaagtctagaaacttgaattccgatgagctaatcccaccacaataagagtaaatcattttattcatgtttttattttttttctttagaggatttgccacttcccaataatttgggttgtgtgtttgcataccaccacttgcacgcacaaacatttgtaagtcctgtacacatgttttaagttaatgttggaggcatcaaacacccaccccctgtagcgaggacaccacgtattaacctagcatacatgcataagcactcctaaaaacattggacagctaaactaaatctaaaacttgaactctgatgaactaggtacacaccagcaccacttagccatccgtgatttttaatactatagttagcccgtacaaccaagtagcaatcgcaatacgcacatgaagatgccaaaaactgcgttgattagttgactttgcgggaggttgtgagagcgtttttttcaacaaaagatgactggagaaagacgtcgagagagggaggagagggcagagaagcgagggggggtacaggggcgatgaagcgatgatgatgacctgtgttgaaagggaaggcgaatggaccggctaccagccttcctagttttggatatgcatatggcgttggtcgcctactcgctttcagcgtataattggagccccacccggcaaaggcttcatggcttcgttggctcaaaaagagcatgtcggcgacctctcccgccacctgattttaacgcaatcttttctctctctctattctcaccgcggaagtgaaacactgtgcactgttcgtatctttacactgaagctacaacctcttctgctcctctcagttttgatgttcttgcacaggatatgagctgtgaatttcacgagaaacaattcgattctacccccagcaaaatttcctgtgttctggtccaaacaggactgtagctattcacaacccattgtcgttctggtccactaccatactaggacatctctgcttaacgaatgaatggataaatgggcacactttcccgaattcctaaatgctatgatttcttataatactgtcttaaatccatttttatctttataataattcattcgttcatttgtaccctcgaataattctcacgaatcattaatttattcagcaattctgcacagcacaaaaaaacacacattgaagtaattaatgttgcaattccaatattccaggaacttgccaacattcttggtgaaattcatcaggccccataccagaatacagctataaattataattttagactgaagaactcctagcaacagaaatgaaaaaaaaaagtatggcaaatgcacctgactgaattgaatgtagattgatttaacagtagaacgccaaagcaagtacagatctcatcagtggctacggatcaacaaactacacattcagaagaacaagtttcaggagttgctaggaatgacattaaagaagtggtaaacttcatcttcatcaaacactccaacctcagttgagcaaacctcacaacaaacagggtgataaactgcacccttcttttcaccttctgatgtagtagaagaatcagcagcctttcccttgcggtttttccgtttgcctttcccctcccgtagaatctgatcagtcttgaccttgcagttgcgaacgaacattgcacggtactgatttacatacgtctcatgcctgaacatcaaagaaagccactacagttaataattgtctgaagatttgaagcattcaaagtaagaacttcaggagtttctgaacattgtgcaaatgaaaacaacagcataatgtttcacgatataaaatgattactgaaagaattgcaaataggtcacataaacttgcctccagattttttttcccacaaatctagatttctcaattttgtattaaaaaattggacatgctcagtacaatcaagtgatataattgcatattctggagaggaaaatgatcaagcacaatatatggttaccaacacaagttccaagcaggttttattttagtttcaaaccaaagtaagtttcatgaagatttcagactttcaaggtggataattcaatttacaaagcaggttacaaataagtcatcatgaatgttccagcatgttgcaagattgtcgcagtggttcaggtgtcttcagaaatttttgaaatggttcattaatgtattgcaagtttctgaaaagtaagtccaacctctaatacaaataattgtggcatgtccccatgggccaaccaaaaatctccgatataccactaatgtattcctagagtcgccatttcatcatagagataagcaattaaacacccctgacttgtttacaaatagctatgtcttccacttgcaggagcgtttctcccatacaagcaaaatcaaactaaaaattcaggaacaactaatcctagcataaaccatttattaagaagttccattatttcttccagccacttaaatcaaccaatttgatcattgtgagcatggatgtcgattgtatgcaaaagatttgctcacatgtatagatatactcctcatggtctaacatacaccaacttctccaaacaaaattattgatagcatctaccctatacaggcagcagcaccacaatcctgatagtttcttcatcatcaggaaaagcatcgtgccaatccaagaactaaaaatagtaaatcgactaatctaaaaagaactagtgactgcttaataaacatgcatattggaatccagaagcctcctcacagagttcgaagcagtaaggaaagacaacctctggcaatccaggcacaaggtagtgaagcacgcggggcagctgagcacggcgtcagaagtcctccctttcctctgcttgctcacccaccgctcatcgacatcatccaggtcgggatcgtagaactcgggctccacggagtaatctatctcatcgtcgctggacactaacaaattcagaggtaacacaaaaccaaaagaggggaaatcaggtgcatcagtcaggacacgtcaggcatctcccatttcctgcacgatttatatatacttccggttcttggaggaggaagcaaaaggggttcgcatgaaagattttagccatctaaagcaagggggggattgggagagctacctagttctcggggatcgacggggccgccggcgtccgcttccatcggctggctcgccgcctctttggatttctcgggctccatgaaaccctcctcgcctccgccgtgcgctctcgcttccgcttctccggccttcttccttcgcgattcttctctctcctgtggctgcgaggttttgggccgaaccgacagcttggtgtcggcctaattggagaaaccgacttgagttcttccccttttttttttgtttttttttgtcagatcagaatattagattagatacgattttttgtccatgtattatatagaagtaaaaaatggtgaaaaaaaaatcaaccatctaaaaaaaggaaaattaaggccgcattttcgatacatgtgaagttcagcttgtttactcaaacaggtactgtagctttacaaatattcaatcaggaaaaagagagtatcagcggcaacatcttttcaccgtgatccagaaaatctatatcgcatattacaccagtacaattcttttgttctttgaaacccatgcattcatgagtttgtcttagaaattaaagagaatcgcacatacatcaggaataataaaaaagagcacataatttggcatgttttgcttctcaaaagccttcttaagttgtgaccttcctcttaaaaaaaagctttcttaagcgagtgcccttttgattacaagcagctccttgatgatatctttggttgacattctactcaatggcatttccccagagcagagcagcccgagtttaagtagcgaaatcagggagttcaccctttctgacggaccatccatggatgttgcaggcggcgcgttttcaagctctgttaccagctctacatcgagaatgtccatcgctcgattattcagggccatctcaacgcacttgcgaaggctaaatccttgctcacatgtgttatctgtaggccgccttccagtaatcatttcaagaacaagaattccatagctatagatgtctccgtgagttgaaaccatatttccagcaccatattctgtttgaattgaacagtgatgatgagagtaagtaaactgggtaaatgataatgctatgtctatggtgaaagagatttgacgattgaaaggtcgtaatgttttcaagtaaatttcttgtgttaaataaatcgatagatgcaaataaaaagaatgataaactaaccaggtggagcataaccaattgtccctctaaatcccatcgagctcgttgagggttgagaagacagtatcttggctagcccaaaatctccaacatgtgctaccatatcagcatcaagaagcacattacttggtttaagatcgcagtgcacaacaggtgtagtgccatggaaatgaagataatccaatgcacaagccacatcaaagagtatacctactctgtggacaagattcaagtgcctctcttccaattggttatctatctgaggatggagccactcttctaggcaaccattgggcatgaagtcgaacacaattgctttgaagtcgtttccattgaagtccatgcttgagcatgctgtaactatcttaacaaggttccggtgtcttaagttcttcatcgcttcacattccgccgtgaaactcttaagagccccaggtgtctgaagtttcaatacttttacagcgataagattttcattctcaccagtttcatcgaacaatttacctctatagactgatccatagctcccagtacccaacaaattggtcgtcgagaagccatctgttgcatgtaccaactgctggtaggagacaagttgatgggctcgcatggacattgttgaaggactttttgttaatctgttcttataccaagcatggaagaaaaggagcaatgaaaggatacatattgttgtagcaacaaggggaacaacaatcgccaaccctggaactctatgccttctcttggaaatcttaagagaacatgtaggcaagtgaagatctggaatgcccccacaaagcttgttgttcccttggaccgaaatgccagtagcatttgcaaaaacaccaaacactggcacttcaccgtcaaagttattgtaagagaggtttaaatcatagagtgtgaggaagtgtccaaagaactttggtatttggcctgaaaaattgttactagagaggtcgagaatttctaaacccttcatctcactaaaggatgatgggatattaccaataaatgaattgttttgcagatacaaaatctggagaagctggcatttttcgaaagtaataggaatttcccctgataattgattataccgggcatcaaggtatacaagattcggtagattcccaacttcaggtggtattgacccgtctaagtgattgtaggagatatccaaatatattgagagtgttgtgatgttgaataaactagttgggatggtacctataaagttattaaacgagaaacgtagactcgacagtgaaaccatgtttcccactgttattgggatgctaccactaaaattattccttccaaggtctaaagagtccatatgagttaaattgcatataacacgagggaatggcccactaaagtaattgttatctagccacaaaattcttaggttttgaagcatacctaatgatgacggtggacttccagtcagaaaattgttatgtgcgacaagtgcacctaaattgattagtttgccaatttctctaggcatgttccctacaattttgttgctagctagagtgaggattgttagtgatgcggataagttggaaattacggatggaagagttccactaaacttattggcttccaattccaaaacttctaattgggagcaatttgttaatgctttcataaacttccagtcgttagattctttggcttcaagatcattttcagtgagaataaaccacttgagaccctgtaaccctcctaactctggaggaattacaccactgaagtggttttccgcgatctgaaatctagagagtttggaggcattaaccagtgatgatgggatatggccatcaaacatattctcccccgcatcgaaagtctcgagcataggaagtgtgttgaacacgttcggtggtagcatcccactgagctcattgttttctacagaaaaatgttttaggaatgatatgttacaaatattaggaggaatggaccctatcagaccgttagcttgtaggagaagactggtaaggttgttcaagtgaccaagagaagaaggtatgccaccagataattggttatgttgaataccaagagcattgagctgggaaagattgcccaaggaagctggaatctcaccaaatagcatgttgaaccctagattcaagaagtaaagtgatgacaagttacccagggatggcgggatctctcccgacagattatttgcacgaagattcaagtacgctagattcctcaacgcggcgatctcacccgggatctcaccacggaggtggttggagtccaggctaaggctctcgagcttgctacatcctatcgccaacgccggtgggatgcccccttctagcgagttgccagaaaggttaagctctcggagcctaccgagacgccccagctcgggaggaatctggccaaccagctggttcgccccaaggtctagcacacgcaggaacgagaggttacccaagaacggcgagatgagcccggacaacgacgaggagccgaggcttagcgcgacgacgctgcccgcgtgccggccgcggccgcacgcgacgccacgccacctgcacgggtggttggaggcgttccaccaggtgagcgcgccggatgggtcggacaccatggacctgaaggagagcagcgcggctgcctgcttgtcggtggcgtttgtgctgctgctgctgctccctaccgtgcataccgccgcaggggaatacaaaagcaacgtggagcatagcaagatcactagagcattcatgcctgtttatgtttttcagcgccaatggaactgaaggtgagtgggagctcaagggtgattggtatacgggcagaaaaattgcttggaattcacagtataaatagagatagaagcgcatgtaggagtagcgacgaaaagggttggaaacagtagaaaacaatctcaactatttccataactgtttttctaaaatggaaatggagttatacggaccatatctctatttctactatttaaaaataagagatgttcctatcatctatcatccgtgcgaaaaaaacgggcaaaaaaaaataaaaaagaatctgtccgattgaaaaaaaaggaatgtggcgaaaaaaaattgggtgaaaaaaagaaaaaaaaagaatccgattccgtcgacgcgataaaaaaaggcgaaaaaaataaaaaaaagaatatgtccgattcaaaaaaaaattatgtgacgcagtaaaaaaaattgaattctcttattcgtgacacggtactatatatctctatctctacttaaaaaataaaaaacatttctgtcgtccgtaataacgaaaaagggtgaaaaaacattaaaacaaaaaaagaaagtctgattcaatttactttaatcgtctgtgaaaatcttattttatcttaatctcaatctttccgaggggaccgagcggcgcactccgtccccgcccgcgcgatgaaacgccggccaaagcaaaagaaaaagaaactgaaattgagcaaagggataaactagattgaagttcccaaaattaaaagaggataaacgatattgaaactcccgtaactcaaaaagagggaataaaatagattgaaatttcccgacaaaattccccaaattcgaagaaccctaatttctggtaagaaccctaagagtcaaaatccaaaccaattaatctaagggttcgggttacttaccggacttgaagcccctaagctcaccggagctttctaggaagcggcaccgccgcaccttcacctcctcgcagttgcgtcgggttccccgtgcgcgcgctgtcctggagcacccttccaccgtcccttgccgaagacgggaagcgtcggcttggcgtcacccctcccaccgatgaggtccaggccgctcggcgctcgtcgccatttgcgcgcctgcctagccggaccgccgacactgtggcatggctttgtgccgccctcgggtgcggcccccagccggcaaagcaggagctgctcggcggtcatcaccacacgcgcgcaccagctcgccggaccgccattgccgcctttgttgtcgttccgcttgctcgtcgccggagagaaatgggattgggagagggatttgggagctagggttttgcccctctctcctggtcggcgcttcatccggcacggggacgatcggagccatccattagatcggagatccatccattagatcggacggctcagattcgcccagtgttgggccaccaccgctgctggttacgctgcgcccaatgggttgcggaagtgcatcggaccgtccccgcatatgtgggccgcgctctgctgctcggcttgtgggcctgttgatgcgaaaaacacacactggcctgggagatctgcttaactctagtgcaggttcaagatgttgatgagatgcgggagtgccattcagtttgattctgtaactgacaagatatacaaatagcagatcaatgagccgatcggctggcaagccgatagattaattccagctgatgccgatactagccgatagcaatagggttttgagctatcggctatgattctgatgtagattctgacgcttgatgtaaataacaatataaaggcaatcgactgatgataatgtaagaaagcaacaatgtaatccaatagaaaccattcgactaacaatgatatgatagaacaagtattgatctgaaggttaaatgatacatcggctggaggttcgatgtcataaaatccacaacattagataaatcaatgaaatatttgttatcatcggctaaatccaacttatatatgcagtccttataagccgatgcaacatccagataactcatcggttgaaaccccgataaaacccttattggcagtcaacaagtaggctagggattatggttctaagcacaacttagtagatcaaacttaactaatacaacactaagtatgaaaagaaacataatatctagacgatcatgcccttgacggatttttagagtggtagatgccttagctaatctaatctagtaaaacaatttagccgatactggcagaaaccctaaagcgagagacaaccgatagagctaaattgagttactaagactagattaactaagacatatgataaataggcaggcaaatatatcatccaaaccagagcaatccaagaggttgaatgtactgatgcagccttgaacgacgccgacgtagacaatacaggggattgctagttggcgcgcgcgccagctactcccgggcctcccagcccatcagccatttttttctttttttttcgcgatttcttctttattttttcttttgtgtttttttttcgttttttctgattactttttttaatctttagcacacttatttttttcaaaatgttttgagttgaaaatttttaaatctgatttgaaagtattcaaatcttgagttgaaagttttcaaatttgagtggaaagttttcgaatctcgagtcgaaagttttcgaatctgagtcgaaagttttcgaatctgagtcgaaagtttttggatcggagtcaagagttttcaaatctcaagttgaaagtttttaaatctgagtcgaaagttctcatatttttttcaaatcttaacttaaaaaattttcaaatctatacttgaaagttttcaaatctcgagttgaaagttttcaaaatttgtcttacacatttaaatttcgagttgaaaattttcaaattaagttttaaaagtttttaaaatttaacttcaaaagttttgatatctaacttgaaagttttcaatcggttagcagaaaaaatcttccggaaaaaaggaaatcatatcttaattaccgtcattatctactaatcacttaattaattaggctaaactatcggaaacgctcgccgccaacgcgcacgcgcgcgttagcttttctgaacgatacaattgcctgggccggtggaacgtaggacttatcccttcgcaggaggtcgatttaaaaaacaattgtaaaggtttcacctcgtgatcaaatatatttgaaacaaacctacaatacgtacattgctatcatccgattgctgtccggccgtgttacggcgtgggcacaactaacaggcgcacagcaatattcattacggcctgaatcatctatcgtgtgtgagactttcatcgctgctttgattgtatgctgaagttggatagcaacatcgtatatgtatattattttcaattggagactcaacttacaactcgtatgcatatatattatgcaggtactcatggtgatggtggccggccatagatgaaaccaaaaattagatgacaaacggaaatgtaatttaatcgaactctttgatagtatgccaacgtatataattagtgatggagaacaatgctcgacggagccacttatatggacaaagaggagtcatggatggactcgcgatgtaccaatcgggccttcccgaatcccatcctatctgctaacccatatatgcgatatatatgataggactagtgtgaaagacgaacgatggatacgtatgaaagatggatgacgtaccaagcccctaacaaaaacacttttaatttttataatagtagagatatagaggtggaactatagaaacacctttaaattttataatcgtagagatagagaggtgggacggtataagcactataaatattttaagtaggtaaagataaagatattggataaattaaattgcaagctcacatatttatattaacatgactatataatatggtcataaaaattcgcttacactatgtaaatcacaaaattacctattcttcagctatgtccttaaattagagatttgatcgagagattagtggaactctaaactatgggcgaaacataaaccatagatgttgtaatattgtaaacggttctactagctaactgtcgacagctttcctgagtgaaaactattgaattttttggccgtcgattccgcgctaagatttgtgctgagatattttgctatcggatctaaaccctatttttcacaagctagtctcatcatcgcatgtttatggcagatttgtttaagttacatctaagttatattctaagtacatgctagttacattgtaactacactaataactacattgttatctctatataaatctattatattattaagacagctcgaaaagaagccaccacattcgctgtggaggctagaaattcccacaataatcgaagaaaaagaaaagaagagtccaagtagaaatacaaactaaaaaataactgaaattcggaattaaaaataagcaatactgaaataggagtccatataagaacccaatacaagatcaattaaaacctttggcaattctagattttaactgtttacagtagaaaagataagtctatagaactgtgtacgttacatactaggagtctttgtccttttctgtttctttggcggtgtacacagtacacgtataatctaattcaattacaaacctatacgggcaagagttgtgctgccaaataaacaaagcttgcactgctgcacctatatattctgtagatttcaagcagcaacgattgggctggagcggcagaacccaatgatagcgggagccgaccatagtaaaaagacatgatatttacatagacattacaacaaacagatcaatacttgcagccggcaatgcatcaaacaccaaaagtttctttgatattcatgaaagtacacatgatatcgacatattgtaattagtgtatatttttcacaggagatgaattagtgcaagccgctataaactgacagtcagataaacgtttagattatagtggattcacaatttaacgttcataatttaacggttgagatataacacctatatataaatataggaattagagttgtagtgctaatataggagtacaaagcgccctgctcgatggaataatcgagatccaattctaaaactgttatctaaacctatttgattccagtggaaaaaaaaagcaaaacaggaactaggtaggcagaaagccgtgtatatacgtgtgcacatgtaagtattattttttcagtctaatcacttcaaaactatttagaacatactttgatatatttgttgctagtaaaaatgaagcgactgtctctattcgatcctttttaatcaccaaatatacatccagcaattcagatgatttataagtaactaaatttgaaataataataataaagactatgaaaagaaaaaaccatctacaacacaacatgtgattaattaaaatttaaaaaataaattatgaaattagaaaaataaaaacaaaagtttaagaaagaatacgatttatgaataacaaaagttcaaaataaaaaaaagaaatattaaaagaacaacccgtaacacaacaatggtaaatatcaataaagagggagggataaatagggtgtagcggttgatgggacattttaaaacaataaaaaaataaatgacgattagattcaattttaaaaatctcaatgacgattaagagaaacagcagcgggcaagccgtcaaggagcgcagtcgtgacgtttgactggacttctaaaaagaaaaaaaaacaacaataatcataatatcatatttgactttttaaattccaatgacaactaaaaggagacatcgggtggattgtagaacagtacaatgacgacatttgatgtaacttctaaaaatataaatatgtcaattgacaagacaatgaactaaaaaactataagatctaaatatgaaagtttcaaagaggatgaataaaagttgtgaaaggttgggcaatcaaataaatgagtggtaaaaatgtaaggggtgacgacttattgacttttaaaaactaacccgatgataataagattcaatctttcaagatcggctagatggctatttaacaaatttaaataaaaccatgcttaaaaatatataattctggatgggtgctagccgcgcaacaaataaatgggtgacaaaggagtaagggtagcaacaggtgtgacttttaaaaattataaaattataaacctggggatgataatgtttgatctttgaaagtcctaaaacaacgagatagatatttaataaattttaagtagaatcatgtgaaaaattagataattttgtgggtgctagccgcgcaattgcgcggaccacccagctagttagatataaagttgcatatattattttaatacatatgtacaagttattattattatagtatagttctagtgaaattatatactatagttagatttgaaagttttcccctcaaaaatcactcgacattttttttagctaatccctattttaaaattactaccatattataaagggagaattgattatttgactatgttttgaagcctaattaacaatttgaccctatttttttcaagtttgcttatttgactatgtttttcaaaattagagtagccgtctgaccctgtttcaactacgccgttagagtttcatttagaaaaagaaaaaaaaatgtatttatgagtcctaatggaccaaaataaccctgagtaaacacattaaccctaccctcattccttatcctcttgatctcccctctttctttccatagctttccccacggtgcagaaccagccacgcaacggaagagtggcggcgacgggggcctcggtggcgaagctcgggctgcgaggggcagatttggtgacggagcttgggctacggcaggtgaatttggcggggaggggcggcggaggcttgcgacgagaaggagcagcgacggcaggacccgggcggcggagttctggttgcgatggtgtgcggtctacggatctggtggcggcggtcggtgacagcggcatggcggcgacaaagctcgagttgcaacggtgcatcagcaacagatcgactcggcctgcgggatgtggatccgatggcgccgaggcatgcgggggacaggttggcgacaacggtgtgtcgacggcagatctgacggcgccgattcgtgcgggcagcggagtggcaggtcggcgacggcggcggcgataggaccttcgagtgttgggcaagaaggatttgtgttttgggatgtttttttggtagacatgaattaatttattttttttgcttcaatatatgttaaatttgtgaaacataaccaaattgaagtctattttgttaaactggaatctaatttgaaaaaataatctaacaaatctaggtcaattttgaccaaaatctgacaaatctaaaatagggtcaaatgagcaagggcagtagaggcattttgtgttttctataacatcgttacatgcccttaaaagaaagaatgaagaatgggaaaattggaaccataccattaaaattttacaaaatttgagatatgccatcctgacccacatgtcattgattcatgtgggtcctatatgtcattgagataccgatgtcatatctcaaactttgcaaaattataatggaatggttccaatttaccctaaaagaatagggtcacaccgtacgttcagttttgaaaaaaagggtcaaatgagcaaaattaacaaaaaaaggggtcaaattggtagttagtcttcaaaagagggtcaaatacgcaattgcctctattataaaagataacttcaacataaaaagggtaaaataaggaaacaattgagcataatctttttcagtttagggttagccaaaatttttaatttttctataactatttggataacatacacaaataagagagaatttctttttgagagtttataagtttcctcctatcatgtttttttttgctatatccatctattaacttattaaagtaatagaaaaaggagcctccacgttttctctcacccctagaaattcccacattaatcggagaaaaagaaaaaaaatagagtccaaatagaaatataattttaaaatagtttaaattcggaattagcaaataaggaatattggaagagaagactagagtccatataggaatacaacttagagctaattaaaatttagaataaaaaaagaaaattaaaagaagaggttagagaccatatagaaatagaacttcgaaataactaaggaatattgaaaaaaaaaatctagagtccatatatgaatacaatttagattgaattgaaatacggaatttaaaaataagaaaactaaaagtataatttagagtccatatagaaatacaacttagaaaaaaaaaactaaaattcgaaatttaaaaataagaaatattagaaaaagaatctagagtccatatagaaatacaacttagaagaagctaaaattcgaaacttaaaaaataagaaatattagaaaaagagtctatagtccatatatgaacacaatttggaaattactgaaattcgtaattaaaaaataagatgtattgaaatatgagtttagattccatataataaaaatacaatttataaataatagaaattcggaattaaaaataatttgctctcacggcctataaattctcacattaattggaaataaaaaaaatagagtccatatagaaataaaatttaaaaataatttaaattcggaattagcaaatatgaaatattggaagaggagactagagtccatataggaatacaatttagagttaattaaaacttcgaataaaaaagaaaattaaaagaagtggttagagaccatgtagaaatggaacttagaaataactaaggaatattgaaaaaagcaatatagagtctatatatgaatacaatttagtaataactgaaattcaaaattaaaaataagaaatattgaaatataagtttagagtccatatagaaatacatatacaacttagatctaactgaaattcggaatttgaaaagaagaaatgaaattcggaatttgaaaagaagaaaattaaaagtagaatttagagtccatatagaaatataacttagaaaaaactaaaattcaaaatttaagaataataaatattagaaaaagaatctagagtccaatagaaatacaacttataagaagctaaaattcgaacttggaaatatatgaacacaatttggaaatttaaaaataagaaatattagaaaaagggtctatagtccatatatgaacacaatttggaaattactgaaattcaaaattagaaaataaggaatattgatagatgagtttagagtccatgtaataaaaatataatttataaataagataaattcggaattaaaaaataaggaatattggaagaggagtctagagtttatacataaatacaatttagaaataactaaaatttaagatattaaaataaggaatattgaaagaagggtttagaatccatatctctactattataaaaattgaagatgtttttgtcgatactttgatacgtcatccgtgtatgagtcagtttttaagttcgttcgcttttgtaaatacatatctgaatttgagttggttttggaaatacagaaggagctgtataagaaatctctttaaaaaaaactcacatgataatttgaggcgaacatactcttaactgtacctcatgattttctaaaaatatatatccaagcgaattcccgcagtaaatttcgtcttaactaaaccatataacaataataagattaaaataaccttcacctattgcaacgcactggtattatttttctagttagaataacatttgtaagtaacatgacttcaaaatttaaaaataaaaatattataagatgagtttagagcctatataggaatacaatttagaattgactaatatttaaaattttaaaataattaataaataccatgtatattcaatacaatataaacattacacatcagttagtttgttcaagttagtacaaaattaatttttttaataatttttaatatattttaataaagatatataaaattatatgcgctatcatataagaactagccgtgtaatctagttttagggggcatttagattcaaggggtgtaaagttttggtttgtcacatcagatattttatagggtgtcgaatagggtgttcggacactaataaaaaaactatttacagaattcgtgagtaaaccgcgagacgaattttgtcggagggtgatcctttctagcgggaggctgtgaggcccccctttgtgagttcggccgggggagcgggtgcaatactgaggagcgtgctttcacgcgagcgaggtggatccacgagaatcaggctcatgaaatggaaggtgagagagtgagagagagggattatacaggttcggaccgctatcgagcataataccctactcctgtctgtgtgatgatcttcgtgtggttacaaagacttcagatcctgggagtacaagctagggcttggccaacctcttcccagagtctgattttctaagagacgtcccctttagtcgtagggcagggttctccttttatagatgaaggggataccacatgcaccacccctgctctctccctgcgggagaggggcccacattgcctatattaaaatgcgtcttgtgccttgggctggaagcgatctgcgcggctaaccttgggtggcccccaccgaaacttttcggctgacacgggggacatcccccatcattccctattaaatgtttggtgacttcgtgggcacacgcgcattgggcggaacgacctgcaggacctcccattacacatgatgggacaaggcatacctgcccctacgctgcctgacacgaatcgagacgtgggcgcactaccgcccatcccatccattcatcgccgggtcacagactagtcaaaaggcggttgccaggcgcacgtcaatcggtctacggcgcaccgtgccatgtcgcattaaatgcgacgggagcagttgctgcgccactcataaatgcgcctggcagacagtgctcacgcccgctgacggctcccgcttggccaccaagtggtggccgagcgagggcctcgggggtggttcaacccctcgagcccgaggggtacgacgaggtaccccgagcctcggggagggaggcagccactttccatgtgagggcgtgaccccccgagggggactgggcccgccgtacgcgtcacacgggaagggctttcttcccccctagactagggactcccgggcccatatcaccaataaatttattaagcctaattaatcagttattagcaaatgtttattatagcattatattgtcaaattattgatcacttaggcttaaaagatttgtctcgcaaattagttgcaatctgtgtaattaattattttttagcctatatttaatattttatgtaggtgttcaaacgttcgatgtgaataggtgaaaaattttgaggcaggatcggccttacatatgtttggtcggataggatggagaattttattctggtagcgacgtatcgtcacgtccggagtcgtcgtcggtcaatgtctaccgacacctaacggccaacccttccctattccctccgtacttaaaaaaaaaaaagaaggcaaacattgggtttccgtgtccaactttaactgtccgtcttatataaattttttttataattcgtattttcattgttgctagatgataaaacatgattaatattttatgcgtgacttgtctttttaattcttttcataatttttttaaataagacggacggttaaatattggacacggaaactagggtttgtctttttttttttttttttgtttttgggacggagggagtacacggttgacagcaggttgaatggacttgcccgaatgcccacggcgtgctatacggccactgcagttgactccacatacgacacgcgcgttagaatcgttcaacttgaagcttcattgtccagtcgctgtgtttctatcaagcagaaaatgtctgtactagtactttggcatgtttaggtcaggtataaaattttagcgcgtaatatcaaatatacagatacacatttaaagtattaaacgtagtctaataacaaaacaaattatagaatccatctgtaaactgtgagatgaatttattaaacctaattaatttgtcgttttgcaatatttactatatcaccatattgtcaaatcatgaagcaattagtcttaaaagattcatctcacaaattagtcgcaatctgtgcaattagttattttttagcctatatttaatacttcatgctggtgttcaaacgttcgatgtgaccgggtgaaaaattttaaggtgggatttaaacggggacttagaaagtcagtagtaatggtatctattttcacaccactcttatcactgatatctataggccacaaattctcactattacaccaccttttaaaaaaaatcattccgtatttcaatgtttgctttccaaatttcaaaatcgcctacttattcaataaaaaaaattatagtattacttggactaaataagtgcttattaattgatttaatacactagaaacttaatttgatttttgttgcaatacacgagctgtaagctgactgaaaattatatactcccatgcaaagatcatggagagagtgctagcaggcggtcaggcacacaaccatacaagaaggcttgcggatgcacaatagatgcacagcacaaatcactgtcccgcgagacttccagcgaggtcgtcacgatgcacagatctctgaacagcaacactccaggtggtcctgagcttataagaaatactatctccgtttcatattataaatcacttgatatttttctaatcaaacttcttaaagtttgaccaaatttatagaaaagtacattagtatttttaataaaaaatattattaaaatatatttgatgttagatttaatggaattaatttaatattttagatagcgctaatttttttttatgaatttagtcaaacttaactagaaaaaaaatcaaacgatttataatatgaaatggatggagtagatggttggtaggtaccttatgaaaattttagttttttcaccttctagcttcttctttttttgattctatagctttatattcttagaatttaggtcagaatctgtaccactgcagtttttgctgctaaaagtttttcaaataggaccttagtcaactttttccggctaggtgcaccccttttagaatttgttgctaaaagctactatcttttcaggttataagactttctagcattgcccacattcatatagatactagccatttggtcgtgtgttgcatgactttagatacctgtaaaaaagctctatatttatgggtcgtaatatatcatatgatgaaccatgtttttattagacatataaaaatatcatgaaattatcctttccctcaatcagggtatccaacgtttcctgtattttcatgtctcgcatctttagaagcctgctccaagttcgcataaaaaaatggccctgaaattgacttcaacaggtgttttgggaattttgcttcaggctccatcttgttccatgcttgccacaacactattgttagatctgcatctcataaccggataagagtacaatatgatccatgcatcccaaaatttatgggaaaccttttagtttctatgaaatcacaacctggaacatggcaggtgcaaagggcttggcattaatcacaaccgcaacataggagcaaaccttctggttcctttcgccgtttctataggcgagctggctgggcaaaagacttagcccagtatacatataagccctttatacatagaccataatatgataatgggattaactctaaatttattttacttaaaaaaacataggacttggtaaatagttagttagaactaacctatatttgcaagtaaggttcaagtaccatgtagaagatcttttggtttccaaagttcagtcatctcatccagtggctactacatgcttattccacaatattttctcataaaatacaaaataatttaatttatgactttgaaagggactggacaaacaattacttcctccgtttcatattattaaactttctagcattgcccacattcatatatatgtctagattcactaacatatatatgaatgtgggcaatactagaaagtcttataacctgaaacggagggagtagttaaatcctgaatctacgtaaaatcaaccattagtttatcatgaaacttataatggcaccattagaccattgggccaacaaaatattaaatttaaagtaggtgctttctaaagttgactaataataataattatcatgcttgcacaggacgcaacctaaatgtaggtagaatttcacttccaggttgttacatagtatgatactgtactaagcattataagtttgaagttgataagcaatccacatggttgaacacatctcagaaagttagaatcagtgtctctaaagttctgagattatttgtacattttagtaccgagaaaaatattacctggtttggatggtgccagcttccttgtttaacagaggagatacttttacggttttacctttggggagataattgcacctgttgcgtctgtaccatcatttgggggtgtttttatcataggattcaaagtatatatttggggggaagtgaagccaaaacactctgtatgaaatggttagtatctaacctgtgaaaaagatgatcccaataccatttatttggggacatatgttcagatgtcatctgctaaaccagtggaatcatagctaaaaaacaaaaggttgagtagatacattccaatttggttaaatgggtatatacaacattccaatttgattaaatgggtatatgcacaaaagtttgggtggtttctagaaattttgaaaaatatctttggaggtacaattgaaatgctttcttaatagaattcgtgcgaagaaaataaaaaggacttgatttgatgacacagtcaacaacaataaatttcttgttctatcaaacaatattattcctcaacaactcgtatccagtttttaccattcaagaagtactaatgttcatgattcataccttagatgcatggtagcaagttgaataaaaaatgaaaccacaaattttgaaaggacgtttatttcataattgtcacttcaggtaaagaccaataacgcaaatcaatattacagtcatttcaattcctgctttaaaactcataacatcaagaaaaagaaatacctgataatacaatatttgattgctttattatttgcttcataaattatcaaaattcattcttaatcagtgaatacacccttcacagcaaaccggaagctaaatgggtacttagagtcaaatacatttgatctttaatagtcaaatttcatttaagcttaagcaaatcacattgtagaattatcttttataggtttccactcccctgcttgctgcagctttgctcgttagacacacatatatagatacacaaatatagcaatacaccagtcatttatataatgttaggagcaaccctttcttttttctaaatgcgtgaatagctagtactactccttacttttttttttgggaaattattagtattagttatatcccggtgaaccactgccatcgaattgcttcagtgagttggacgttgggcatacggaggaaaatactatttcaatccacttataaattcatttgttattatcacacatatctttgataactattgaaataattgtatgtaactatttataattaatgaacatgaacttacattttgataggatgcattctttttacagtgctcttaaatgaaatttgcccacccaaaaactgaaattacatgagaggcttaattaaggactccattatagaacttatttatcacctttttagtctaaatcaacttgttagcactaggtgaagccgtggttcctatacatcgtacatgctttaccaacatgaacaccgtgaggagcaagaagtttagatacttaccacagctgtcgatgttgggactttttgtatttcccttggccatcgttattggaggaggatgagaagtggcgctgcagagtaggtcctggggaaccagaggcactcaggtggagatgcagaagataaggcggcagtgacccacaagtgaaattccgcgtgcatcgccgtcaggtcgagccatacctcccaaatccgaatcagccccaccatcgccggatccagaacaggtaggaggaggtgatgccgcagtagtgttggggatgggaatgaggaggaataggatggggtgtggctagggcagggggaggtggaaggggagaaaggggaggtatggattcctttgcttcccaccgcaggcgtcttcgaccggcctgtccccttgcacctatcctcgtccttctcgatgccggtggctcttcttcttacctctccggtccccattgattgtggtggagattgagaggagacatagcggctttggagatgggagtggaggaagcgagcggaaacgcggagcacacgatccggcgcctccgcctcccgggagtggcgcggcgcagcgaccagggaaggggaggcggcctccggtcccgagacggtgtcgcaactcgcaacaggtagcaggggtgaaaatgaaaaatggtaagactagggaggtggaaggatcttattgcgaaataatttttacgaaggatctagaatagattttgccaatcaatgaatccaacagctcacatcatctgtaggggcaatcggacgtcctatgtttttccgatgacgtggcgcaatctagtggcgaaaaactttagttttttcactactaggcaatgcgaaagtcttgtaatctgaaacggagatagtatctaaatagggtcttagtcaactttgcctagctacaaattgatgtatccctttcagaatttgcatgcgctgcctgtctgatctcagcacgattagcggttcaattagttgaactagttggcccgcacaatcgcgcggcgcacccatataaaattatatatttttaatatgattttgcttcaaatttattaaatagttatctcgttattaagattttaaaagaccaaaccttaccatcctcgtgtttctaaatttgtagtttttaaaagtcacactagttgataccatttacttctgtcatattattctttatttacttgctcgatctactactatttctattcattctttttggaacctttaaaaactgggcttcttcattatactcctccatgaccgtccactgcatcttctctttattgtcattgctattttaaaaatcgaacataattatcgtttaagtctatttttttactttatagaagttgcgctaaaacgtcagcgactttgttctctacgtgtacttctctacggctcgtccgctgcatcccttctttattgtcattgagattttaaaatcaaacatgattatcaaacacgctgcagcagatcacctatcacgttcagttattattacaggatgaatatctaaaaacagaaaaaaaaagaaaaaagaaacttcaggctcatgtgttaatccttacccaggcattctgggtcatatactcatatacctcaatcagttttaagaattactccctccgtcccagaaaaagacaaactctggtttccgtgtccaacgtttgaccgtccatcttgtttgaaaaaattatgaaaaaaattagaaagataagttacgcataaagtattaatcatgttttatcatctaacaacaatgaaaatactaattataaaaaaaattcatataaaatggacagtcaaactttagcacggaaacccaaggtttgcttttttttttgacggagggagtacagtacatgcattgcagtgcagttatgcagactaagagcaagtttaatagtatagccctactagctccaaatcatctatagccaatgtaatagccaattcatataatagctacttactggactattaatatctggtcacacctgtcatacacacattacgtattggagtccgtgctgtagctggctacatatctgtagccagctgctcttctctcttcctttatcttcttaaaatatgtttatagctagcttatagcctgctattatacctgctctaaatctagcttctaatcaaactggtcgcaggcattgaggtttccgatatcgttaccaaaaagccaaagcaacatttggcaaagcagaatgcttcctctgaactcgtgccttttcttttggagtattccctttgttccataagtcattttagttttatcctaagtgaccaagtttataaaagaatcatcatctacaacatcaaattagtttcattaaatccaccatgaaatatatcttgatagtgcatttatgtattattgtagcaattttctatatcctcagccaaagttagagaagtttaacttatgataaaactaaaataatctgtaatatggcaccaagggagtagaacgtaaaataaccacatgtgtgacagtgaaaccatcgtagtgccagttcatgcactactcatatttgatatggaggggaaccaagtttgatctgacacctaccttgatagatacacagcataaaaggggcaagttctacagacctcagaagtttgttctggactgcaatttacaagcaaggggatgacagggacgtcaagcatgaacgatcggagccaatgattcaccgtctagtgacagtaatcagttttgcgattgactctgattatcttgcttagtagggctttgcagtgctgtcactttttgcggctgtcgtcttctcagcggcagaagtgaaagacacagggaggtgcggctggtcattcactaccaagctcaagacctcaggtcgagcatagtggcccaccacatcaaaatcaaacttggctcgcacgatttctccaaggtctgcgaatgaatttcattacaaattttaatatgaattgtctaatcacaactattcaaaatttggtgccagaaaactgagggagcacataaacaaaattggggcaaatgcatgtacgaaaaacctagtacatatgcaattattttctcacctagatcagctgtaatcagcgcctccccttcgtagttgggacctgccaagacttctccggatggtgaaatgatgacgctacctccagggcagacaacagtgtctggagaaggctcttcacctaaaccagaaaatacatactccggtggtggaggatagtcctttctacggcagaattgatttgctgacaggacaaagcatcccccctctaaggcaatatgagtcatggaggcttgccaaacttgtctggaatcagcagttggagcacaatatatctcaatacctgtgtagtgcatacaatatatgagtagatgatgaagaaattcaagtgccactgccacaccagcgtttttattttttttcacatttgcctatctgacttattctgaaaccaaattcattttgttatttcaggaatatcatctcatgaaaccatgtcacttcctcataagctgtatgaactatgaagacttctagtggtattgtagtaacaatattccaagaaatagtcttacctttaccataaagtgctgtccgcaacagtggcattttattttcccagcaaattagggctccgatctttccaagtggagtatcataaacaggaattgttgatccatctccaaatccccatattattcgttctaatgctgttggcatgagctttcggtgcttacctaggtaccgtcctagaggatcaaagaagagcaccgagcaatacagagtgtaaccttccctttcaatcactcccatcactaaaaatactttatattttccagccatagcagccaagcgtgtcacctctgggcctgtaagtcagaagatggatatatcaatctagaagaaacaaaatgtatgtccacagtgatgaaacagctagaaagctgaatttttatgataaaacacaaaatctgttttcttatgataaaacacaataaaaagcatacaaaacagcacaggatatggggttattgatttgacaacaatcaatccatgcctggaaccagaaagcatgatcataacatctagctgaagcagtcgaggcaagtatgagtatcaataatccattgtagatgtttctccattttggggaaatcctatgccttacttgaacaattaccaaagctatggtcttttttttttttacatcagattaagtaattggatagatctttggtaacatctatgacttctttcccctaaaaagttctccagagtctaatatgagatggatatttctagtactccctccatccaaaagtgttaggcatatactatttttttggtttttccaaaagagatggtcatatttgtagtctccatatgctaaattaattgttgaccagaatccgaatagccatcttaatacttataggttgcatgtatgcatatagttccttggttttgttacatgggggatgagtgaattcctccttggtcttggtgacaaaagaaatatgccttacttttttgtatggatagagtattcagcaaacacagtgttgacagaaatatgcaatttaaacaatcaacacacacatatatatatatatatatatatatatatatatatatttctttttgatgataaaagggcatgaacggataagtcaatagcaaagaacactttgtttggcagggatcaatcctagcccgttccccatgggtggcccgggattttaagtgaattgatatattccattacattaccacttaccaggcacttctattgccgccgcatgatacttccggaattcttccttccccttgtcttttggattaccaatgcttatgttggccccaaagccaaatgtggatccacgaggatagccgccaacaaaagcttctgggaacacaaccaactgtgaaccatacccagcagcctcctctatcaacctctctgctttatctgcagtatgaatagcaatgtgaataataaacaatcgtttctaatgcaatgcatcgatctggttctcccaaagtgtcagtattggccttaatgtttacatgcataaagtagaaaaataatatgcattatgtgtctttcctaggcaatggcagtgattggaggaggtagtgccatagtgcaaaaggataggcacttggacatgaatacatgatcacacgagcccatgatgcagcatgctgcaacagaaaatagcatataatagagttttaacattttgtctggcctggcagaatagatcatttcactgggtcatataatcagtgggttattttagcagaataagaaaatgtgcattctgcccaaaacctgtgatacaaatgtgctcaccatttgtaaaatttccaaaggctcaacagctttgtttaatatccaaaggtactaaataaggctcaataacaaattaaactcttgaagaaagctcctcagttgaatactgggccagcccttgctgcaaaatctttcagtggcatgatttaaatatagcaaatactactaacaaaaattttcctacagataacacgcacagaacaaaaaattgtggcgaccattagttaggtaaatgcataatttacaagatggggtataacatacggcaatcatgacaattggcaaagcaaaaatcatataacaattaacaaagtaaaatcaaagtaagagctcacaaggaccgtgaacaaaccacaagaaataaaatctgatagatgtaacctatcatgatttcacctcaaatgacaaaggacatccaacaattacctccaattctgcgcatattgcttactcattaccaacaaatgacacctataccaaatctcacactgaaccctcttaattaataaccactagctgcagcacattggtgatttctgacttattttatctaccaacaacaacaaaagaaaattcaccaaagcaagggggggcacacacgagcgttgagcgtacgtgtgctgtgcttacctagagtggccggggtgtcgtagaacacggtggaggcctgcacgacggtggccctgaccgtggcggcgcccgagtcggcgccgccgttcatctccacctccgcaatcaccggcggcccaccgcccgagcccgaggggaccatagccatcggtacggcacgcgcgccgccgctcgaagtggacgcgggagaaatgggggccggcggcgaggagggagatggtgggggaggagctgaagctgaactgtcaagtgtgactaggagcagaagacgagggagcgaaatccatcacggatgcttctagaccctacaccttctccagcctttttccatggctgtaactttcccgtttcctctttccctctcttctttggcacgtgaacgaagaaaaaaataatttacaaataaagtttctcaagtttgagtgaattacgctttagaccacattttattacctaaacatatcttttcactttggaccggataaatttgccattgttgcaatttgaaccaccatgaacgattttttttctcgtgcaatcaacgaccttaaacacatcagctttagtatacggccgatctcctctatatatggttcatatgtttgccgaaagggaagttagtcatgacgagaaaagttgtttatagtagtccaaaccgcaacaatggtaaatttacccggtccaaattgaaaagataggtttaagggtggtccaaattgaaacttgggtaataaaaggtggactaaagtgcaatttagtcaagtttttatatctgtattgttcttggtatggaatactacgaaaatagagaaattcattagtgcataaaaactggactaggagtaggagagattatttcaccaagattactgaacaagttgtagtggccgttttgaactaagacggacaagaaaaacccacgcatggtaaagtgaacccagctcattcgacttcagtggagtaactaattagggcccctttacttgaaagaaaaatatagaaaaatataggaacttttattctgtatagaaacaataaactttgctataggaaatttctctatatgattctttgaaccaaaggattattgaaaactattgagtcttatcaaatttctaaggaatgcccaaattcatacaagttttggagtatttttaacatgaggttcaatatcatgcgaagtctcttatgagtttatctctctcatctaattcttgcatttttcgtatggtccaatcaaatgattatttcatatattttttatgtgttttataattatttgttttgcgcttgatttttttgtcagaattctatgtttttcctattcatccctcaatctttgtttcaaattagccctcacaagacatatataggttgcattggaccgagggagaaacgagaaagggacaattttgtttgtacaattgtacccctactttgatatccaataccgattttaccctacattttagggttgttgttttttgccctatttttttcaatgaatgaggcgtttacccctgtttttgatggaagtgagtgggattggacttagtgcggtaaagaattagagaaagaaagagataacgattttttaaattattgattgacccttttacccctataaaatatccaagtaccgcttggtgtccctccaggcttgggcacttggcatcaactcttcccttcctgaacccgaatccccgttgtgaaacagtggcggcagtgtccgtgggccggccaggcaacggggacaactcgagcaagtgcaggccacccaacccagttgcagtgtgtaggaggaggctaggcattgcacaagaggccatggtagagaggaggacaatggcggctgctgtagatcagcgtagggaggaggtgcggctgctcgacgtgtcgaggaggcgacggggaggaggacaacaggtcaacgacggcggtggtggctcgatgaaaggaggaggcgacagtggcagcttagcgcggggaggtgatggtggcggctcgacgtggggaggaggtggcggcggctcggtgggaagaggaggcaacaacggtggcggcggtttgtgagaggaggcgacgacgacagcttggcacaggtaggcaatagatttgcttgacttgtctatttgtttttttcaagatgtcaaattttgaagcaaatttttgttgatatttatgttaaaattatcatattagtaaaagtttatcgaatttgcaaggttcatgtgctaaatgtgggcaaattctcaatcatgaacaaaaacaggggaagtttgcaacatgagtaagggtattgaatgccttctcgctaaagatttaacatcgttaatctgtccatcaaaagtaggggctaaatttatctttatttcaaaaaaccatgggcaaaaacaaaaccctaaaatactgggcaacatcaatattaaacattaaagtaggggtaagaatgaaattgccccaaagagaaaaggttatataatttccatagagaaaaacacaggaaagaaataatataaatcacatgaatacggatacaaaataaggaaacacaataattgtaaaaggatggatgtttgcaacgtagaaattttagtgggtgatttgattacatcctgttaatcctcttttagtctctaaccaagtatgtatcattacttctttaatcctcaatatccggtggtaggaggaagcaatagctgcctgagctttgccagccgtacagcagcaacgcgagaaatcacatagcctgctgtgctcccatggacctagggcctatttggattgttgccttaccaattttttggtagtgccaaaatgtagacaagttttggcactaccaaaactttggtaaggtaaaattgtacttgatcatatttggtttgctaccaatatagagttaaaatgtgaaattttagtgaagaatgttctagatgacgccaaatctagattaggtattaccaatgaataggcttcaatccaaatcaaacacaattactattcaaattaccaaaatattggtagtgcatgtttttggtagcaatccaaataggcccctaattgctcaatcaatagctcgatcaatagaaacttctggacgaccttctggacaaccgctgcacgcacgcacacgagcgtttcacgctgcacgtgcgcaaacaggatcaagccgtcccgcgaaaccggtgttgccacgtagcacattgttctttcaattttttgcatggaattcgtattataagatttggaacaattgttagccacagcgaaactgatggtagaaatggaatgtagaatactgtatgatttgttggaaattgaatactgagtactgtgttatcgcaatctacatttgggagttgggacgtcttcactaacgaataagaggaagaaacatgacacgattttcagacgagtattacagcactataggcaccaattgtttatcagggaagcatcgtctccaaatctttacaagaaactaaagacagattattcatggggatccaacactggccagctgacaattttattgcacaccggatggaagattaatggccatcaggtcctaaagataccgtcactctttgcagcaaaatttttctctgcagcagaagtaaaagaaacgggcagctttgattcggttttcacggtcaggctcagcacctcgggtcgtgcatagtgtcccacgacgtcgaaatcaaacttagctcgagcaatttctccaaggtctgcaaaacataccatgcaatttctctttagtgttcttgtggtgtttcacggttacaatactgttctttgggcagagggttataatctgatatctgtagaaataattgcacaaatacagctggatacatctacaccaactgctactacatatgaaaaaagggctgggatgtagtagtcaacaagtgagcatggaatttacttgaaggttccacgtttcttacccaagtcagctgtgaggaggccctcgccttcatagtttggacctgccagaactgttccagatggtgagacgatggaacttcctccaggccaaataacagattctggggatggctcttcatcaaggccaccaaaagtatattcaggcgctggtggatagttctttctgcgacaaaactggtttgcagaaagtacaaagcatcccccttcaacggcaatatgcgtcatggaggcctgccaactaggcgagaaatcagcagttggagcacagtatatctgaacacctgcatgaatgtagaagatacttcaggtaaaatataaactcaagcacatgatacatggtgcatcttcagagtcactcaaagtacatttctccttttttttttcaaggtagtagtgtctaacaaatgaacaaccctagtatcccttttgtggtgtcttaactcttaacttctttgcattaccaatcgatataactttaacccagagtacttgctcaggtcgagaaacatatcatattgctagaactaggaatacctttagcgtacattgctgtcctgagaagtggcattctgttttcccagcaaatgacggcaccaatcttccctattggagtatcataaacaggtatagtagatccatccccaaacccccaaaacactcgttccagtccagtaggcatgaccttgcggtgtttcccgaggtatttccccagaggatcaaagaagagcactgtattatatagtgtgtaccctaccctttcaaccacccccatcaccaagaaaatcttgtattttccagccaatgcagctaagcgggtcacctctggacctgcattcaacagaagtcggtaaaatgtcttgcaggggcactgcatagtgcatatcctctgtagcaaggaaagctagatattaagtggggagaaccggagaatagctaaaaaatgatgtaagacgtattttaactgaattaattgacggaaaaaaaaagttaagatggatatgatcaacacgaattctgaacattactacagaaaaaaaaaagggcggttactaatgcttttattcattaatgcatagctatcatatatgattatcagcttgggatctgcatcacgagttaggtctccttatcatttttttttctgttttacctttcacaatttagggaacatggttgaaattgatatttcagggtttatacttcacatttagcagtgtattttcttttttttttagataatagcagtgtcttttctaatagattgataacctaaataaaataaagcactgaactttaaaaaaaaaatgaaaatgataaagcaaaagaccttggtttggaaacactcgataaacatagcgtacgacaacgatatattaattactaaactatttcagaataccaggcacatctatagcagctgcatgatatttatggaagtcttcctttcccttggcagatcgattgccaatagtcagtccaaaggtagatccatgagggtaaccaccaacaaagacttctggaaatagaactatctgtgaaccatatccagctgcttcagctaccagtttctctgctttatctgcagtgcaaagcagttaaagaaattagcataatatcgttaccccgtttatttaggattttattcataaaaagtaacatgtcatatgatcatacatttacagttttaattccattgaactatttacttgtttcattctccactagattaggtagataggatcattgcagataaatcattaattacctcattaaggccatgttcggttaatccactagagggagggattggataggtaaccccagtaagacagccgtttggctttcaatataagccgggtcgtaagaccttatttctaaaaataaaaatattggcgcacacggagatatcctacttcctgcccagtttcagttcactcccggtgttttgcgtgtgggtaaattagtgtcgctgtgcgggcgagacaaataagcaagcaccttgcgcgcaccacctaatccaaacagccacacgggcgagacaaacaatcgaacacctcgcgggtgatactagctgcagcagcagcagcagcaacagcataaacgaagatggcagaacgcaccgagagtcgcaggggtgtcgtagaacacggtgcaggcctgcacgacggtggcacgcacggtgccggtggcaccctggtcggcgccggcgttcatctccacctccgtaaccaccggcccactgcccgagctcgcgggggccaaagccatcgctcccccacccctcccaagaaattgagcgggaaggggatctcgttggggggagggggggaggccgtgtgctacttgtcgtacttccttttgaggtaatcgcggacgaactggtcgcgggcgagcgtgcgcgcccgctggggctcgacgtgggcgtaggagaggtggacgccgtaggcgaggaggcctgcgccgaaggcgaagagagcgacggtggagaggagctgacgaggagtggacggggagcacaaccccatccgcgaggagtgtttttggtggggggaccggattgtaaaaggtgaatgcgacggcgacggcggcggcggcggcagccgcgactgattggaagaggacgagtggacgacccgagtaccggctgctctttcgatcctccacctacgtatgtttcttgactaacaatttcttttaattttgtatactttataattattagcatataggagattttaactctgtatattttccatactttacaggagatttttatctgtattttttcagtggagtgataaccatttgcttatagtatattccctccatcccaaaaaaaagataaaccgtgggtttccgtgccaacgtttaactgtctatcttatatgaaaaatttttataattagtattttcattgttgttagatgataaaacatgattaatgctttatgcgtgacttatctttttaattttttttataattttttcaaataagacggacggtcaaacgttggcacggaaacccacagtttgccttttttttgggacggagggagtaggggccaggggagaagtttgcacatgtatacatgcacactcacacatcagcctttatacccttacaccgaattttttaaagaaatactagagtacacgttaaagaaattctacccatcgtttagctaaattcagataatacgacatattaacaaaataataataatttatggatacgtgttcttagtggcataaatgctaatgtaaaaaaataaacctctatgaaaaactttaaaatcaaattttaaaatttgaaatttgaaatgctgtacagaggaaactacgatggggcctgagctatttcctgtatatgttttaacagctcatattattttgcatctacgcagtaacgcagacatgcacatgttttacggatgcaaactcaaccaagatattccttcgtgatctgttttgactgtttcacaagtactgtcagggcaaatgatatgtcgggaggagacacaatatatgcgccaaatacctccttagaagagaaccaaatacaacattcacccaacaatatcttgtttacgatggggattcaaaagtaggtccaccacttcatctcatgcatatcactgaagcaaatcagtttacaataggtttaagtgacaaatggtaagagacaagaagcctcatgactacggctcaagagtgtcacttagaacagtaaactatcaaatgtcaacagacaatttactccacctcttccaagaaatccttgatctctgccggggttagaactctgcattttgtacagaaagtaacttgtcagtaacttgttatggcatgttcacaagacagaagttgcattgcatatacgtggcagtaaaaaacagcttgatcaagtctgtatgacatacttgaattcacggtcagatcgaataactccaatttcaatattgttggctgagatttgaccctcatatctgcaacccccgaatcagtcagtaactcagtaaggatgttccggaaatagaaacagaagcacctacaagacatacccttctttcagagtcaaaatggcagtatggatggcatcatcaagctccatgtcttctgtgtatctgaaatgaggacataaagaggttgaacaacagtacaagtgcagtcatacaactttggaaagaagatatcctcgtaaacaaatccactttatttctgatcagattgaggaaaacagagtgtagtacaatacaatattagtggtatgctatgtaccttttttcaagaaatgtctttgcattggagacatttttccccatagctgatgctttccaggagaagtatgatcctgagggatcaacctgtagaaataatacagcacatctggcattataccaattttacaccataacaaaatatgacaaattgacaggtaaaatttcagtccagaagaacaaaactagcacaactaatagtggtgatctgctattagatgctttgtgcaaacaacactttgcagcttattattgagacaagggtcaacgtacacattaattttgaaacagttgcaacaaaaaagagcccctatcacgcagctatctgcatacctgatacagctgtgggccattgtcatcgtacccggcaatcaataatgatactccaaatggtcttacaccactgcaacaaacaagttggccgtgagtcatgcctcagaaattcggttacatcatatattcatatctttaaggagtgaactgtacttcaggattcaccaatcaacataagaaccaactaccacatagcatgtaatgtgatttataacaagatgtatgtcttaattattcctctgatgtttttttttcttttttgtttcaatgatgtcaaagtgaattataaaatgcaaatgactggaaaatcctatgtgttacaggtatgaaactacccaacttgcttggttacattagcaatttaattctcaatggcccaatttcaataaaattttatccatccagtgaaaatccaagtggaagttcacacagcagatcatatatattcttcccagcaggtcaattaacaagcttctgcatcaacacacatcaatgtgatgtacatgttgaaagttttcggtactgaacatctgaattatcgaatacaatattgaatgaatggtactgttaagttatagtaaaaatatcccacaaatatatccatacaaattaattaggtcgaacaagtgcaagaatatattatttaacaatatcattgatagaaatggaaaactctgaagtagcatacccagactgtgtgaactcctgcataacagcagcagtttctcggacaagctgagtaacagggatagtttcctgcattagaaaaaggaagaacaatcatgagaaataagtaaatgatggaaaagatcatgactgtcgtacatgaaaaattgcatgctatccgaaatagcaatttattgaaaaatatatgtctttacaaaacatacaatagttatctgaagtataaatcaaatgaactgtaaaaaaccaccttgtacaaccgataatactgctgtgcttgtttccgactttttctcacaagaacacggaaatcgggacccatcccactgaaagaagtgcacaggtaagtaaacatgtattattgaattgcaactgatattaacagcagcaagctgagagatgtaacaaactaacaaataatttaaagacagaatgcagctgttctctcagaccactgtacaaggctgcagatggattgaagaactattttttatgctttagtccagtgaatagataaactataaataccttacaagctaatcaacaaaaatccagagatctgcatgctcattcaccaagttgcctcaaatgtctagatatggatttccaaagttactgcaatctgatgtgcatataactataagacacagtaaaataccaatgcacttatcctcttgcaaagtttggagagcaagatagatatttttaatttgtgcctttttagggaagattaatatgtgcaaatttctcagggcgaactgtgtcacttgttcactaaaaccaggcggttcaaaccaattatttatattaccattatattcttacacaatagctcatctgtgaactatgtactgctaaaattgtagaagcttacagcacagctagtgctcatataaaggatcaagaacataactaatagaataacaagttggaataactcacaatagcatgtacatgacaaccataatatatacaaaatagaaatgtattccaacaatgaagccaatgtaaaaggttacctgtagacaactccaatgttcggagtcaatgactgaatcttttgcacctgaatttgcatataactatgtattagtgcttctgagaaacaaacaacgaatagcatgtcgcaactcactaaaagaggaattcagcattaagagtgatgttagacttacagatgtttcatcgactaaaatagaaggcaatttcttctcagtggcgataactacaccattagcagctgcaaacataacaaatatacctcagaatcaataaactaggctaaaagggaactgaagagaatcaacagactgtagtctctgagcagtaactacacaaaaacatatgatagaacaatctggtaaaaacatatgcagtatgttctacaccacaaatttattacatacaacaattacatctatcagcgtgaagaacgcatgtcaaatagtttctttcaatttttcatacaccaaaacaaaattcatgggctaaaaccccaagactttaaattgcataaatactgacaagtggcaacaaaagctgattttaagggtatgtaaacctaccagtaaggtggacgttgacagggcaaacaaattagaattttgcactgatactaaaatgggcttccaaaccctaataggcactagatcagactgcacacacatacaactactaatgggaaaactaggtcagcatatacattcaacgccgtaaattggcatagaaaacttcatcatcacagatgaaaccaagcagcttgtatttcttatgtggttataaaggggagcacttgccattgctgttacaagacatacatttatgtagattaataatgattttccatggaatccacaagcatttgtaagcgaaaacgaagcaaacattacaaaattcccaagtatcactaaagcagaatagcagatgcaagtaacatggcacctattagtaacctaagccgtagcaaacttcacactccaggtctccagaacaaataaaagctctgcaacgacctaaagttatgcgaaaagtgcaaaatccccaacaagcgccacttcgtcatgtgaaccgaaccagccaaaatctcaaacctcccctccccttctcgattctcataacgcaatagaagtatagagaagggattgcttcacgggacgcacctttgatcccgagggacgtctggccggatccgaccgcggtgagcgcgtgctcgatctgcaccagcttccccgacgggctgcaaacgaaatcgccacaaaaaccacagatgacgaaaccgaaaccgcaccagatcacgcccgatctccgggcgagggaggcgcaaggcagcacatacctgaaggtggtgagggagaaggagtactggctgtctcccatggccgccgacgcgcaggcctacctgtgagctgctgctcttcgtgtctcgcggcggaagaggaggcgaccgagcgagcgattgcggcgagacggcgtgggaagggagagggaggcagagcacaactcgccaaggaagaagaggagagagagaaagagactggatggatggattgctccgcaagaaggtggtgggtcttgggccggaaatctggcccatctgttattgggtcagcccatgactcacccacctccccgtcacgtcgtcttcctcctcataacttcttccccacgggccaacggctgcgcgtcttcccgttcgtcctcctgtccggtccgagtccctctgacgacgcgactttccccacgccgggatcgagctccggggaggggagctgcgagctggtacgtacgcttgatttcttcccttgccaccgcgatattccgatgtatccgtgatgtgtcgttcatgggtagatcggctagggatttggcggcgttgaggaaagcgatggctgccgggtggggggaattgttgtattagactctcgaagctgatatctggtgtggatttgcggtggaagccatggtcggaggcccagtgccttccgggagttgttgggttatcgggagcccggagggcagtgcggctcgccgactgctgccatgatccccgtcggcaaaatctccagattgggggagatggggggtaggaaccatttggattagtagtgtatacacggggtttcgtttattatatttagagcgctctacatgtagacagcacacagcagctttaacgtatggatggtgtatcgcagggaatgtatctcgaagacattggattaggctattattacatttagagaaccagattgggtttgcgataactagaaattgagtctgttatgaatttattgatggagcggacagggaattacgattactatctgtttagcttttcagttgtgaatgatgattatttcaatttagctaatcaaggttcctcaatcaaaccgttctaactttttctatttatgctcttggttacattttgacagaaacactttgtcatatcagtcaacagtagagaggagaccagatgcaggtcagttctaattcatctttggttgcacatttcttgtatagttagttaggtatgtaatgtgatggccaactcttaatcaactaattattcgggttatgttttactggtctcactgagacgtccatgctaaggtggtaacatttaataggacaatccacatttggcagcaataactgtactcatcttttcctttagtaaacggtttggcgcctagtatagggctcgcgtgtttgcatggaagagttggcactcggtagttggagagctttgccgacggttaccaatgtgaccagtactggtttttgtacacccatactttcttgtcgtcatacactagcaaaagtttgtgtacatcccttacttttactaatggctcaattatataacttgatttacttcactacaataaaacttataaatgtttggaagatcatgtccaagagactttcagtattattgttaactggaatgagcttaactactactccctccgtttcacaatataagtcattctagcatttcccacatttatattgatgttaatgaatctaggcatatctatctatctagattcattaacattaatatgaatgtgggaaatgctagaatgacttacattgtgaaacggaggaagtatgtgaattgctcctttagtttggttcctaacatgctatctgaatgtcttcaaaatattttctatcgaaaggcatctagagctaggctctttaaggagtataaggaggtgcagcgagaaaagtcagctgatccagatatccagttaatctgcgatgattcaaacatattcaagtggactgctcttatcaaggtggtttttatattgcaacttgcaaggtgatgctagaaacagcaatataagtttttaactaatgccttttctgattgtatatgttgttagggcccttcggagacaccttttgaaggtggtgtatttcaacttgcattctctattcctgagcaataccctctccttcctccgcaagttcgcttcttgaccaaaattttccacccgaatgtgcatttcaaggttacttctgcattgccttctctgcgtacattttactttaggaaatttgacctatttgaaggcatttgtctctttcaagtgttggtgagaatgtaaatatgaagttgctgtcatcttcttcattttatcaggttttcctgtaacaatctgaatgtactaacatgacagaatttactgtgtagactcaactgtgctcttcctgttattgtttttgtcaagtcgcttctatattgttacatctgaattaacagaattgaaggagtaatttcagttatcattctttttaccttgtttgtgtttccagacaggtgagatttgcctggatatcttgaagaatgcgtggagcccagcatggacactacaatccgtttgtagagccataattgcattgatggcccatcctgaaccagacagtccacttaactgtgactcaggtagctccaccttcctactaattctgccacatatagttcagccattattttgtaatgtgaaagtaatagatgttcatgctctcactgaatcaagctatggtgcatgaagatttccatcttcgaggcctcaaccactccatgatgtgatctttttggagtagtttgagacatgaaaatatttggttctaattattgtcacatggtacattagccagttaaaaaatatggagaaaaacttggctatttactctaatggagcccctctatataaccaaaggaattacgtgataattgatatggtcagactccagtatcaccgttgtcctaggcgagggccaatgagtcccaggacgaggctgagtccacctcgggtggcgggtgtgcttgggatgctgattagattagttcgttacattgaaatagtatatctttccaattgttatctcttcccagttagagtccaacttgtaagggccattaaaaggtgtttgctacatcatcgcgagtttcaagttccttgtcctcattctttttatgcctcatagttccatgccgcctactctcctgggaagcctcatcatccacatgtcctaatcttccgcacacaacagaagaaactgatttatgtagttacaatatttaattttgaggcggtcagagaaaccattcctgctgatccattttacgcaatatggattgaataattgccttgtaaatatttcattgttggttattagcatttatactaatgagctaagatgtgcagtgtcacttatattgtatagttcctcattatgaattagaatgtaattttcccagtaaatttgtattggtcccattcaccgcctcacggtttatgtttgagattttttcagatggcactttggtcacattgcatccaaaatatgattatcataggtcaaaattatgaattactgtatttgataacttagggagctcttgtgtaatttcatcatctgatgatcatatacagtttgtcgcttcaagcattttgcaagtccgatttctgattgattatatagcggtttaaattactttttcatactttttacttggttgtttgaaaagaggcctgctgtgatattttaatccttatcttagtttctgctaattttcttccgtaaatataggcaacctcctgcgctcaggcgacatcagaggctatcaatccatggcaagaatgtatactaggttggctgccatgccaaagaaaggttaactccagggtgcaaaaggaaatatgcgccaagcgaaggcatggctgattcatgtgatttgctctgttaagtgtaactcttactgtcaccatgtgaacatctggtacttattttcttacctcactcttatggatgtatgccctggagtgaagagaagaaaaacatgcattgtaatgcttggtctatatgatgtcataaatataactgggttcggtacttctaatgcactgtccattgttcaattacttctcctctttttcctgtccggataaaagaagaatacttgtcctgtatgtttctgaaatcgccatacggctcctataaaacgccaggttagagccgcactactctaatcttctatgatgctgtcacgccgagaattcctttcatatttgctggtgttcagtttaattaacgccgcacacatacagatcacccgttgttgtattgcgagcatcgaaatcaatcaacactatatatgattttattgttatcgattgttccaatcgaatttccactgtgttacatgacttggagtcttggaccaaagaaaagaaaatttcctgatcagttggtatcgctggaaaacaacctagtgggcgcacgacgcccgttcctcgccatcgttgaagaaggcagactgcatgcgagcgactaggggaacgccgtcggaggcatcttcttgtcagccaagaagtggctgaagaggctgagcgcctgcctcggcgcgtgcaggggaacctcgtgcccggcgccgcggatcgtcacgaacgtcaggccctcgtagaggatcgtccatcctccaacctgcataaatggttcagtttgatgctcacaacgacctgtttctgaatatttctttgttgtaggatggtttaattacctgctgatggtcgtaccacggcgtccactcctgcaccgtcttcagcccaagcttgttcagggtgagcctcgtcgacgtcacggggatccttccatcggtgtcaccgctgcacccagtgaaactcattgtcagctcaattcaaacgccatgcatctattgctgtgtacacgttgttcagacatgctgaagtatactacaaggatgtttttttcacctgaaaacccagaccctgatgccgccggcgacgagcttacggatgatggggagagtcgagaagggagcatctctccacttgccgatcacgtcgctgcaacaaacacaccgtcacaaaacgattctgtcaactcaaagcttcaaagactcaaaagagaacagaggttgcaaacgcttattgtttgcacctgcagtgcgtccagttgtagccgatattggtcacgttggcgtgcagcgcctcctgcacgtcagcccggttgaagtacacctcggcgtgatccgacgtgcacggatcgtaccccgccggcctcatgtaccacccatgctgttacaaaatgacaccaaaaaaaaatcatgttgtttcttctctctgaaaaaatgtgatcgttctgtgtgccgatgagttgcctacgcacgtatttggagaagatttttggggcggcgccgtggacggcgacctggcgctggccgaacgccgccgacgacgagacctcggtgcagacgggggtgtagaggctgtacatgtcgatgaggcggtacacggcgaagtactcggtgagcgcgctgtcgcacgcgtcggtcacgttctccatgctgaagttgcagtacttcttgacgtcggcgtacacccggtccgagatgacggcgtggtcccaggcgtagtcgatcatgcccgtctggtccgtctcgtcgtccatcagggcattccctatctgcgtcagagtaatgagacgacgtgatcgaagaaataaaattgtatgagatcagtattagttcgaggcagaattgtgtagctaccatgaaacccttgaagttgatgtagttctccttggggccttgcttgttgccgtcgaaaatcttctccgaaagctgtggaacgtaatgccctgacaataacgcaatccgggaataatgagctcgcatcacgattttttcagaagctagatgctgaagtgtgtatgtgtatcagttcagttaccagcgtagctctctccagcgatgtagaagtcgtgagatttgtactgagggaagcgcttgaaccagttgagcaggaagatgtaagcatcatcagctgcgtgcatggcaatccgagttcagatactgtttggatcatccaaaattgaccccttttttttatcagagtattctgttgttgatgtagaggttaatttaccggtgatcttgtcgccaagctgctgcagatcggagcttgtgttagtgtatgagaagccgacacccacaggggactccaggaacatcagattggcctctgcagatttttaacagtgaacattcagttgtgccaaaaaaaaaaactctgaacccctgttcattgcgaggagtcagtgacagactaacagaatgcagggtttggcatgaacaagcagtacgtgcctttgttccacgagtacttgttccattttagctccggcttgcccttctgcaccaagaatggaccgagctcctccgcttctccatacccaacagacgaacacccaggccctgcagcaaaaacagcaacatttgtcatcctaactcaaacactcagtacacactcctgacgaagaattacacacagggtttttaagctactagctcataatcacgaacgaaaagagagaaaaaaaaaagaaacttcacatgcatggtgaacgtcgaccgttaaaacgttgcagagaccagtagatcagtcgtgtccatcccgcgcgagagacaacgacgcgatcacgagcacgagtacgacacggcacgggtcgccatccagtcataggccacaccacagcggaagcagcagcagccagctagcttagctaatggaccgaattattcgcgcatttctaacgagaaaccgagcttagacacagctcactttcgcgctcccgatccctttccggcgtcctgcctgcctgcacgtgaacgtgatccatctcattcgaccagttcacggcgtgcatgggtgactccgcgcgcggcacagtacgcagccacgcgcgcgcccggtgagatccagcaccgggccaccggcacaggcgcgcacagccgtggcccccgtgggcgctcgcgtaccgtcgtttcagatattttccccggccggcaaggcaggcagggaaggcaggcagcggcagtagtagcttcgatccgttccgtggtggggcgcgcccgcgggttgggctcgatcgggcacgcgaggtggtggccgtgtcacgacgcgcggccggtggtggcgcatgcttttgcttagctggtccccgcccgtgtagcatgcagcagtggccagcggtgtgtagtagcgtacgcctccgcctcagcgcgccactgctcgctatagaagtagcgatgattggtggccggtggcccggtgtgcgcgtccgtcctcctcggtcgcgcgtgaaagcggcgccataccgaccgacccgctttgtttcttgtctccatgtacatgatactacgtggaccgttggtgatacggtgcgtgcgtgcgtgcgtgcggccgtgcgctagcgagcacccccgtgcagtcgtgctccgtatgcctttccgggtcgatgggtacgtacgcgtagtgcggttccaacttccatataggcagaaacagaaggcgacgacgagtgaacttttctacccttttactcttttagtctctggaagcttgctctgagctatatatgtgggtaaaagggaatcggcggcaccaacagctgacggttgttcgtttttcacgtgtacgtttccaaactatatgtacatttttaaaaatattttctgtagaaaagttatttaaaaaaattacgttaattcatttgttaagtttgttttaactaatccttaattattatacgctaatggatcgtttcatattacgtgcgaagagatggaggttgccccaaccttcacctctaaacacagccaacctctttgttgacctttagaattttaagaagtaattggtaaaaaaatttagctggtgagaatctagaaaagctataaattctatctatttattttctaaattatataactacatatttttaaaacctagataaaaattagactatttatgaaaagttttagttttgaaagaaaccgtagctaccataaattcctaaaacaagacctaaacaagcttgttttggtctcctctaaaaatattaaataataggttaatactgcacacaacagggccaagtttcctttaaaaaaaagaacaacaacaacaagaagaagagagcgcaagaacagtaagtgtctctcctaaccactaatcggactttgtcggatggtgtgtaattgttctttcctaacaaatcccaactaacaaccataactacatagaattttcaacgttactaggttctgactgacatatcacagatgcttcgacgccttctgattgagtgcaaccaaaaaactcaactgatgcaagcaagcaaaatgatataagcccccagaccacctctgccactttgcttcagatgctggcaaaaaccgcgcggcttaattcagatcccgatgaggatgtgaattgtgccggaagatcagcttatcgccgggaaacggacacccgcgaggccccattggctgcgtggatctccctttgttcccggagcaagctagctgctagcctggctcgtgttgaccatgccaagcaggattggctatccctctggttgctaccagcaaccagtccaaatgcagaaatccagcagcatttcgttctctagctgctgctgcagctagctcgcatggatcgcgcccatccttctcgatcgaacgggggtattcatgcagtccatatcgtggggggtccccgggcggcttgtcttggaccagctgctaggagagtacgatatgctcttggctggacagcaaatccgtctggctagcgagctagctcatcgatcaagcggatggattcaccggtacgttcgtgaggatgagcaggccacagtgacagtggtggacctcgtcagacttgttctgtgctaacttgaacgtgtatttggctaatttttcaaattggaggtgaatggggctcggtctgtagtataattgaactgggacaaacactgaactcaattcaaaacttaatcctgccttctctatctagtagattaacttatctcatatagcaaaaaactgaggcaccacaaattatactctggaccgtgcaaactttctcctaaagagaacaaactagctagttactttccaacccttcaattttccaactcttcgtctccggcgctttcgactgggacggcgcctcagagcagctacatatgtatgtgtcctctagttgtgttttgttactctcgttctgatttttttctaaagagaaacacggagatgagatgttgacatatgcaacgaataattacaatatgcgctgttggatgagattcattcggatagagtgaacattggagggtttcaggctgagtttgagaaagaggagatagagaagattgggaagatacgtaaaacgaggtgagctattagtgcatgattaattgagtattaattatttcaatttcaaaaatggactaatataattttttaaagcaactttcctatagaaaatttttataaaaaatacaccgtttaatagtttaagaagcgtgacgcggaaaaaaatgtgcattctatctccaatctcccagaacgaacgctgcctcaatcacaggtttttggaagccgttcaggggaacgcccggttttggcctcctaaactagttttagcatctgaaccgttatggtgcagacaatgattttcttttcagattttctgatagtaattttatttttgaagagttttagacaataaattttttgagacaatttacatttttttaaaaaaaggataaaaaagatgaattacatcaccagcctctgcaactaagatacacagccaattgaaggcgacgagttgtagactaactaactaatatttctttttgttacgtaggcttcaatttgcacaggaatattctggccagtttttgtgagcaatagccaattctgaatccggtgatcactgacaatggcgtacctggctcaaagctacggccggagctgggttacgcgtgtggctgaatattgtttggcaatgttatgcaagttggtcaaataaatgtgataagtcgactgtacattagccattgaaagagactctacgcaattaaggtgtactcttttcgttctaaaatataagagattttgggtgaataagatatattctagtattacgaatctgaataggctctctgtccatattcataatattatcatgtgtctcatccaaccaaaatcttttatatattttaagatggagggagtaggagtatgtgactaaagtaggtacttcacttgagttagttataatagcatacagactattactccatgaaactgccaatagtgaattatgctagctggaggacaaccatttgatgggatagcagatggctcctcttttcgcttgaaatgctgattaattgattggttagttgggcatggtgattgtactatgatagacacttgaaacatgcattcacttacgacatgtcacaattcacacatactgatattgtcatctctacccgagcctcttaatcactacgatatcatcaatgtatatatacttcaaaacattaaagaagaaatgtctagtttgagttttagaggtaacgagaagatcacatcttaggattagtcgattagatcattcccagcaacatttttatagaaaacccagtatcatttttgtgctccagaaaacctttaacacccagcgattttaagttcttagggtaattttatcatccttaaaaagatactagacgtactactctttttagtataaaatttgctgtaaaatcttcgtacctccagatactttctcaagaagtaaaaaaattctctcttacgtaaggtaaaaaggtatcatactttttaatattaaagatacctggcacacaaaatttcgcactaaaaataattttagaacatttcggaacttcgaattttccttaaaacactccgttagaaaaaagtgagatcgccattctatcttcattcgtaattaacatcaatataaatataagaaatgttagaatgacttaaattgtgaaacagagggagtgattaataccgagttaatgcgcacacaaattttgtggagcaaaggcaaatggcagttggtggtagaagtggttaattgtgtgtcgagtgctagtattacgtaccgccgttgagccagaggacgaggggcttcttgtcggcggcggcggtggcctcgaagaaccagtagaagagcgcgcggccgtgcgtctcgttcaccgtcacgtacccggcgtactgcgcgaaccgcacggcgggttgccccggcagcctcgtcacgcggtcggcctcctgctgccgcgcggcctccgcgtccagctgaggcgagccgccagcggccgcggcgcagagcgagagcaacgcgagcgcgaggaaggaggaggagacggcggcagcggtagcgccggccattgttgtgtgtggcgcgctgtatagctggtgcctaccgtaccgcgcgctagctgctgccggtgcatcgtcctcggcggattatatatagagagagcaggagcagtgagcacagtttgataatgacaaaatttactaaatacattgtttactatcgacaaaatttgatcaaataacctctttgtgatcgcattgacgacataggaaaaatcctcaattctaacggaggtatatgaccaaatatttaatatactgtaattggaataatattgcaaccgtatcctgcttacggctactccagtagagtttacatagccgaggtgataagtggagcgcttctaaattataaatgaccattcctcaatcctaggatatatgatactccattcgtcccatcttaaatataactattgttttctgcgtctaattttaattgtttatcttattttttttaaaaaaaaattaaaacataagttacgagtaaaatactattgatttttatcatctcataaaaaatactgattataatattttttaaataagacggacgatcaagttgaacacggaaactcatatttacatttaaaatagaacggagggagtagtacaggatgtttgtctgacacaccaacagaatttgggagaaaacgagaaagcaaatctaaaaattaaggcctgggtatgcatgtacgacacatatacacgtaaatggtgccgtatctaaaaatactaatcgaatgaaattgctcccaatcagaaaaaaatacaaaagttggtttattgaggacaacggatcgaaatacatactatgtgtttggtttatttaaactttagtctaatactcaaattaaaaatatcccaatgcttggacttcctgaaactcaattcaaaattgtgtttggtttgaccgagcaggaattttagaagatttttagttgctataattaaaaatacccctatgtttggttttatgtactcttgtgctcactctggttataaatatttagtgtttataacaaagttcgctcatacctttaaaattccgaacaccaataatttctcacatgcttaaatttaaaaactaaataaatggtttaaggttgttattgaatgttcatactaaatatttgttggtgctatctatactacttataaaataacaagttttatacttgattttcatacattttaattctttttttgcgaggtcatattttatttatgtcacactggagtgtcttttttttgctttgattgtcactagttaaagccctttaatgagtacatatcattatttgctttgattgtcaaatactctgtttcatgttgttattgtactctacgtatgatgctcgctgcagttaatcacatactaaattcgttgctgatacgctttttttttctccagagagaatcacatgcagtgctttttcagtaatttgagatatcacagcattttttttatctcgtactgcaaagcaactattgagtggcaagcaaaaattgttcataacttgttttgagggcagtacatattcgaagctgtcatgcagatatcttccgtgcttgtttactaacttcaggagatcataaaagcagtctctgaacttgacgttttgtgggtggatttagcgtgtgcagctaacgagtaagaactgagatcagtgttttttttttctgtgtacaacatgccaaaacattgcatggatgacggaaagaacagtattattttgagattcgaagttctggatgaactttgcgccggcctgacagagctttgccggacaactttggtcttggcttcgtcgttcaaaaaaaaactttggtcttggcttcgctttttgtttcaacttaaattttaagctaaattacagtaagaaggtgtgcgtgtgcgcagtatgctactacatcgttttgtccgtttggaaattacagagaatgcacttccaagctccaggaatcgattcggcatttcggccggcacatgtctttcctgaatgtttttgttttgccaaaactttttttttacagaaaattcgctccctgcaatttaggcaatttggtaaatcttgtactaagacaagcaagtcaggatgcttaattttagagttaattttgatgtttaatttactttttttattggtttttaataagtcgctaaaaacatatatatatatatatatatatatatatatatatatatatatatatatatatatatatatatatatatatatatatatatatatatatatataagttacattgataagtcatttttttccattaataagtgtgacggctgatagaaaacgatggagctgttaactgtcaaacttgtattgggaagagtagggccgcatataaaaaaaaattcctaagttatcaccagaaagatgggctatcaagattcaagcaggaagcaaattctgatttggtcaacagaatgtgtttttattctatgtgattagattgaatacatctctctctctcgtattccgtgcaaaggatgatgatattattttttttaaaaaagagagaagtactataattctagatttcttaagatactgcaaataaatatttcttcacaatgtttgtacttcaaaaaaaaaaaaactccacgatgataacctaagaattgcacatatagcgacatcatcactgaaaatgtagcagtttcagttgtgacttgtgggcacaaaccaaaccattcttaaacttaataatgaagcaaaatgtgatttggcctgaatatgtttgttctagatggttaaattcaatactatatctcaaaatgtaggcggtacaagtctactttttatatttgacaattaatacacgtggaaaacatgtaatttggttacatagaaatagtattggccatcattttttttcttgagtaatacttatataccttaatatgctattataaattgtacttctaaaacttcgacaaaaatctaaaacatcctattatttgtaacaggtgaagttcagcaattaaaaacatcccttatgctcgaagcatcaggattctttagtatgttttaaagaaaagttcaagtaagaaattagatattcaaggaagagaaggcacgttaaactaacaagtcaacagctcatctcatatgccggaccatttaggcctggtttaattcccaattttttttccaaaaacgttacattaaatctttgaacacatgcatgtagcattaaatatagatataaacaaaaactaattgcatagtttgtatggaaatcgtgagacgaatcttttaagtctaattagttcatcattagctataagtgctatagtaacccatatgtgctaatgatggtttaattaggctcaaaagattcgtctcgcggtttccaggcgagttatgaaattagttttttcattcgtgtcaaaaaccccttccaacatccggtcaaacatccgatgtgacatctaaaaatttttttttcgcgaattaaacaaggcctgaatcaatcatgatcgtcatcccctcaagaaatctcattagttgttgtcagtatattgcaatatcaagctttgatcaggtggagacaaactccgaccgaaactaatccccaaacactagctttagtacaataatgtgtctcgttgtgctgttgctaacctattttatgtcaacacgttgcgacaaactgacagcaagcttgcttgttctctcaataatttggttttttgttccattcccaaatgagttggcaacttaattaactcgcaggaggatagatacttcctgtaatgataaacttgatttgatgctcttcatcaattgaatattcagctccaacagaaaatgaatattcactattcagcatgttgccaccaatctgaacaagtgatgctcgatgtgaaagcgaaggcacaattgcaaccccaaaataccggggaacaacacaagatttaatcctggagatcataaaatacattggccagctaacttggtggatagtcttcctccgagcaaaatcaaaatcttaaggcttcccggagtaaccatttgaccaaagtacatttcttatcatcttagcaaagaacagtgtgttctttcagaatcgattgagatagcaccagtcaccaggcaagcatattccaaggagatgagcagaaacacgtccatctgcagacagcaatacagcatggttcaatggagtgcatagtcagcagtcaacttgcatacatgacattcagtgaagcgggaatttcacggaagaacgggtaatgcggcaaagaaggcacaattagataaactttggccatgcactatagcatgagttcagttcaggacagatgagcaccacaatactggatacccatcatgatattgagcaacttgaagcagccctaccagcactactactactactactactctatatgacgatcatctcaaaggaaatcactagataagaaataaaagctgtatttgctcatctttcatgtttcagatgtatggatggctatagcaccactgcaccaatgaactaatatttgcttggcaaatgatcaagaaaatcaaactatcaaactactattggactctatgccatgatattctaatcttgaaatgccaaaactagctggcgaacattctaggacaactctagtacttgacagtcagattaaaaggtaaatcaattcaataaggaaataagttttgtacttgttacatataagaaaacaacgaaaggcaggcagcaaaaatgtcaggattcccttttctatgcacaaccatatgatagtacttatttagcaaccgtaatgatatatccataaccattgatgaattatttccccgtaagaatattgggattaagaacacatagttcccaggactaatgaccatgtaactggtagtttggtactcatattttttatgcattacaaaagccttgtgagaagagtatagaacaggcactctaccaaaatggtaattaagatcaaggactccagatgagcataataaaattgccatctcacttcagaagctaaatcactcccagttgcaatttgccgatcgacaccgggacaaaaataattgttagaaagcaatgcaggaagaattgttacaggctcacagctaagatgtgcaaaactagctccatcgtctcttatcctcttcttcatcaactgggatataccactctggtcgcttcttcgagttgctgtaccggtagttcaggaagagctcttcatcacatatggaccttgtactcaccagcactagagtcttcagaactggagactccccttcctgattaccagaacgtccagacttgaaccagaatgaaccaaatcgtttcattgtaacgggctcttcttcaccaccaaaagtaatgttagggatgtagactctcatgtccttctctgtcaatggaaaatcatatgggcagatcatgacattgggagttgacccttttggtggatggtttgcaaagtgaccaaaagcgagtgggtttcgtcgttcaagcacttccccaaaattttcagtgtgacccttcttcagaggcttgctgagcatcctccatgccctatcagagttgctctcttggcttttggatggcactgcattgtaatccaccaaatctgagccatcccatatttctctgctatcaccacctaattgccatggtttggcatcaattattgttccatcataccttgtgatcagatagttgttgcacgcgtcgatttttgggtatccagggatatatcgataataagcaggtgaatatacaactccagggtagatggctaggacagcaccagcattagtttctccagataagaacagaccttgccctgcatctttgtgagggatttgtgacggcctgatgtcaagggtgtattgaaagtgatccctaaatttatttgacaattcagcgcgatttaaaggcctagtagaagggacatctgcactgcagagtaaatggatcagaact

SEQ ID NO: 27118 - DNA, 9728 bp, Oryza sativa
agctacacatcatacacagaaaaacacaatattgcacaatctagagatgccgtagactcgaatagtcattttccatgtaaatatgatattataattaactcatgcgtaggctaatgtagcaatagggatatggacattgtcaaaagtggtttaaaagaaggttaattatgatgatatgtggtaactggagcacgacctaatttacggtgatcatccataacttaacattgacaattactcttaccgacaataaaaaaaggttcatgactaatgaaatactaccagatttgagtattgtactgcacaagctggtgtacttgcacgacacaaacttgttttcagataaatatcccatactgcaatacttttgaatacatatttttgtaaatggagatgtcattggagcggtccgaagaactatgatgacatggtaactcaagtacgacctaatttacagtgatcatccataacttaacattgacaatcaatcttacggtcttaccaacactaaaaaggctcatggtgaaatgaaatgctaccatatttgagtatttgacatgggacaccccataccaacttgtttttagggggaaaataaatatttaggactggttttgtctggggcttgaccttaacaatttttgctaatgttaaatttcggcatagcctcttttgacaatgtaatactattaaaaataccaaatatttgtaaggccaatttaggccacaaatgaaaccaacctgaatctcttttattaatatattcttattctatatcctttataaatgaatttccctaaaaaattagccccaatcctatatgcttaatccataaattattctaaccatcaactaaaaaaaccctaaaaaagtttattcttgcaattgctcatgataccctcttgtagctcataggtatattttttctaaagttcaatattgtcgacgagtgatactcgcggaccggatgagtagagtattggggtacgttggaacgagggtttacatagtacgacatcaaagcagacaaaaggcaaggattatactggttcagacccttatcaggtaatagccctagtccagtttatatgggattgatgatgatgagaacagattacaaagagagtagtcaaaacagatgataccgacgagatcgtagtcgagggtttcgacgagatctctcggcaagttggctccgcgtactccagcttcgtaagctttggtgggtgtgttggcgaagagattctgatccgaacctctcccaaggggtccccttttataccgtgagtcatcttgatccccaagaaaggttttgaggatatcggacctgggacggtctaacggaaactttatcccttacgagtagaactttataaatcacttgactcgtaaagatattttccttaatttgaagtaacttccatacgacatatatgtaaataatccgtatacgtaaaggtataccatattggtatatttcacaagtcgcaggatagaaggtatgccttatccgtaaccctgacaaatatccctcttactaactagaaataaaataattagttcaaactcccaaaatggtgctatctatatagacactatatatattaccatttgcaaaaaaaaaaagaagaagaagaagaagaagaaaaatattcccttcatttttatctagttgacgcgggttagttccattttgcactaaccaacatcaaattttttaaaaaggagggattgtatattatcacaatagtttttaatacatacatgggaaaggccaaaagtcgcataacaacaaaagggtaaatgtgcttttcatcgaagaaaaagaagttcaaaatctacccttagtccaaatgatcatgacaaacaaaataggacataatccctgcggttccataattcttgacgtccttaccaataacacagggcatcattttttcgcttatgcttatatttatcagccaaaatttgaattttcaaccttaaatttggagctgattttaaggatttttttttatcgaagtttatttttcagcttttgcttttagatcgctaagaacgcacatataaaaattttattcacatactacttttcgtttgcaaatatgccatttcgcttattccgagaataagtgaaacaatggctccaatagtctttaaaatatatctttgattatgtttttatcttaaatatatatacatatataataaataaatataattttacttttatcataatatttttgaaaaataaatatctctatgtatattgttctattatatttataaactaaatacttttaaattatttgtacttctaattaaatttataaaagtttcacctcgaccgaattatgaaaccgttgcgagtataagagaaaacacaatcttaacaaaacattaagatgaaaaggatgaaacttttcatcttaaaaaaccgtgcacaaaacacaatcctaataagtacttcattcgttttatattataagactttctaccatttcttttatttatatagatgttaatgaatttatacgtaatatgaaacggaatgaagtagtaaaacattcagatgaaaaagatgaaacttttcatctgaaaaaccgtgcaccaccagatgagcctctgctttcagatctcaccaaccaaccaaaaaaaaaaatctcctctcttcttatataaataaggaactctcccaaacccctcttctccgtcctcctcctcctcctccctcgccgtccgccgccgccgctcgcttcctcccctctcccacggtaagcccgcgccgccgctctctccctctcctccgtcacccttcccttcctccgaatcggccgagtctgtcagcgacggagaccgcgccgggatccgtgcccattcgcgtagtagcggcgagcgacggttttttttttttttgcctgcaaagtcggtcgctttcgtgtggcgtcgggtcggggagaatggatcgatctgttcgtcttgatcggatggattgatcgatcaatcgatcttggtgggatccgatctgaatgaggtttttgggttaggaaatggagtgaaagattggactttttttttgtcggtgtgttgcacggttcgtttaggattggatctgtgttttcttccgtggaaaatcttccatttttcactgcaagtgcacatttgtggcctcttcagtacttgtgtttctaaacccgaggggtttttggatctgacaccgaggtttagtccgtgttgtcatatgttttttctcaaatctgttacgatattctcctattataaatgcattacggtgtactagaccctgtgatctgtggagtacatgttaaggtcgtgcttccagtaccatcgcatctactgtcatttggttgccatctcgtattatttggttaggaatttgcaattgcctgcatgctaataaatgaattgttgtttgtatggcatgccaaacaagatccaactactttgctgctggtgtgagagggacagtgtctcccaccaattgtagttggtcttatgtacccaccactttgggctgggtcctactacatgctagtgctggttggtggtgtacctaacccatatactagtatcagtttagtctattcttttagcaccactggatctggtgatatagccccatgtataggaatcaggaagattagtagaacagaaaacacaaaagtatgctttaatagttggatggcatatacctttattcggatcaccgttccaaatgtgacgttagtatccgttagtggcatgctttttaatctaacaaggcgttcttcatcgtgtggttagcatatggatatgtgtaatcttgttagctaaatcataattttcgtatgtattcacatgacatttcgatgaatcaaactgatcgtagtacaattgtttctatagaaagatggcgtctcacattgttggatacccccgcatgggccccaagagggagctcaagtttgccctggagtctttctgggatgggaagagcagcgctgaggatttggagaaggttgcgaccgacctcagggccagcatctggaagcaaatggctgacgctgggatcaagtatatccccagcaacaccttctcgtactatgatcaggttcttgacacgaccgccatgcttggtgctgtcccagagcgctactcatggaccggtggagagattgggttcagcacctacttctcgatggctaggggaaatgccactgtccctgctatggagatgaccaagtggtttgacaccaactagtaagtactttgcttccatttaagatgtctgacagtaaacattttatttaatttttatattcaacattttagctaactggtgctgtttacctttacagccactttatcgtccctgaacttggtcccaacaccaagttctcctactcttcccacaaggctgtgaatgaatacaaggaggccaaggcggtaagataatagaattatatctttacatctctgtctgcttaatgattttttttctctgcctgactagatgtcgctagcacattgcttaatgtcatcaatatcctagttcataaagttatttattagtttattttgttgccttttgttatgatgctaattcaaacatcaagttttagtagtgatcaattgtttcttagttgtgcatttatataataattttgtttagaaaagaatctgatgtagattaagtgctggcttgtaaattatgttttggaagattgtcacttccacagattaatggcctgtaaatgacaagcccaccaagtcagttcgtttctttagtgctgtattaatacggccaaacaaattttggccccttgcttagaattttgaatgtagcactttcagattgactatgactagagttcactttaaaggttatgaaataatttttttgcactatatgttgttttcatcttttttcaaaaagctgcccatgttgatctgtggcaatattttttttttctaatttcacatattctttattggtgattggtgaatttacctgaaaagttctttgattaaatatgttatcttgttccagtttgtgaatagtggcactgctgtttcaagcatcaaattctgaattttgttgtagtcctgaaatgaaaatcacagtgccctatttattaagatgtaatctggttgccttaatgtctcctatgtaattgttcttcatgcagctcggcgttgacaccgtgccagtacttgttggaccagtttcatacttgttgctctccaagcctgccaagggtgtagagaagtcgttcgctcttctttcccttctcagcagcatccttcctgtctacaagtaagtgtacaaacaagtctataactactgctagcgctaaatcttcagttcataatttgatgcatgatgatttgtagggaggttattgctgagttgaaggcagctggtgctacatggattcagtttgatgagcccacacttgttcttgaccttgactctcaccaattggctgcattctctgcagcgtacacagaactcgagtcggcactttctggattgaatgtgcttattgagacatacttcgctgacattcctgctgaatcatacaagtatgtttatttcctctactatcgtatcattatcgaacctgcctttcctttatcattcttctttttatagtggcagaacactgaatactgccttttcactgcaggaccctcacatccctgaacagcgtgactgcttatggttttgaccttatccgtggttccaagactcttgaccttgtcaagagtgctggtttcccctctggcaagtacctctttgctggtgttgtggatggacgcaacatctgggctgatgatctcgccgcatctctcaccaccctcgagtctcttgaggctattgttggaaagggtaagcaattaagcatgaagttattatatatgttatattttaatgggcacaatttgcagtatccaataatatcctcaatttctgctcatccaacaatacctttcatttctgtagacaagcttgtggtctcgacttcctgctcactcatgcacaccgctgtggatcttgtaaatgagaccaagctcgatagcgagattaagtcatggcttgcttttgctgcccaaaaagtggttgaggtgaatgcccttgctaaggcattggctggacagaaggatgaggtatggtactcttttttgccctttatctattctcacctcttaattagagcctgagcatagtactcattactcaatagcatttgaagaaacttctgctcatttatacatttgtgaacaatattgtacaggcttactttgcagcaaacactgctgctcaggcctccaggaggtcatcacctcgtgtgacaaacgaggaagtccaaaaggctgtaagtaccttctgtttttaggctgcatgcttgattctattcaacataacttggcctgtttttcttaatatcatgttatattgcttgtgcaggctgctgctctgagggggtctgaccaccgccgtgctaccaatgttagcgctaggttggacgcacagcagaagaagctcaaccttccagtccttcctacaaccacaattggttcattcccacagactgtggagctcaggagagtccgccgtgagtacaaggctaaaaagtgcgtaacagtccacatcaacgcttcaccgttttcccccttttttttgtctatattgctaattacaattcctgctacaggatctctgaggatgagtacgtcagtgccatcaaggaggaaatcagcaaggttgttaagatccaggaagagcttgacattgatgtgcttgttcacggcgagcctgaggtcagtatcctcgtgtactacttgtgtttagtgtttattactagactttacacttggctgtttgagaaaacaatattattagatttattgactcattaacaaagtttggtttgttctgcattgaagtaagctaactggcatgtattttacagagaaacgatatggttgagtactttggtgagcagctttctggttttgcatttactgccaatggatgggtgcaatcctatggatcccggtgtgtcaagccaccaattatctatggtgatgtgagccgccccaacgccatgactgtgttctggtccaagatggcgcagagcatgacctctcgccccatgaagggaatgttgactggtcccgtcacaatccttaactggtcttttgtcaggaatgaccagccgaggtccgtgcctgttgttgatgatgcaatgctaattattcaggttgcgattgagctttctgttgaggctgacattttcacacttgctcaggtttgagacatgctaccagattgctcttgccatcaagaaggaggtcgaggaccttgaggctggtggtatacaggttggacctgttctataattttgttctcaagtgaatacgcaaaacatgatcatcttgcttacgtctttttaattgtcctttacaggtcatccaaatcgatgaggctgctttgagagaaggtctgcccctccgcaaggcggagcatgctttctacttggactgggctgttcactccttcagaatcacaaactgcggtgttcaggacaccacccaggtaatctttcttccatcagactgtcactgtaggctttcaatatcatcaccaatcttctgtaacttaaactgaacaactttctctcgacagattcacacccacatgtgctactctaacttcaacgacatcatccactccatcataaacatggacgccgatgtgatcaccatcgagaactcccggtccgacgagaagctgctctctgtcttccgcgagggtgtgaagtatggtgctggcattggtcctggtgtctacgacatccactcccccaggatcccgtccacggaggagattgcggaccgcatcaacaagatgcttgcggtgctcgacactaacattctctgggtgaaccctgactgcggtctcaagacccgcaagtacaccgaggtgaagcctgccctcaccaacatggttttggccgccaagctcatccgcacccagctcgctagcgcgaagtgaggatcgcctttgcagcaagttcccttcgattttgaggaggaatgccatcatagccatcttgtttttgaataatctgggtccagtggatccactgtctgtggttaggtttagtcagtctcttggggccaagatcactcatacccattttactttgaatgaatttggtggtttttgaggcagtctgtcggtgtatttgtattgtaaactgagtggaaatcagcagtgtttcatctacatctgagttgttgcggatcaaattacaaaattttcaaggagagttgatgttatgttctgccaagtacccaaggcttttgtctggttttcacccgagttgatagttttctgatgatttcttgctgtgttatcactttgcattcttttactcgtgcttatgtgctgttcatgatgatatataaatccaatcacttgaaagacttccatgttgggatttgaacacaaattggcttacttctgtaggcatattcaacaatagcaaactcttcatgttcattaggaaatgaaatggattgaaaatgtaacaaaagtatacttgcaattagtagtacattttggttattaatgtggtgtttcagtatacacatttgcaggtgttaatttacatgtaatcacattagcttaattacatatcattcacatttggcatctgtttggtcagagacacaagagtcaagagctcaaggtgcgccacacggatacgatgatcccgacgagcaccgccgccgccgccgccatgttcaccatcagcctcctctcctccgcctccctcctcccacctccgctcgccgtcgccgtcgccggcggccgctcctcctccgctgctgccgctccagctcgacccatttcttgcgcctccttctctctcttctcctctttcctcttctgcttcgaaagcggcgtagtcgccggtagccttggatcgccgccgtttgctgctggacttggcgcaggaagcggcggccgtggcgagtcttttgtgctcggcggcgacgaggatgtcggcttgccggcggcgggctttgctggttcaggggtgatagccggaggcggggtccaataccgctgtgacggttgctgcggcggcggcggcggcgatggcggcggtggctttggctttgttggttccggaggagtcactgccgttggagaccaataatcctctggcggcggtggcagcggcgatggcggcggcggcgagggctttggctcgagaacacgtggcatcttcaccggagctcgtggtggtggtggtggtggctgcggctttggctcgacaacggcaggggtgtcccccggagttcgtggtggtactgtaggcggcggcggcggcggagatggtggtggcaatgttggtggcggctgtggcttcggctgcacaacggggggcttcaccgacggtggacgtgtcggcggcggcggcggcggagatggtggttgcaatgatggtggcggctgtggcttcggctgcacaacggggggcttcaccgacggtggacgtggcggcgccggtggcggcggaggaggaggtggtggtggcaatgacggtggcggctggggtttcaccggaggtggacggtgcggcggctcaacgcgcgtacgagtacgaggaggcggcggcggcggcggcaccggcgacagagccggcggc

SEQ ID NO: 27119 - DNA, 11151 bp, Oryza sativa
gaaatctcctgacaaatttaaggaccgctggtgcattttactcctacaaaaaagtcagtctagtgatcacaaatccacttatactactacccaccatgcattgtgttcatcatttctgacagacaggcactggctcactagaattctcactcctgttaataaatcagaaacttaagttgcaaatggtggttccttcttgagatgatcatcttgatcttccagaagaacttgactggagaagagaagagacaaggtgttgatgatcctactgtaactcatggatcaggagaagatatatagtcacctgtgatagcttatctgaattacttactgcgtggttccaatctaacagtagcatctcctgatgttgagacctcgattagatggatggatgttgaggctaatagttgttcatccgtgtggtgccaatctgacagtagcatctcctggatgctcttgttcatggaatggcgtgtcgtccatgcattggtcaggcaatttgacaatttgttcatcgtctagcagagaggatatatggtcaggaaagagttgatgagataaaattgcagttcgagtacggttatactgccgtcttacctgatccaataattggatggagaatgttgtgccggtaagtaaacagtaacaagttgtgaattttcattatctgctagctagagtgtcagctctgaagaatatatcagcatatgtagaaacatgatgaacattagtttcagctgatttgttttcttgttactgtcatacatctctggtaataatagaaatgggataggttttccactctgtctgaaaaaaataattcagctgatattccaatctcactcacctcacctgctgaattcccatagccaaataaattgattccataccacctattataggggatagaaaggggagaggttttcctctctgtctggccaaaaaatatttcagctgatattccaatctaactcacctgctgaattcctatagccaaagaaattgatttattagacatactccctccgtttcgaaatgtttgacaccattgactttttatcacatgtttgaccgtttgtcttattcaaaaaatttaagtaattattaattcttttcctatcatttgattcattgttaaatatattttatgtaggcatataattttacatatctcataaaagtttttgaataagacgaacggtcaaacatgtgctaaaaagtcaacggtgtcaaacatttcgaaacggagggagtaccaattattgtatcttcagattagtgagctgcatcagaaagtagtatgcatgatggaatcagagaaacaggagtagcagctgcagcatctctcttccaaacctttaaatactaatccaacaatgttacttttgcttaccagataagttaacaccacaatgaattatcaaatcccaaatggtactgaatcaacacaatataatatggcatataagttgacacaaatgcaaacgaccaccacaaagtgataatttagtccaaagagaacataaaaaaggaagatgagaggaattcagaagaagagttttgagtcagtcagtatcaaggtcatgtgattgatgattcagcatcccttgaggctcagtggcctaatgagctgccacttgtcctaatgactccacattttcctgtcaatttccacactaactctgaaacaaagctcaaaacacagagcaaaaatcaaagaccaaaacttccatctttctctctagaccaaccaagaacactgcatttccagtaccaaaataaaacaagaaaaacaaagaaaactacttcctccgtttcagattataagatgttctgactttggtcaaagtcaaactgcttcaagtttaatcaagtctatagaaaaaaatagtaatattttcaatccaagctaattttattataaaaatatatttaattattaatttaataaaaaaactaatttgataatgtaaatattactatatttgtctataaactaagtcaaacttaaagcagcttgactttgatcaaagccaaaacatcttataacctgaaacgaagaaagtacaagacaactacaagttcccagctttctcttcccatttcgattgcggccatctatgccatcaaaatcgtcgtagcttcactactctctcccaatcatcactaagctccaacctcctctctgtcatctcccatggcggccttcttgcgaacgctgcaccggcgaagaacgcgcaatgccgccgccgccgcgttcttggctctcgccgtcgtcgtcgtcgtcttcttcttgtccgtgttcgtcgccacgcggaatgaggctgacatcttcttcagtggcgtcgcggcggcgagctcgtcgtcgccggattcctcgtccggtgggtgcagggagctgcaggcgctcgacggcgatggcgcgaggtgccggtatctgcgggcgcacgcgccgtgcgcgccggtggggtacgtggactacctccggctgctgtactgcgggttcgggcgggcgccatggctgggctacgcggcgctcgcgctgtggctgctcgtgctcttctacctcctcggcgacacggcgtcggcctacttctgcgcctcgctggaggggctctccgccgtgctccgcctgccgccggcgatcgccggcgtcacgctgctgtcgctcgggaacggcgcgcccgacgtgctctctagcgtcgtggcgttcgccgcgggggcacgcggcggcgacggcggcggcggcggaggggaggatgccggggatgttggcctcagcggcgtgctcggtggcgcgctgttcgtgtccaccgtcgtcgccggcgtggtcgctatcgtcgccgggcgtcgcggtggtggcgagccggtgatcatcgagcggcgcgggttcgtgcgcgacgtgtgcttcctcctcgtggcgctctgctacctcctcgccgtgctgctcaccggcgccgtcaccgtctggtccgccgcgtcgttcctctccctctacgccggctacgtcctcctcgtctggacctcgcactgctgcgccaacgcctccgacgaactcgaagtggacgacaccaagcagcccacctccgacctcgccgcgccgctcctcgtcgtcgacgacgacgacgcgtcaccgcctccactccccgtctcctcctcctccaagcccacctccgcgccgagaacgttcgcgcgccgcctcgtcgacctcctccactcgccgctctacctcccgcgacgcctcaccatcccggacatcgcggcgcaccggtggtcgaagcccaccgcggtggccaccgcgctcctctccccgctcctcctcgccgccaccaccgcgcccaccaccacagcgaccaccctcctcgccgccacgctcgcgggcgccctcctcgccgccgccgcggcggccaccacggacgccgcgtccccgcccaagagccgctcggcccgcctcccgtggctcgccggcgggttcctgatgtcggtgctctggtcgtacgtgctcgcgcgggagctcgtcgcgctgctggtctccatcggcgtggcggccggcgtggaggccggcgtgctgggcgcgacggtgctggcgtgggggaactcgctgggcgacctggtggcggacgtggcgctggcgacgcggcgcggcgacggcggcgccggggcgcagacggcggtggcggggtgctacgcggcgccggcgttcaacacggtggtggggctggggctgtcgctgacggtggcggccggggcgcggcacccggaggcgtacgcggtggagggcggggcggcggtgtacgtggcggtggggttcctggcggcggcgctggtgtgggcggtggcggtgctgccggcgagggggatgaggctggacgcggtgctcggggtgggcctcctcgtcatctacttcgtcttcctctgcgtcagcctcgccattctcacgccattgccttcaccacattaacttcatttttcttctttgcaaattgaattgcaaagatgatgatggtgatgatgctagattggttgggttggttggtgtcaagtgttaatttgggtgattagttattaattaattgcatggtattttgttcatgcagaattgggaagatgaaatgctttgtagtagtatatgacttgtcatgaaatgtaaatagaagagcacatatagatgcaatgaaataatgcatagtagtactagctttttcaccggaatggttgaatagtgagatgatttgtaataattattcgagcatatagatgaacaatttaaataccataaagttataaaaatgaatatgagatagtttgctatatatatatatatatatagttttttttttggaaaactacgttatttaaaagttcagaaaacgtgcgcattctattagtctgaaatatatacaaatttccgaaatgttttcttttctctgtgagtacgtactactgaactagtacagcatacagaatgtgtactctacagtgactgaagcgtgtagctcgatcaaacaatttgattagcggaatttcgtagtcattaaatttgtttttagtggctgggccacaataataatttgattttagttggacttgcagagtggagtccttgctgggcttcgttttctagttgcattacacgaacgtgtatgatacgatacgattgcctatttgccatgtgcttctcactctgatacgattcccatatctgacatctagtagtcatcaactatatctaatctcgtggttgtgacgattatattactggtaattagtgacttaagagctttgtaaattacttgacaacgaggcaccagtggtctagtggtagaatagtaccctgccacggtacggacccggtttcgattcccggctggtgcattttgttcttcttttatttttcacagtttttcaaattttggcctgattaaaaaagaaaatttttgggtgttacactatatgtcggaaagagtttttgacacgaatgaaaaaactaatttcataactcgctagaaaatcgcgagacgaatcttttgagcctaactaatttgtcattagcacatgcgggttactgtagcatttataactaatcatagactaattaggctcaaatgattcgtctcgcgatttcctctaactgtgtaattagttttttaatctatatttaatgcttcatccatatgtccaaaaattcaatgtgatatttttagtaaaaaaaagttttgggaactaaaccaggcctttaacaccgagttttttttaaaaaaaatctttttcccttagaaaggagagagttttatacccatcaaattttaattcagagtttttttaattccttctcccttaaaatgaagaggatttttgtaccgtttccgagtcggagcagcagtcttgccctgactatttacgtgcacgtgatcgaactcaaacagtggatggatcgatcacccgggatgtcacggcggcggaggaacgacggcggcgaggccgatggccgcgccagcaagacggcgcggcggcggccggcgcagacgaagatgaagcacctctacctggtgctcgacgacggcgacgaggctactactacttacaccatccacaagctcgacgtcgacgacgacgcgggcattatccacgcgcccgacgtcgaccggccggcgactcggttcgcggcggcgccagcggccggtggtggccaaatgcacttcctcgccatggccgggaagaacatcgtcgcggtcgacggccagggtggcggcccgacggccgtgtacgatacggaggcggccgcgctgacgttcgcgtcacccctcccgggccgtctctcctcctccggcgccggcctggccgtcgtcgtcgaggacggtggccacggcggcggcgaggcgctttacgcgctgacgtcgctcggcgagcgcatgccggcgtcgttcgaggcgctgtcgtgggcgcgcgacccttgcgcatcgccgtcgtcgttgctgttctcctcctcctcctcgccggggcgccactactactggtcctggaagaacgtggccgatacgccgccgccgttcgccgaggaggaggccgtcaccgcctacgcggtgcaccccgacggccgcaccatcttcgtgtccaccaccggcggcggcggcggcggcacatactcgttcgacaccgagcggcgcaagtggcggcgccacggggactgggtcttgccgttccgtgggcagggctacttcgacggcgagctggacgcctgggtcgggctccacagggaggtccacggccgcgtctgcgcctgccaggtcgcgtcccgcggcggcgcgcggcccccggagtacagagagacgctcgactacgacagcgtgtcgtcgtcgagaagcaagaaccggcgccaacgcgccacgctcacctacatgggcgacggcatgttctgcgccgtggagacctgtgagacgccgccgacatcgtcgtcgtcgtcggaaggaggtggcggcggcggcggcgtggaggtccatgtcacggtgttcgggctcaagtacaatcgccggggagagctgcaggcgagggttcgccgcgccgccggcgcgttcccactgcccaagcaacatgtcccatcgttttctcctgtagccttctggatgtagcagctgcttgcagaaattttatttttatttttttatacttttttatgtattaattttattgatataccttttgaaaacatatttccgaaaattttatgaagtagtttgcttctcttgcattacattgtggaatatgatcagatcaatagtttcatgcaaattaaagtcttacatgatgatatttcggccactacacaccagatattgcccccaaaaaaaatgattgcacaaagttaacatatggctggacagtagatttcaccttttctttttatagatgtcccccagcttctattaaacttcaacagatgtacacacacaaaaagcaaagtctactgggtatatatacttgtttacagtacacaacagactcaatattgctatagtaaaaaaacactcatatccacaccaaaacaccacccaacatctgaatccctggaatcattcacaagcagcaatcaacatggttagcagcttctgagtattacagattgcattgatgtttaaagaaagaccttaagcctcttccggattgtgatataaaaaaaaggccaacacacaaaaggctagcgcgtctggtatattagaagtagcacatgcaaaatcggttcatgaacatgcaaaaggcttccaggttgtgataagctccactttcaatatacttgtacataagagaacaacaataaagttgaactggtaagaatggctgtggcacatgcgcacaaattcacagacaaatgagtagagagtttggtcatagtaagggggtgttcgggagagagggggccattagcccctctctaaaaaaaacataagtccttctcatagggatttatgtttttgtgagaggtactaaagtttagccccagtttagtccctccaaccaaacaccacctaaggaatcatgaataccatcacgatccttctgtacagactggccttaagtgactgaaaaaggtgtttcagtgtctgccctgaataagctgaattgtgcagggcttcaattcgcgtatatgaacagagtgttgtcagggaaatgatcagttgagttctttcaatgtcacttgtaaatgtctgctgtcttcgtggtcaaccttttggattccagaatctgtgtggcttttagtgaattgacctgaacattagcacaagaaatcagatgtatcaaacaaatgcgtacatgcgaaggtctgatttttgctagagtctacagattcactacacaccaaaagcagccaatggtataatactataatgcaactaagaaagaatatgaagattagaagacaagcagtactcactttagcgtatatccttgcttaaacatcaccttctggaaatcgcccatgagtcttggaaaattctgtgcaactataagtacaaatacatcctcttttgctcttgcactgtgctgcctgatgtttctgagaagtttaagaaggccacaaatgtcatcagaataataagctttccttcctgtggcaggatcaatgaaatcaagtgtttccttcaaatgcgtatttccatctggagcttcaacacccttcttccatttggtgtatttactgagtttggtcttaattttctcgtacgttggattatctgttgtctccattttctcaaacatgttatggagagacatgaagtgggcagctgatctatatccatccttcaaagtgatatagtcctctgctaaactgtcataacctctggcacaacgatcaatcagctcaatccactgtataatgtccaaaggcaaagtggtgaccgaaacaaatacctcctcgcgagtcatcttcacaaatctatctgtatccttttcaatgtcaccatcctcaagcttgttaatcactccctttgacagattaccaaatctcatgttaccacaggtatccattagaaaattttccgatgtaaaatggccaccaaatgtcagtccagcccagtgaaaattcttgagtagtacatatgcgttcctgatcttgcatttcacttcatttgacgttgtgtaagaaatatgtctacacatattcttctcttcttcttcagttgatgtgcttgctccttccttcggttctagtggatttgtccatggaatctgttccggtggcgacttgacttgaggtgttatggtttgaagaattaacctgtccttattgaacttgcagtagttcctcaggctggtatacattgtttcatccattttgcagacgaaaagattatggtttagatggtatgccttttcttcaaatgccctgtcatactcaagtttccttcttacagatcttctttggtaaccataacatggtcttaattttttgcttgttgatacgatagtgtcccttgcaccttgacttgttgctggagtcttgattagagcttgaatagcctgtaaattatttgccatcacaatgattaactaagatcaattgccaaaataacaatcagcagatgtgtttccatgtcaaatttttttttcacaagataaccaatcaacagatgcagctatttgcctatcaagacattcaaattcagcatatgagcagataatacattctaggacaaatctttaaatgtagcaatgcaaaattagtgctcgctaccttcttgagagagagagagagagagagagagagatgctagctacttacaggtgcatcattttctgggatctttattccttttatatagcagtcgtcaatccattggatgttaaccaccttcttgccttcaccgttccatatcagaacagctccctccgaatagtctccctagcaatttgaattaaatgtcaagaacgaaacatgtgttacactaataaaaatcggtagtaatttttttaccgccatagcaacatgagtgcagatgtcatagtctattgattgcagtacgaagcctcctagtacttcaattttccttttgctctgcatcatttagttcagaatgttaataaaacctggaggaagtaaattgttatcaatggactcccatgctgacaagccagccatattagtggtagaaaccaaaatgacatgctgcacaattttacagggtttcaaaattgaacgcagataaatcttacagagccaatcaacaaaattagatacgattcgactaacaaaattcgataaaggaaccttagatacattagtgaagtatagattactcctctaattcgttatcaggaaaatatatggagataaatcctctaattctttatcagcttgtacccttcaggcccaaagaaagggaaggacaagtcacaaaactcaccagattctcaaatagacaagcagtttggaattttggtgcatactaggaatatggcttgcttagaaggagtaaatactaaggggctgtgtagcagaaaactaagatggactggaaatgagtgattgtgtgatatgttccctactgttgataatcatgagcgtaatgtttcaatcttcagagcactgctttcaggtagaaagaacgcaatcttttcgcggaaagtatataaaatggaacttgttttttaccttgacattagatgagatggcataaatatcaaaatatgcacacgctgaaaatgcagtacgaaaaggagaagttcctgagaagatctggttgacagacacaatacttctgtaaaattgctgatatgttcaatttagtttaaatttcatcattccataaaagtcacatgtgtagattccttaacctgctgataatttgacttcatcctgatagcctaggcaccgataattaatctttaaaaaacaagtgtaaggaacgggatgtgtgctgtgtgcatgttgtggcctgaactaaggcagtaaaaatcaattaagctcgatgtccagttccgcatttcccttaaaccctaactctgcaattcgatgaaattggggaacacacgccgacatgtgaattatgagcaactagaactggggacattatctcacctgttcttttagaaggtgtgggaatccgtgaagtatgaaacgcatcccggcgaaagggcgattgattctgcccccgcgatctgctcccgccgctgatccctcgccgctgatatggcctcgcgcctcgagatcgatccccgactcctcatcgccgcttcggcgtccaaatccgccgccgcttcgggctcctcccccggccgtggatgtatcccccggcaccgccttgttcttgagccccgccgcgtatctccccaccacagccgccgccgccgcaaacgatttctccccatccgcagcggaccgcttccctgtctctgccttgaccttcagccccaccaccggcttgcgctcctccacctcccccgcgtatttcctcctcgaccccacctcttctccatccaccaccgccgcgtcgcacccctcctgcttcacggtggctttgctccgcgccaccgccgcgtcgcacccctcctgcttcacggtggttttgctccgcgccaccgccgcgtcgcacccctcctgcttcacggtggttttgctccgcgccaccgccgcgtcgtacccctactgcttca

SEQ ID NO: 27120 - DNA, 5811 bp, Oryza sativa
cttcccccccccccccccctctccgaccgccacggctccctcctccgtcgccgctttggcccgcgcctccgcctccgccaccgccaccgccgccgccgccgccgtagcggggtcccatcagcggcggcatgacctagccgcggcgcttggcgaattgggggcgaactgcgagaagcgagcgggaggaggcgagaggcgaaaggggaggggagacgagcgggagggagcggaaatttcgagttcgttgggctattggctacttgctgagctgtcctttcgttttgtctacccggtccggatggggccttgtgggtttttcactttttctttttctttccttttctctctctctgtttttttttgtgacgatgggagtaataaaacagtaaattccttctattttcttgcggtgaaaaattccttcagatatcagtatcacggccaaaggtgccacaaacctactgaatttaggcggttccaaaaacaaaaatttctatgctataacatcgaatgtttgatacatgcatagagtatttaatgtaggcaaaaagaaaaaatcattacacatattgcatataaattgcgggacggatattttaagcctaattgtatcatgatttgacaatatggtgctacagtaaatatttgctaatgacggattaattaggcttaataaattgttttgcagtttcctgacggaatctataatttattttgttattaggctacatttaatattttaaatatgtgtccgtatatccgatctaacaaccaaacccaaaaattttccccaactaaacaagcccttaggtggtgtttggatccagcgacttaattttagtctctgtatttagacactaatttagagtattaaatatagactacttacaaaactaattacataaatgaaagctaatttgcgagacaagtttttaagcctaattaatccataattagagaatgtttactgtagtatcacataggctaatcatggattaattaggctcaatagattcgtctcgtgaattagtctaagataatggatgggttttattaatagtctacgtttaatatttataattagtgtccaaacatccgatgtgatagggacttaaacacgttgaacggtactcccttcctcctaaaatagaaggaattttgggtgatgtgacatactatcctataccttataaatctgaacgcaaatcctttatattttgaggcggagaaagtattactaattagtactaatatttcgttgcggcaacatactgacatgtacatacgcagcccgccttgtcaggtttgccaccatcagccactaccttctcaccacaagctccgtataccccaccgacaacatcgacacaccgctgcgtgctcgtcggtcagctgaaggaagatgatgcccctatgtggagatagaggtggtgtgtggcttccgttttccagcgatggtggtgcggcgaggggccaggaatgataatgataaggtgaattaggcttgggtagcagcggctattcacattaattagacgactgtacggctcgggcatccaatcaatttggagaaaaatagaacgctgatgtcagcgcccaatttacgtgcaaaactattttaaactgatttttctcttaattacttatctaaatcattatccgattgtaccattaaattcgttgcaattaaatctttaaaacaagaccacacatggatatattccgacgaaattttttttagcttattattaaattattttaaatattgcacgatgttcaaccaagtatatcggaattgattcacttagtagatcgaaaatgtttcgcttgtttaaatcaggtgttgtttcaccgtatataaaaataatgtttcagcaaatagctaaagaatgttttagttcacagcaacatttgatccatacgtagtgaaacattataagtacactaggtgaaacatttttcggtggaataaaaaataaaacgaattcccttaataggggttcccaaaatatataggtttttttgttataatgaaatatttcagtttactgcaacattagatctatacatagtgaaacattgtgaatacacttggtgaaacattttgggtaaaaaaaataaaccaaatttccttaatatagagttttcaaaatatctagttgatttgttgtaggtggagacaggtactgtagtgggcctagcggcatgcaccgcgcacagggggcggggtagaggtggccaaatgggccgggccaaacgggcggcccgcggcacggccgttcctgtagcaggcacggcccggcacggcctgctacagtaacgggccgtgccggcacggcccgtgtagccgtgccgtgcttgggccgctggccgagcccgcgggccggcacggcacggcacggctcctgtagcaggccggcacggcacggcccgcggcacggcacggcccgggcggcccgtcaggccgaaagcgccggcggcgcgtgacagggcgggcggcggtccaacgggaaggcgacacgtggcactaacggctatttgaccgttcaaatttgaaaataaccgttgggaggctaaaaaattcataaaaaattcgaaaaaattccaaaaaatctcaaatttcgccctataaatagggcatgaaccccagccatttctcctcatcccacactcctcatcttgtgctctcaagtgttttaagtgctctctttgttctcaagtgtgcatttttttttattttgacaaaatttgctcaaattttgtcaaaaatcaaaattagtttcgtagttcaacagtttgatcgcagaggtttgaagagctcgcggttggaaagatgtaagtaatattcaaatttgtgtattatttgtattgtgtttgtgaattcaataaatattcgaaaatttgtttatgtcggtttaaattttcagaatggatccgaactttccataccagtcgccgtcgttcaccttgggtgatttcgaccccaactacatgtcggggtttgacggtacctccggatcggctccaactccaccatctgtggaggaggtaccggttcatacggctgtcgttgaggaggtaccggttcaggcggagacagcttcggaaggattttccggaaccgcgagcggaagtgtttcgacacacaccagctcgaagagatcgagaacctccggtgtgtggcaaagcttcgacgagataaaggaaacatgccccgacggaagggagatatcgaaagcccgttgtagaatatgtaggcaaattttatctgctcgttcttctggtggtacaggtcacctcaagcgccatgcggagtcgtgtgccaagaagcaaggaatacaactccggcagcagcaacttatggtaaacccagacggtacggtacgcagttgggagtacgatcccatggttgctcgggaatctcttgtccggttaatcgccaggcaagatttacccctgaactttggggagtcccctgcttttgaacattacattcagcaatctcataaccctaggtttaaagctgtgagtaggcaaacatcaactagagatttagagaatgtttatcacaaggaagcaactgcacttaaggaactgtttagtacatgtactttctctgtttgtgttacttcagatatatggagtagtagagctagagaggattatcttagcgtagttgttcattttgttgatgatgattggcaattacaaaagagagttttagggcttaggttaatagatgtctcacatacaggagaaaacatagctgaaagaattagggaagtaattaatgaatttaatcttgctgataaaatatttgctgtcaccctagataatgcatctgctaattctagagctattgaaatattgcaacctttattttgtgtgtatgctcaatcttttctactccatcagcgttgtgcatgtcatataattaatttgattgttaagactggcatgaagagggtaggtgaccacatcgatgctgttcgtcaagcaatcgcgtggttaactgcttctaacccgcggattgctgcatggaagaggttttgcaatgcggccggtgtggaagctcgtaagtttgccaccgatgcagagcatcggtggaatgcaacgtatttaatgttaaaagttgttttaccttatagtagtttactttctgattttgttcagtcacgtggtggcccaagaaacagtgacgggtcttcagtactgaacgagcatgtttgggcaattgtacaaaaattttaccaatttctagaaactttttatgattgtactctaactttgtcacatgtttattatccaactgctaatataattttgcacaaccttcttgaaattgctactttatttaaagaatacgaaaatgatgacgttctaactgaacctgtctttcacatgaaacaaaaatatttgaaatattggaaaaatatacctatgttgtatgctcttgcttttgttttagatcctaggtgtaaattaaggggattgtctgctattttatcacttgttggagatactataggtgtagattatagttctttttatactgaggttagacgtaaattatatgaggtttttggaagatatgaagtaaagtttcaggaagttcgccagcggagaccccctcctatccccactacaggtaagaagaagatacagtggggtaggatttggggtggatcgtcttcaagttcaatccaaggtggtggcagttcgtcggctacaagtggagacgcctcttcgcatgttgtggccgaagagttgtccggttatttggacagcgacgccatccaccacgaagcacaagatttcaacgtcctcgggtggtggaatgaccacaagataacatatcctgtgctttcaaaactagcacgggatgtgttgacggtgcccgtgtcgacggtgtcctccgaatcggccttcagtctatgcggccgaatcatcgaagaccggaggacgactctgcgcagcgaccacgtcgaaatgctactaagcgttaaagactgggagcttgctcgacaacatgcccaatacactgcggacaaccaagaattggccgcccacttcgagcaactctacctggatccagaccaaccccagtagaattttgttagaagtaagttctgacctttgagctgtactcttttctttgtcatggttttctcattttcccctatgagtttttacatgacaaagtttttaacgaggcagcatgtatcattgtatcctgtaatgatataaacattaataaaggtcattactatttttaacaaattcttttgcaatattttcgcaagtgtggatttacctttaaattatttcaaaataatgaatcacaatctatatttttaaatttttcaacacaacaaaaaaataccattttttctttttttttaacattaccaaatcattacttttttaaaaaacttttatttccattttttaaataccattttttcattttttaacattagtaaatcattacttttttttaaacattttatttccatttttaatttttttttccttatacatttcctttccttttttttaaaaaaaaaaaaacactgtgcacggcccgtggcccgaacggcccgtgggccgcgggcgtgccgtgccggcacgggcacggcccggccatccacgggccgtgcttgggccggcggctcggcacgtgggccggcacggcacggcccgtttcatcagccgtgcctaacgggccgtgccgaaacgggccgtgccggaaccgtgcccgtgccgggccgggccgtgccgcccgtttggccacctctagggcgggggctg

SEQ ID NO: 27121 - DNA, 13557 bp, Oryza sativa
ccccccccacccggttgatcggatagaatcattatcgggaatgataatgataaggtgaattaggcttgggtggcagcggctattcacattgatggagtagaagagcaatgtctagtggatttgcagcagaaaccataggagcccaccagataggcggataggaggaagaaatcaaatttgtactagtacatttttatgagtttttaatgtttcagaaaatgcatctttcttgggttggattgaaacgttgtccttgatacttcgatggtgtttcatatttttgtttaagaatcttgtaattggttaatgttccatatgtgaaaataatagtacgtttcaatacatgaaacatttttcaggtagcggtaaaacatcgcccaaattttaaagaaaaaaaaaggttaaaatcaaacactcgatttgctgtcgcctcccagcattcctgaacttggagaaagtttgtccgaaacaacggcgtcacacagcgcgtccgactccgtttctcctgtaggtcgagtcggagtcggtttctcaccccatgtaacccatgttcgaatcggattcggacactacaaccgccataactacctcggctatatatatgcaatgcacgtgtaatcaaagtggatcaaaccatccatctagctcgcgcccaaacaccgatcgctcgggatgcctaggcggcggcgggacgacgacgacgacgacggcggcgaggcctaccggcgacatcaccacgacaagaggccgcggccgccggcgccgccgcagcagaagcatctctacctggtgctcgacgactgggacagaggctacagcatccacaagctcgacgtcgacctcgacgacgccggggttatccacggcggcggcggcggtccagccgtccggttcgcggcgccgaggtcgtcgtgcgacgcgcggttcttccccatgtgcggcgacagtgtcgtcatggtgtccgacgcggcgccgacgctggtgtacgacacgggcgcggccgcgctgacggtcgagtcgccgctccccggcctcctcgccggcgggatggccatcgccatgcccggcggcgagaggctgtacgcgctcacgtctctcggcgagcgcttccctcgcgccttcgaggtgctgtcgacgggcggcggctggtcgtggaagaacgcgcccgtggcgccgccgccgccgccggtcgaggaggccgtcgccgcctacgcggtgcaccccgacggccacaccgtcttcgtctccacctccggcgacggcggcggcggcacgtacacggtggacaccaagcgcggcgagtggaggcggcacggtggctggctcctgccgttccatggccagggcttcttcgacgccgagctcgacgcctgggtcggcctcccgcgccacggggacaccatctgcgcctgccaggtcccgtcccgcggcggcgcgcggccgccggagtgggacaccatggacgatgacgacgtggtgccgtcgtggaagaagagccgccgccgccccggcggccgtcgacgcgccacgctcacctacatgggcgacagcaagttctgcgtcgtcgactgcgtggaatgcgacggcgacgacggcggcggcgtggtcacgccgccgcaatgtgaggtccatgtcgccgtgtttgggctcaagtacaaccggcggggagaactgaaggcgacggctcgccgcgccgccgggtcgttccgagtgcccaagcatttctcatggttctctcctgtggccttctggatgtagacgaagccatatataagcaaaaaactgcaatgcaatctacaatatatattgcgattcagatcaaggaaaaaagaaaactaacattcagaatgctaatcaaacagtgctttcctttcagtgaagtgtagcattctacagtgctttagggggtgtttatatacaggggtgtaaagttttggcgtgtcacatcgaatattatatagggtgctgtatggggtgttcggacactaataaaaaataattacagaatccgtcagtaagcctcgagacgaatttattaagcctaattaatccgtcattagccgtcagtaagcctcgagacgaatttattaaacctaattaatccgtcattagcaaatgtttactgtaacaccacattgtcgaatcatgtagcaattaggcttaaaaaattcgtcgcaaattagtcacaatctgtgaaattacttatttttttagcctatatttaatacttatcaggtgtttaaacttttgatatgacagggtgtaaaatttttgggtgagatctaaacagtcccttatttatagtttctcaaagttcagtcatatgcttgtaagaatgtaagttgtataatatcctttttgagttttgacaaccattaatacaatggatacaatggagagttttatctgcattttgaaataaacaagaaagaaattcaatgtaacagagtatctagtcccagcaactagttacacatgcatgctgtcctgtaatgccacaatcttaactcacacaagatgctaaccatgttgattgtttgaatcaccgattacagagaacaagggtttcaaacggccggtttaaattgagaaaaccaacgtttgcagcggaagataaaaaacctggtacccatgataccaagaacgtgctgccttgtagtactgaaacttcttatcatagcagagaacttcaacttccatgctgatacataacactaaggatttttatgaccacataagagaaaagtacatccagaaatggtacaactttttaaccattccatcaccttatcacagaatttacaccattcaaagtcatccatgtaaactgctgcctataatttctgtatactaaagattgccaccatacaattcctgaaaaaacggatggcttgatgcacatcgcaaaacaaacagatatgtttatgtaggaacaacataaggctctttgtagtccttccaccaaggaaagaagagagcaatgattgccacaacaaaaacgaaaagaaaaactggatagtgagaacggtttgcatttcttttcttgcctccagtcttcttctcattcacagcttgacattcttgacatggagatttggctgcaccatcaaaatcctcatcatcatcgtcagccgggaacttcaaatcttctattagggcatcagtgttttgcatatggcattgattttcctgccgaattgagtcccaaaattcttttctttccttaagctcactgttttttctgaactgaagaatattagtacctggccctgagcagtgttgtatagctggactttcaagtggtgggtgaccatcttgttctgggtctctacagaaggtgcaagaatggagttgctttcttggagtagaattcatcctcatgtcacctgataaaacctgtgccctggatatctgaaataaaacatgagacaaagtgagagagatgtaaattcatttaattctaaggaagttatgtcttcaacccaaaatcatgtcaaatataaaccactgaaagacaaatcttcagcacgctaatgaaaatgcatatccaaacaattaacatatatgtggatggtatatgaaagtgacatcaaaatatgttcatgctatttggggctaaggaatggaaataatatgttaaagaaaagcaagtatttaatcatacaacacatttgacattttaagtagatcaaagctgctatgagtttctgccgcatacctgagagcagtgattcgtttcatgcgctgctgaacagacataacatgggccagcaactcttgttggcacatctgacaacctcctgtctggcttaattggatcaacagagctgaaatgtgccatcaaacctgaagcctcatgactatctggaataacagtgcgaaataagtcatgattggacattccatgtgatttgtcagatttgttacaccatagctgccgccttgcacgtgtgcttccagaaccacattgtcccactgaatgttgagaatcaaaatcagtagacaaatgaacagagttcaggtcacaagaatgtgaatcacatgaaccatcgtctctgatatccgcatcatccatgagagaatgtgaatatgaaccctttctgccatttcttacagaatagtttgctaactgactcaaattattgtcatgcccactctctttttgcctgccaacaagtagcttagcagtctcagatgcctcgaaagctgcaatgctgatggctggcatagtgtcgtcctggaattgttccatagcatggataatactactgatctcagaagatataatgcctagatccaaacccttcatgatggaatgtatcatttgaatcgatgaaataatcatctgagaactgcttgccttagcactctcatccagtatctgtaagcccgatcgaatcaaagatcggccataaggctcaagcatcagtggattttgtgtcagcaaaacaaccaccaagtttaagtgcgcgatactctgagcatgcgcctcctctagggcccctgagactttcaagcagacatcattaaccagctcgttagacgcaaaccgccagttgttggattgcacaagcgcggcgacacaaagagcagagccaaaagagttgctctccaccttagtgctcatcagacaatctgcaaagggacgacaaagcgagccaatgatcgcgcttttcaacgcttccgtcgccagaggatcaacaacgtaccgcgatagcgcgcaaacaaccttggagcaaccaacggcattccgcgaggacatcatcctaacgattgccgagacgatcagggcgatgtgcggcacaatcttgcggccgtgcgcttgcgcggcggtctcgaagatgcacagcatctcctcctcggagaaggagcatggcttcacggggtcacaaacgcgggcaagaaatggcgggagcgtgttcgaatcaagctccttcacatactgtctcaggccactgaaggcagccttgttggtaaggggatccatcaccatcagagagagcgcgccccctgtcgatacgaaatccagcatcagagattgccgcaactcgcaatcgattcaaccgcccacaaatattttctatggagcaaagaactaaaactactactcctagtcctaacaagggtttaaggcaaagaggaaagagcttcgaaacctagaagaggggagaaagagcggagagggatgagagggatacggggtgctcaccggcggcgagcggaaggaagaggaagtgagcaggagggggacgacgccggcaacgctgcttcaccctcgcgggatggagatcggcggcggaggaaggcggcggggcggggcggggcgaagtcgatctccgcctccgggagtcgggtcgagtagggccgtcggtaggagtcccaggcccattaacgcaaaggcggtatgggcatttttagttacccatggcccaacttgtcgctattaatctggacatagttaatatctagattcataatcagaagttgtttatgtctagatttgttgataaaagttagtttattttgagacggcgagaataaatctagatgtttttttagatacaagaaaagcggtgcatactagggtctgctagcctctcaaatcaaatgctaagtctttatggttgaagttgaagtgagctcgatgaatcgttgatgcatttcttttaagttgccctaatggctcagtgggccagatagcttgggtgcaaccaaataggtcagagctattgtttttccaacctggtctagacttgtctgaatagtttgtttttcaaatggctggtcaatttgttatatacaaatttgacgcgtaggacaatgaatttgtccagctcaacttcaataggctgaaatgactaggcaagctggactatccggatgaagttgatcaccaatggaccgaacaagtctaggcaatgtactttctatgggttggattagccaaacaatcaccagctagacagtccggtgaagatcgaactatctgcccttttatagcgcaactgctagttgtttcagtgaccatcgcaaaagtttaaagggttagactatgtcctatgcacttcaaaggcaatgtttaaaaatggctagtttgtgtagttgaggtataaatatacagtgctagtcgagactaaatactctatgctatgtacctgttcctatctcttggataacattgcaacttgagataactcgtggaggacttaagctttcagagtgattacttgagcgaggtagtggctttgtacgcactcacaaaagagtagtgctgagtagcttcaagtgaagttttcatcttgttattcatggcatctcttaaggattttgtggaagacccgatgatcttgggaaaggcttggagagttggagtttggcttccatagtgaagaatagctatacaaaagagcggctatggactttgtgaccataaaaagaagtgagactataatgtagagtgctccaatgaggactaatagattactgagtctatgataccttgctaaaaagtctccgtgtctccgtgcttgatcttcatatctcaatctctctactgcttgcaattacattactagaattgagtaggacttcaaataagttaaaaaagcttgtgccatgctagttttgaaccctacgcatgtagtagcttttgtttatcacaattgagtgtaatctcagcctttagtttttaaatctctatttagcccctctatggcatgtttgatgctatagctatcatggtaacagggcctaccccttggtagggtaattaaattgctctgtatatcagccatgttttaaaaaaattaaacaaaactttaatcttgttaaaacttctcccttttttttaatcatgtggttactaggcttactaccgaaaggagtatccttaccgtgataaaggaaaggaaatcctgattgtgcttcgtatccaatgctaggggctgttcatgagttggtgcatttttccttagagccacgactttattagtcaacccatactccccctctttttttttctttctgtaaaacccatgttgtcttgattttctaaacaaaacatagtttttgtgaaaccaaccaagttggcgtgtctattatgtcgagaaaaacaataatacaatgccataacttgtaaactataagcctagaaattaaagccatgaactacaacgagcacacactaacattgtacagtggttgctgaagggtattatatgaatagaatacatacaatttaaaaagaattgatgatggaaatgctgccttttataatcactgaactaaataagaaccctctttgtttccttgtggaagagaacatctgctattaaccaatgcatatgcaaggaaggaaggatacctcatttctatgtgcccctgctcatggagtgtgaccaaactgtcctcatggcatccaaagctatatatttctattaatgctattcaggtcagtaacagccaagaggctctgcacacacagttcgtcaccttcacacacagttcgtcatcttccaaactgtcctcatggccctgtttggatcattaaacctagattactgacaaaacccattccataaccgctaggctattttgcgagatgaatctaatgaggtatattaatctatgattcgctacagtgatgctacagtaatcagccgctaatcatggattaatatacatcattatattcgtctcgcaaaatagtctaggggttatagaatcggttttatcggtaatctacgtttaatactcctaaatagcaaaattctggagggctatttaatagctcggaggatccaaacaaggccatggttgcacttgtttctttccatcatcacttaactcaatcatttgcttttcagcctataaactgctatagaaaattaagttttaaaacttaattttggagttgatttcaagggggttttcatatttttattttttagcttttacttttaaatcgctatacaagtatatataaaaaatttacaaataaattattttttctcggtgataagccgttacggcctataatcaactataggttaaacaagaggttattcttcgaaaacaactaaaggcaccattcttgtgaaaaagctttggaagatgaagtgtagtagcagtacaagttcaattgcctgaagagcaggtaaagccagagagatcaaagcagcaaaaaggccatgacaacatcatggagtatatattcagattcacctcctctttttcttcagcaaggaaagggaggtgcaatattaaaaaaaaatctgcagcagtttgtgctgtcctttttggaaggaagtaaggaaaagggggtccaagaggaggttggctcacacaatgagtgacacaatgccctgctgccttgctttgctcagctttgctttactttgcttgcgtaggtaggaagaggaagagcagaaaatggagggagagcagtatgaaaatttggcagcaaaattggcaggcgccaaacataataaatgaaatgaataactgcaactaatttgtttatagatttagatggatgtttcggatatctgtaacgataatcgataatgtataattttatttgtctaacaagtttagaaccacacatgatacacctatgtaataccggtgttgtaaattgggcccatatgtcgtgtacatgcaagggaaaatatatagttttgaattaaaaaaatgctagttatagtttcacgaaatacctacttttgaacaaataattacagtaatgtgaaatttactcaatggaaaaagtgcaagaactgaattgaatgggagaaggaatatgaaaacaaaaccagatttgctgcagatttacgtattcattgtgatagatatatatccccaatatatatattgacattgtttttcctaatactaatttcttattagaaggaaaaaacacccaccaaaacacatagtcgagcccagttcgttccaggctcaagcctagccaaagccacagctcaccacagctcgtcagttagggcatgtttagttcgcaaaaatttttgccctgcataccacatcagatatacggatacacatttaaagtattaaatatagtctaataacaaaacaaataagattccaccagaaaactacgagacgaatttattaagcctaattaatccgttattagcaaatgtttactgtagcaccatattgtcaaatcagggcgcaattaggcttcaaagattcgtcacgcaatttcctggcgaattgtgtaattaattctttttgtctacgtttaatactatatgcatgtattcaaacattcgatgtgatagcatgaaaaatttatttcggaactaaacaggccagtattatcgccagtattgagtacttgctcggctcggctcacgagccgacggctgggctcactgagcgagccagagcaatccggctcagataaaagcgaaaccctccctcccctctccaagcggaaacctaccccctcttcttcctccgcttctctctctctctctctctctctctctttctctctcctcaaccgtgcggctgcctcctcctcgtcgctgggcatggatgtgcacccgccgaatgcggccgcctcctcgctggaggagttgttcccgcaccagcccgccacggtcagtgctccgggcctcctagctttgttgcttccccctttctttccccccttcttgctgttgctgtgtgtgtgtatgtgtgctttggtataagtttttttttcttgccaagaaccgggcgtggttgggttgctcttccgtggggaggaggaattggggaggaagatggtttctttttcttggggagtattggatgttttctttggggattttctttttttcttctttctaaattggggatttcttgggagtttttgtgttgggggttttgggggtttttggtacaagaatttggtgcggttgtggtggcctattctctagtttcttgatattattgttctaggacctagggtttgggtttttttttcctttcacttgtgttctttaccgtttagatgaattttctccactattatgtttgcatagaagaaaatgggggattttcctttgtttcttgaactatcttaccttcctattcatgcgtgctgcatttcctcgcccttttcttcaccttttcctacctataaattggaaagaatttttttggttcatagagaaacaaatatatttacagttgttgagcaattcattcagccgcacacttttttccagcagagcttcatagggaaaataaacaagactatgttcatgccaatcttgcatcttgtttttggcttagttgtgaggtcacagggaagaaatgcatgtattgctttgtgactttcaatatcgatgtgtgtatatgttattcccttaccatcactgtcattgcatagacgtgtccattgtaaaaatcttctttcgtcgatgggatgatgtgcatgcaagattgcgacagccaattttttttactttgtcaattcgggtgaaaaacctttattgttgccggaaacaattgataagaggcactgagctttatcctaatttcttttaggcattgttcaattttattgtgtaattctaaagctttactgttagaattcaataaagggcctactgcctgcatccccatgtgaaatgtggttgcctagctctcttttggtttggagtttcttttggtctgttgcaggtatagcatttactgcaattgatcctattgtgtgcccactgcccgctatagtgtttaattgcaagttgtaactgagtgattgctgtggcagttttgtattccttgccacaattacaaattgtagatgctgcacattctatctttgaggggccataaatttcttgatgcttgagatatatgaacttcaagtttgttaccgctgtataccagaaacagctgatactgacccctggaattttgtctttgctaatttttgtcagaaaaaaaaaacttttgaggaatttaattgcgccatgcttcagctaactttattttttgattttggacctccatgcatgtcttgctgtaatctagtagaacgagagctttgtaaagctataattccttcactgttatgtaatttagtttttaaaagatggatagataattgttttcgccattgcaatcttgtctaacatttctttactttgcaggaaagtgatagaagtggcatagagtggctctctgtctatgtagaggactgcttgtcaacctctgcatcctgcacaaaccctgtctctgcagaactaccgcctattacaatggcaagtcaaggtgctgcaaaaccaaagttaccaccacgctcatctaccaatgcaagaaaaaagaaaaggagcctggcatctgtcataagcgacactgatgaccaacattgtatcacgctgtttgtcgagccaccgctactcctgctcgatcataaggactggctagcagagagtgagcttatcctccccaagaaggacaaagatgaagaacttgtccaagagcaagaacaagaggaggaagagaattacaaaatgagtgcaggaatgcaattccagcaggagcaactggtgatcacttgtagctattgtttgtccagccaatcaccacagtggtgggatggtccatcagggcctacctgcgatgcttgtcgtctgaggattgaggcgaggaatgggcacaccaccagttccaagaagcgctatggccaagagattgacaaagaacaggacataggaaagcggcgagataagaagaagatcaagaaggctgtttatgtgaatgatgagctgctatcggaggagccaatgaagaggtgcacccattgcttgtcctacaagacgccacagtggaggaccggtcccttggggcctaagacgctatgcaatgcttgcggtgtgaggttcaagtctggcaggctgctgccggaatacaggcctgctaatagtccaacttttgtgagtgacatacactccaattctcataagaaggtcatgcagctgaggaattctgttccacacccaaggaagtgaactggtggtcgggaacgtctcgatctgttgcgtttagttttaggaactcttcagttgtagaagtaagctgatagtgaagaacatcttaatctgtctcattgaattttaggcgggctccttggtcgtagaagtgagctgataatcacatctcaatctgctgcattgagcttttaggggctctcagccttagatgctgagaaaacgaaagcagaatctagttaggcgtcatgaactctttgttagctctagccgttttttaacttgagaaattaatctgctagttgttggagatcatcagtttaataccaatgggtggttgctacctttgttatcccaccattgtcttgcagcatgcttgttctgtgatactcgctgaatatgtttgcaagatggaaatcagaattcagagcagcctcttagactatgttctgtgatacttgctgaatgtgtctgcaagatggaatgagagcaagcctcttagattatatcctgcaccatctatgatctttgcacatacttcagccatgccccttttggcctcttctccatatgttcataattctcattatagtagtatttgtcattcttttctgaagtggaatgagagcttctcattgtgtggttttgttggtggggtgcaaaaccgcaaatcgtatctccttggacatgccatgagccccagatagatttagggttcatgtttcctgttagtgtgctaaaattcaggccaatcacctgaaaattgcaagctacatggtaaatatcttgattaataactgttatagtccacctaatatctgatcttatgacaacaaaatcttagcaaatgcaacaaaatcataactgattgttttcctggtagcaaattctgctcaacagtagatcagatagactgcatgaatcaatgccctgcagatttcagattttttcagaccacaaagttgtcttcaattcagaaatctctctgcaggctctactcttgcacactgagacaatttccatggctggagatgacgaacaatgatgcagctgtgcttgtagtcttcctgtccactcaaaagttaaagcaaaggaaaggaaggtctagtccaggctacctttctgctgttcttttatcatgttggagccttttttggttgcacatggttggccctcttctgccatattcatgcttgcaattttactgacaattaaagctctgtaaatcataaatcatggtggccgagaagctcaatcctgtacttgtctgaagaaactcacccatgccgccatgcgtgttcttgcaagttaaaagctcactctttttcagttcatagttttgcttgcctttccctaaatgtcagcagagaaaaggcaaagctgtatactccctccgtcccccccccccccctcaaaaaggcaaaccctgagttctcgtgccaacgtttgactctccgtcttatataaaatttttttataatttagttttttcattgttgtttgatgatcaatacatgattaatactttatgcatgacttatctttt

SEQ ID NO: 27122 - DNA, 21231 bp, Oryza sativa
ggttaggttgtgttctgatgcaagatgggaaggtggttgcctatacatctcgtcagttacgtccgcatgagaagaactaccctactcatgatcttgagttagctgcagtggttcatgcgttgaagatttggcgtcattatcttttcggtactcgtacagaggtgtacaccgatcacaagagtttaaagtatatctttactcagccagatctgaacatgagacaacggagatggttggaattaattaaggattatgacatgggaattcattatcacccgggaaaggctaatgttgtagcagacgctcttagcaggaaaggctattgcaatgctacggaaggacgacagttgccattggagttatgcaaggaatttgaaatattaaatttgggaattgtcagtagaggtttcgttgcagccttagaagcaaagcccactctaatcgatcaggttagagaagcccaaattaatgatcctgatattcaagaaatcaagaagaatatgagaagaggaaaagctatcgggtatttggaagatgagcaaggaactgtatggttgggcgagagaatctgcgtcccagacaacaaagatttaaaagatgcaattctgaaagaagctcatgatactttatactccattcaccctggtagtaccaagatgtaccaagatctcaaggaaagattttggtgggcaagtatgaagcgtgagatagcggaatatgtagctgtgtgtgatgtttgtcagcgggtcaaggcagaacatcagaaacccgccggtttgttgcagcctttaaagataccagagtggaagtgggaggaaatcggtatggatttcatcactggtctacccagtacgtcatcaggccacgactctatttgggtgatagtcgacagacttaccaaagtggctcatttcatcccagtaaagacaacatattccggaagtcggttggcggaattgtatatggcaaggattgtgtatttgcatggcgttcctaagaaaatagtgtctgatcgaggtagtcagtttactttaaagttttggaagaaacttcaagaagagatgggttctaagctgaacttcagtactgcttatcatccgtagacagatgaacaaaccgaaagggtaaatcagattttggaagacatgttgagagcttgtgctttagacttcggtggaagttgggataagaatctatcttatgcggaattctcgtacaacaacagttatcaagctagtcttcagatggctccttacgaagcactgtatggtcggaagtgccgcactctgcttttgtgggatcaaacgggagaacgtcaggttttcgggactgatatcttaagggaagcagaagaaaaggtaaaaatcattcaagaaagattgcgtgtggctcagtctcgtcataagagttatgccgacaatcgccgcagagatttgagttttgaagaaggagatcatgtgtaccttcgtgtcacgcctcttcgaggggttcatcgttttcacaccaaaggaaaattggcaccgtgttttgtgggaccttataagattatcaatagaagaggagaggttgcttatcagttggagttacctcaatctctggcaggagtccataatgtgtttcacgtgtcacaattgaaaaagtgtttaagggtacctaccgaagaagctaatcttgaacagatagaagttcaagaggatctgacatatgttgagaagccaatccgtatcttggaaacaaacgagagaagaaccaggaatagagttatccgttttgcaaagtccaatggagtaatcactcggaagaagaatcaacttgggaacgagaagatgaattaaagtcagctcatccgcatctgttcgccagttcttccgaatctcgaggacgagattctgtttaaggggggtaggtttgtcacaccctaaaaatcctaaatatataaattgttgtttaattggaattattagaaatgattttaaaagtctagaagaaaagatctaattttaaataataaattccaatataaaagtgagccagataaaattttaatactttacttgattctatagttcctagatttttctgggatttatttgagccaaggaagtatttttaataaatggaattgtatttcatgaataatttaaattggaaaaggtttttaaagttcccttttggctttgtccctctctctcctctccggcccaatcggcccagtcagcctgcagccgcccgcgcgcgcgcgctcggccgctgacaggtgggtcccacctgtcggactcgtcgtcctccttgcgctgaaaccctagccgcgcctcgccgccgccgcctttccaattcggccgcatctttcccgatccggtgaaatagtttgaggggaaatgctccccgggatcttctctacctttttccttttggaatcgatcgccaattcggtttggaaatccgtggactcatgttcgattcggatcgatctctctcctccgaaccctaaaccttccatcgcgtcgccggtcgccgtgggccttcgccgccgcctccttgcccctataaaaggacccccggtgtctccgctatccgtcgccaccctcgcctttgcccgccgccgtctgtagcgccatagcaccgtgcagccgtgcgccgccgtcgccgccgcagctccagccgtgcgccgccgtcgctccggtcgtcgtcgctgctcggggaggtcaccgttgtggtcaccaagccgtcgccgatctcgtccacccctccgtcgtcgccgtaggtcaccggagcatcgccgtcgtcgtaaagccgaaggtcgccgccgcttattccacgacgtcgtcgccgtccgttgatcttctgccactgttttggtcaccggtgagttcgccacgtcgccctctacgtgttggtgtcctccattcgcgtcgtcgcgccgtcgttcgccggcgagcttgcgtgcccgagccgccgctggtgatgacgtcatcgccgacgtcatcgttgccgtccgtcgtaggccggtcgtagaccgttagatcttggccgtcctttgtggatagaatcgatctcggccgttcgtttccgtgagtcgccgccgtgcacccggtccaccgcgagccctagccgctgacgcaataattcccttttccttttcaaaaataattcattattgcgtcataattcaattaaaactcatataagtgttttaatccgatttaatctttaaaaattcataactaattcatcttagctcggatttagtttgttcaagtctctaaatttttctaaaaatgagatctacatattaaaaatatccacatgtaatgttcatgcttgtttatgtgctgttttagtgattttgctcttttctgtttagattccgacgtttccggagagtccgttttcgcaggagaagaatttgaagagttccaaggccagcaaggcaagtcacacagatccaaacaaccctttgagcatgttgatcccgtttaaagctattgtttctattcaactattacatttattttctaatgtcatggggtggaattaacctattgtttgttatagcccttttgttcttgattactttattccttgataccttgggttattataacttgactagttgagctttatatattggttcagctagatatcagatatgattgcttagccatgcttagaaacattagcacactattgggataacttatgattcactattatttaatgatggcttaatgatagttcacgatggtcaatcgtgattggttaattaattaaattgccaactaaaacttgataatggtgggttgtgaacacatggttttgttggtcgtgctcatgacaataaaggaccggttcacgattttcggttgtgaaacattaaccgtgccaaccacaagccagcgtgggcaacggctttaccttttgtataacatggttcattccggagcaccagactgagaagtggcggagataagcccacgggggtcgctggggagtccatgccttgtttataagggggtgattatgatccaggaacggtgagctgtggtggattgtgttgtgcgaggggtactgtcacagctcctttccgaggtactgtggtggtattgaggcgcatggtgacatgtcatgaggctgtgtcttgtgggtacagtggtacacctctggccagagcacaactattcgaatagccgtgcccacggttatgggcgggtctaacaatgtctttcgtgattagtctcacacttctcatcataataaaagatgctataactggtaataatttgattagctcctggtttggaatggttaattcctggtttggagatagaactgtgcagccgagatgattgttcagaatgtgcagccgggatgattgttcagaatggttgggcctaagcaacagggtatgttgtatagcgttggattaatattgtttaattattacttaactgttttattaaattctgaaatgtttattaaatgctgtttatgcaaatgaaaccctactatgccatcctttgttatcctgtgcacttgcatatttgttgcgtggcttgctgagtatgtcatatactcacctagcaatcattcatcagaggaggagttctacagtgatgctgatggtgtggaagattaggtgtagccctggtcaagctgcctgtggagtggagtcgtcggcgccgtttatcttatttttttccgctgcttagatctttattgattgagaggaactatctacctctgtaatgacattttattcgcttattaattagagtaataattgtactctattatcaatttgttattgtgtgcctcggctgattcctggacgagggttcacacacatgtaagcgtttggaattttggatagaaattccgggcgtgacaccctgcttccccttctcctcagcagcttgcagaatttcctcatgctttgccttcccatcctctactcctcgattcagatctggaggtggcggatgtggaccttgcggctcttgtcgcccaatctgcaaagggcggatatgtccccttccccctgcgtctcccctccagaatcgattaggcggcttgaaaggtggacgcggcctccatcctccgccttgatttgccattggagagccgcttcttaccaccttcgcgaaactccggccgtcccctcgaacactcgccgtccactctcgccgtcgcccaccaccgcctacccttggccactcctccacttctctcacctccccttgcgtctcccccttctccaatctcctccacccgccttggaaccctagctcctcgagactagctccccacaggtggtgtagaaacggagtcaggagagtcgactcaatggtgttccaccgatctccaaaatcgccatcgttgaatctcgacacgtgttgcccctccacctctctctcccccactattggatcgggccgaaaaccatgggcttcctccctcccctgatcaaaaactctctcgcgcgccgaggagcactctcccaactcccgaaggccatcccctccgccacgaatcaccaccggcgatcgtcggagcgccgcaggtgactccctcgtcgtctctcctaggattgaagagtttctgacgccgcgggtgactccctcgtcgtcattgattagtttctgacgccgaattgaagagaggattggattactgctggcatatgaagtgaatcaatgcaatacgattcgtaatgagttagcatcccaactgcagagacaggtcacgtatatacgtacgtatgcaggccggcctacttccaaatccaaattccaatacgattatacaattcaccgattgattgatttaatttcttcctgcttcaattcgatcgatcgatcggcgtcgaccagaaattaatcgatcgagtctatctagggaccaatcgaattcatcgagttcgctcaatggcaactgctgctggtagatatgaagacagcggagtcagtgtctctttccggcggaaggcggcgtacacggcggcgtcgctgcttgtcttcctcgtcgccggccagctgccgctctatggcgtcaagaagtacaacggcgacaaggatgtcccggatcccttgtactggatgaattgcatgtttgcgtcaagcaataacaccctgatgactcttggaatcatccctcttcttctctccgagatggccgtccgcatcttctccgcactcatcatcaccaggtggccacccttccatcatgtgcgcctgtaagctactccctcatcttttttacagtacttacaaaaataatggaaggtgccatattctgtagcgtaaaatctggtatctcttgatacctccggtagtatgagtatcgctccacagagttcgaattcgttttttataagttgtataataaaaataacaaatataaccctaaatatctgcatagtagtttagtataattttgtttaacttatagaaatcgaatttgatttgtatatttgtaaagtgatcgatgtatctcaaaattgatctatcttatcaatttttaaattattttttatcatttaagtggcatgtaaaaacgagaggatcctctcaaggatgaaattccatctccaatattagtaattgtttttttttggaactaacatgcatattaattttgtttgattaactaacatgtctgcatggatgcgtcatgcttgctctatatattgtggagattatggataccccatatctacatgacggttgtaatttagccggatatacggtaccaaatatagatggaatatctctataaagactcgggttaggttctaaacttatatgtcaaggaaatacccgggatcttagtcggttactattgtattttatctataatcccatattgcgttaggatatggactgtattttgtaaagtggactccttcccctatataaggagggtccgtgtgcctcttggggggcgattctttttccagtttatacaatcaataacacactcggcggaatcatccccggacaggagtagggtattacttcttgaataaaaaggcctgaacctgtataaaattccttgtctccaaacccattcactttcctagcttgatagctacccccttttattattgtcgaaatcttgtttcgacagttggcgcgccaggtaggggcagcgtcaagttatcgccaactaagtgcgatgggtttcgtttctggcatcgacgacttcgcctttcctcccgggtaggcgttccggttcggcagcctcaacttcatcaccaacgacttcggcaagatctctctccttgactcggattcaaaccagtcggggagagaccaggtccccgtgccgttcggtattccgaactcggccgaggcctactccaagatcatctctcccgagtcggcttcaaaccactcggataagatccaatctactcttccgcgaccagatcaagacgacgggtcctatccctcaatcctgatgaaacttcctgatgatttggccgctgtcttcacagtcaggacatctcccactcgaagatctaggcgagcttcggccccgatccgatctagatccagggaggttggcgttatactccaacctctcgggacagtctcgacggaagagttggatggctacctcagctcccccggcgtcagttctcgaccaaccgagatcctcgactacgacgatttcagctaccactacgaccacggcgacctcgacaacttcgacgacagctatgaggataactacacgcccctcttcttcggcgtattcatggctgacaacgaaacggaggaacagcgccaagcccaagaagcggaccaagatcgcgcacggaaagaagctgaacgtcgccgactggaggaagagcgacagcgacaagagcgagaacgactacagcgtgagcaacaggatcgcgaacggattgcaaaagaggctgaagatcggcgacaacgcgccttggaatctgggcggcgagcgagagagctcattgggcaacaagacgtggctccaatcggaactggagaaagggaaagaagccagggccgaagttgatcgcttgaaggccgaactggagaaggagaaggcccacaccgccgtgctcatagattattacaatctcaccgagccgaagatggaggctcttcggcaggaggttcgcaaggccgaagcaagcgctgcagaggagtcgcggcggttttcatgggagatggtgaaaaccaccgagtccgcacggacagcgtgacaaacgcttcgcctcgcccttactgacatgggcgcaaaagtgcggggtgtcccctccgaagatgcatcagccttcgacttctccgaatggacccaacaggctggtggttcagtttctgactgcgccaccgcatacagcgattgctgtgcacgcgtgtcagcggcctttaccatgggcctcctgcagcagttcggctgcgagaacatcgccgagtttcccaagtacgcaaagggggattgggaaatcagtgcgcaagacatttcgcccgcgcttcgtgcgtggcgaaaacaattttggcagaaggacgaccgctccgccgctaaggcgcaccttttggcgcagctggcgaaagcagaggcggtggacctttgtgaagatgaaggcgcggcggctggagggggtggaggcgatgcccgggaccacccagaggtgtgaggccctccgcccttctcttagattttcatagttttcttttggtgttcgctagatgtggcaaaccattgtatattcggcaaacttccgctaaaccttaaaaaaggctttttggtatatttggaatgtatgacacaatcttaattactttttgatgatcgaagtctttggcatatttttatttcactcgtttcacattatgccataccttccccttctttcgcctattcttaccatgcaaaatgtgttttgccttttctgcactgtctaccagggggtctgctgaaaatcgtgcattcggcccccttttgggagctggcgaggtcaaaacgagaaattcgtggcattgaaggggctgtcgaagacgcgatgtccatttcggccattttatcacgaaatggagataaacggtcgcagctataaggttatcaaggttgccaactggctacgtgcgcaccccgggtgaaccttagaagattacgatcttgttcactcaagacatttggaagatatggctcgcttttggcgaaaccatcagaagactaaacgccaggaatcgatctctcagcgtcgttacagtttagtctgtgtttcgccccctactattcttaaggttgtgtatgatattagtagtgatgacgaacctagttcgtccgaccattccttagggagggataatgattactggggcgaaaatgtaatttacttgtaaaatgaattgtatcgggttgtaaaccttgtattcttcgattatttttttgaagctaataaagaacgtgctttatttccttttcgctatttttcgcatcgtcacattttgtgcttttgttaggccggaacatgccggcccctttgcatatattagcgaaataggtgtactgacttttcagcttttcgtcgttcattttcgatctgtagcattctgtgtcgagagaaacgcttttgcttttatgttgatcggtcgtaacgtcattcggctatttattttccgagacaagctgttgcggtttcaacgttcggcgagcaatgcttcggccgattcgtttcgcccccctggcatttttcgctgatcaggcgcttgccttggggtttttccacaaattatcaatcacacgaaaagaaataaaaagaaggcggaggacacagagattttatactggttcgggcctccatggtggataatagtcctacatccagttttttttttctttttctcttctctttttttctttttttttcttgccgaaaggcttacatagtgccgaaaggcttacatgacagtatgtacatttttacaagttggcgatttgggtgccacccattctagacatagaagcgcttgagggaggcgacgttccaggaatggtcgaactcctcgcctttgagtgtcgctaggcgaaaagatcccgtcgtggacttgtgtttgatgatgtatggtccttcccactttgattcaagcttgccaaccgctactgggttcgcctttttccttaggacgagatgaccaggcattagctccgtgggtcggacttttttgttgtaagctgccgaagtgcttgtggcgtacttgtgcatatgctcgagcgcttcgacccttacaccttccaagagttcgagcgatacctcgcacccctcttcgcccctagagaacataacccttggtgagttagcccctagctccgctggggtcattgcctcatcgccataaagaagcataaatgagctaaacttggttggtcttgtgggggtcgtccgaagggcccaaaggaccgataacaattcttctggccatttgcctttcaccgccccctcaagtcttttctttagtgcttctaggatcttgccatttgtacgttcggccgccccatttgactgtgggtgcgcgaccgacgcgaacctgatttccaggttaagcccttcgcacatttctctgaacttatcagagtcaaactgcttgccgttgtcagtaatgaactcttttggcactccgaaacggcaaacaatgtttttccatacaaacttctgtactgcggccgaagtgattgccccaaggggttcgacttcgatccatcgagagaaatattccacagctacaattgcgaatttatacccatttcgcgccactgggaatggcccaataatgtccagcccccatctggcgaagggccatattggtgcaatgggctgcagatcatactggggcacggcttggcttcggccatgacgctggcaactttcgcacttcttgatttgctcaacacagactttcaacacagtgggccaataaactccttgtctaaatactttggaggccaccgttcttgcagcctggtgcgcgccacatagcccctggtgtatttcctttgccatttcttcgccttcggcaaaagagatgcaacgaagtaagggttgaagtaccccggagcggtaaagctgacctgagaccatcttatacttcgtggctctgtgttgcaaacgcttcgcttctgcttcgtctaccggaagccagccagtttcaaggtgtttcaccaatggggttcgccagtcatatgggtcttcgcccagtttctcttggtcgattgtcatgacttccgagctgtccatgggcacacttggagcatgtaggacttcgaaaaagatgccaggcgaatgcgggccaccacaagcagcggatttcgccaaggcgtctgcttcctcgttctggtctctaggcaagtgttcgaccgttatgccggtgaagcatttttccatggaccaaacagcctccagatacctcttcattccctcttcttttgcctcgaaggatttgtcaacatggcctgctaccaacttggagtcagttcgaattagcaggcgccggactcccagtgctttcgcctttcttaggcccaggagaacggcttcgtattctgctgcattgttggttgtgtcgaactgcaatctcgccgcgtaccaaatcgacacaccattcggcgaaaagaggactgccgcaacgcctgcagaaccgtcagagcacatcacccagaactggtcatcgggctcggggtcgggggcaagtactggtgtccattcagctacgaagtcagctagcacttgagacttgatagcagagcgtgcaataaaatgcaagtcgaacggggatagctctgccgcccacttgctgagctggccagtgacttccttgcctcggagtatttcgcccaaggagtactgtgatgggactatgactttgtgggcctggaagtagtgcttaagcttgcgcgaagccattactagagcgtaagaaagcttttccatttcaatgtaccttgtcttcgctccttgcagtgcttcggagacgaagtagaccggtttctgtccggactctgtttcttggacgagtgcagcactgactgccaccgacgaagctgccaagtataatagcagttcacttcctgggggtgggcttatcagagctggcgggctttgcaagtattgttttagctcgtcaaatgctgcttggcactctggtgtccaattaaactttcccgcgccccggagggtcttgaagaagggcaaacctctttcggccgccgttgagaggaatcgactgagtgctgcaattcggcctgtaagcttttgtacttcatgtacgcttgacggaggcttcatttgctggatggcatcgattttctcgggattcgcctcgatgcccctatcggaaacaaggaaacccaacaacttgcctgcgcggacgccgaaaacacacttctccggattcagctttatgcctgccgcgcgcaagctgtcgaacgtctcttgcaggtcgaacgcatggtcgaaagccttgcggctttttacgacgatgtcgtcgacgtaagcttccacgtttcgccccagctgcttgccaaggaccttgtacaccagcctggcgaaggttgctcctgcgttccttaagccgaaaggcatcctgaggtgacaaaatgtgccaaatggagtgatgaaggatgttttggggatgttgagcgggttcatgtggatctggtggtaaccggaatatgcatccaggaaagtcatgagctcgcatccagctgttgaatccacgagctagtcgattcgcggcaaggggaaatcgtctttcggacatgccttgttcaggtctgtgaaattgacacacatgcgccatttgccatttgacttccgcaccagcactggattcgccaaccactccgaatggtcaatctcttgaataaaccccgcccggagtaatttttgtacttcggtcttcgccgcttcttggcgatcggcagacatcttgcacaacttttgctttcttggcttaatattcggcttgactgctaagtgatgcatgatgagatctgccgggatcatcaatctgcacttttgttatcttgccgtgaggggtgggcttcagcatgtgcttgggccgctcatgcggttcggtctcaacattgtgcactgctctgttgattatggctagatcgcgttttgaagcggccgaaggctgaagccccttgactactatcacccctgttgggccaggcatcttgagcttgagataattgtggtgggaaatggcttcgaacttgttcagggttgcacggccgaagatggcgttgtagttgtatgggatgtcgacgacgtcgaacagtatttgctcttcgcgcctattttctcccgagccaaaagctatcagcaaaagtgcttggccaagaacttgcactgcctctccgccgaacccccggagcgacgttggtgccggtgcaagagtttgggttggcaagcccatcttagcatatgcttcggcgaagatcacgtcggccgaactccctccatcgaccaggattcgtcggacttcaaaaccggctatctcagctgagattaccagtggatcttgatgcgggaacaggactccttcggcgtcttctggcccgaaagagatcaactggttcacgtactgtggcgccccctcacccgccgaagtgatgctgtggaccatacggatctgcatcttcctctgccgtttcgacaacaggcttggcgggtcagctcttgtaatcacttggattacccttcgttgtgtatcttggcgttgttcggctaggggtatttgctcctgaactgcttcacggggtgcttcgactgttgttccttgctgcggccttgggtcttgcgcgttgccacgttgcctaatgtttaagcattgctccgtggtgtgcaaagagcgtccgtgaaaagcgcagtagaggtcttttcggaccttcttgcgggctggctgctgatggttgcttgcttgctgggcgtcgaactccttgcggagggcttgcacttcttcgacagccatcacagccttgcccgcccgatctgttctgaactttctccaagtcatgggggcttggccttgccttggcggctgtccctggatcgccggctgagactggcgaactgataggggaggtggttcgacaatttgaacttgtgcttgagcttgagcagcggcgacgaaggctttatcgtactcagcttgtatagcttgccgtcgcttagaatcctcctcgccccttgcgaacccgtcagtgatgcgaagtaggtgctcgagcgtctgcggctccttgttggcgatttttcttgttagttcgccctcaagcagaccggccgaagcggcgtttataaccgacgcctcggttatgtcttgaacttggcaccgggcttgcgagaagcgacgcatgtactcccttatcgactcccccggcctttggcgaatgccaagaaggtgttgctgcgtcttcggctcctcataggtgcctcgaaagttaaggacaaaaacatcgcgcaattgctcccatgagtaaatgctattggctggtaaattgaaataccaagaacgggcgatgccgtctagagcgagatgtattaccatcgccttggtattttcatcaccatgagccgcttcgatcgctgactcgtagatggagaggaactccttcgggtcagtttcgcccgaataacgcgggacaggtgggaacttgaactggggcgggattggacgagtcttgattcccccactcagcggcagccccttttcgcctcccgccctgtttaccgcaccttgctgcgggtacggtgtggcgaagggcgaaatcgtggcttgtgcgtggagttgggccgcggcattcgactgcccggctccaactggtggtacttgctgggccgccatggatgggtcaaagattggctgcgaccacatcatggcagcttggattggtgcttggtttgttccgaagcctggggttggaacttgctgccaaacggttggcacctgagcagtgttgccgaagtcgaactactgtccttgactccacggcgaaggtcccgagcctggctgaatcggtggcaaccaattaggcgcaccttgacttgtattccccaccgggtgagccgatggggttgtacttgaaatgtagtggggttggttgagttgctgaaggaaagcttggagttgcgcctgcagagccgaagccccttccgccactgtttgtgtcgcttggccaggtggttgatgctgcccgacgaagtacaccggcggctgtgcggctagtggcggagagggctgggtcaccacttgcggccggacttgagaaggggcatagcctgccgaatactgaaggattggagccgacgtggccttggtccgccttgtcgcctcgtatgcttgttgttgttctagcatttggcaaagcatgtcttggagccgtgtcatgttctgccgcatggcttccatgtcggcttcggcttgcgcttcggggtccaggctgatttgggcctgtacaacggcgagcgcagttggcgccgccggctgtgatggggcggcttgaggcaccaccagttggtttgtcgaaaggatctccgccctggtctggagtgctcttgccgccgcagccgccttcgccacgtcggccgtgttcggcacttgcactgaggttgcgggggccgaagacggttgtgatggcgcgggggccgagggcgactgtgatggcgcttgtccttctacatcttcggtcacggacgccgaaggctctgctccttcctcggcggccatgtccggtccggcgtcgctctccttccacctgacgaccttctccttcacgaccctcttcagtggcattcgctctcagtggtttcgttcggactccccatggtcggcgccagctgttgtcgaaacgacaactgcgtacgtcgaaggacgtggttactcaacagtggttgggaaaatgaagtgtactaaattttgaatttcacttgggatcccccgttacatggcctagggggctatttatagccctattgcaggctcttactactaggatctaggttgtacaggggaatttacatgattacccttatgaaagggacatttacaggggtacataatgttatagggtctcatgggcccctgatgggccgtctagtgatcaccggcccttaggcttgatgggccggaaaggcttcctcggcccttgcgggggcgaacttgccatggcgaagtcgtcttccttcggcagatagtcttcgccttgcacccttcgcccgagacgcccctggcttggcaaggccctcgcgcgactcttcgcctcacgccgttcttgctccatagccttcgccacgggtttcggcagatctggtcgaagagcctcatgccatccgccaacaaacgtgattttagaaacatttagaaaaaaataatctaatttggagtttatataagtgcggtaaacttgttttaaattttattttaatatacagctccttaagacgcccgtatgtaaaaatgagtttatttttgcatgcggaccttttaagaggcccgtatgaaaaaatcaatttcttaatcaaaattagctaactattgcaagaagaggaataagtctattttccctcgctaatgtcttactcttgattgaatcctctccctcaaccacaaaattggatataagaaaattactaacactaaaatttagaaatgttgatatgttctattagaaaaaataacgagctatatctcttccttgatttgagaatctcggtttgaggggttttttactttgatatttatttgttaccgtattcgttccgtttcgtattcgctccgtatatgtattcgacaatattcgattccgttttcgtatccggagtttccgatttcgattccgattccaaaaagaaaatatgaaaatgaatatggtagagctagtttccatccgtatccgttttcatctccaatgacatcgatcgatcggtagccagatttggctcctttttcttgtgcgcgcgcgggggatcttgttgtcgagtcggatccgctcacttttgatgggccatatgaccatttgggccagagtaggaaggcccattttggaagaaagttacacctctatttggaccaaatattctactactatatactacggtgtatacgcatgcacagtgtacgtataccttatgcgtagttttagccttagaattactttatgcgtctactttgccattttagtttttttaaaaaaaaaatcttatgtgttccgtgaactagcaaatgtatgtgagtttgaatggcaagtggaggttcgctgctggtttgtgaaaacgctaggggattaattaatattgccaagttttaataggatttcttatatatttatcaaagtttggtaagaaactaaatggatgcacatctttaataacttttatgaaaaaatgatatggtttaaaataacataaatatggacaacccttagttgttaattttattcacctcatatataaaaaaaatctagataacggctgtaggaataggataacttgaaaggtatatgttatttccatcaaaacggttggacaggcatgcggcacgatttcctactaagcggtaggcggcggcgggcggtcggctgcgccctcccctctgccagagggaaggcgggaggcggcagcggcagcggtggattttgtttgttctttttttttagaatttgtgattcatggtatggatctgagatatataatctgtgatgtatttgatttgtgatgtatttttttggagaattttttatatgaacttatgatttgtgatgttactttgattttaggatatgtagggcactcgatttgggaaaatcatgtagggatcaactcgaaggaaaaatcaaaatgcaagcagcaaagaaacaatgaaaaaaaaagaaaaaaatgatgaccaaccgggactgccactaccatctttagtcatgattggtaaacatctaactttagtcccggttatttcacccgggactaaagatggacgaccatctttagtcccgggttgcatttagtctcggtttgtaatataggactaaaggggttgtaaaccaggactaaagaagagttttccgggagtgaaagtaaacgatcaaatatattatttgaatgtatagcaatgcattggattttcagatggaccaagcggctagtaaattaatcagacaaaagtataaacgtgatttttttatcattatttgaacctttttaatttttaattttaaaataaaccatctcaaaacttattaccaaaatctaaaacttttggtgtaacaaaacaatactgccaccagcgggtgtggcagtttgccatgacaacgccatgctgttacattagctataccgatgtggccaaataacattgctacgtcatccacatcgatatgggagtattattttaccacgccagcctatcttatactgtggtagtgttgttttgtcatgttagtctgactggcgtagctaatgtttctgattttgaaaattagttttagaaaaatttattttaaattaaaaatttaaaaggttcaaaaagtaaaagaagttctagaaacatgttgtagacacaaaattaacacgcgttattgattgcttcaatttcatatctagcgccaacatggcagcatgattaatgacgcattttccttaatcccctttggcaacttaattatatccaactaaaggataaaattcaagtgaggaacgaggatccccaaaacttagcgaagaaaattatcaccagttatttctttttaataatgaaaatgtattacatctctgccatctgtcataaggcatgcaaccaattagttcttattaaaataaataaaatgagttgtgggacaaatctccagttaccttgaaaaataaaagcagatgacacactaaaatgatcaccagttaattaattactagagaatggaacaatatatacctccaaaattatagtacgtcgtgttaaattatacaaagacatacatgtgctccatgtgccacactagttgggagctgcttctttttttatttatttcttgtgaagactgagctgatagattaattagtcctcttattttgtttatttcagtttaatcaaggattaatgactcttcagccttgcaaaggccatcatatcgaattaatgacccatactatttttaatcgcaaaaaaatgtgaaaggaatgatcgatcgatatcaataaaacttaaggtttttgtataccatttcagatgagctgccacgtgctaccttgctactgtagaaactacagtccttgcatgctatccacaccgttcgattgtggctgcaagcatctctgcccttgagcgtgtcttcccagggagcctcggctgctctccaggggacccccatttttttccccatcggttgattcatcccccagcttctctatttgcacgcagttcacacgcttcctccgtcgatccatccagcgccgccggtggcatcgccgcctcccttgcccagtgtgttcttgcgtcttctttggcttagctgtggacggccgtggtcttctgctcggtggcttcgtctccaccatctccattccatccgtcagaggctgtcgccgtccgcgagtagcagcagcctctcctctcccagtgacagtccagttgcgccaccaccgacgaccttttgccttaccggttggttctccggtgcccattgccatcgtgtgcgggagcaatgccctctttttcccacggcagtccaggcaagaaaatccttctatccccattgttgtacagaagaaacccttaggcctttagaaatgtcgttctttgatttattatgtaccattgtgacagattcccttaacctgtatttttaatggtgcaagttacttattatcaagcatgtgattcaataatccctactgattaagcatttaattgaatttagcctgctacagtggttatgggatggttgcctgctgcccccaagtccacgacatacacatattaaagttgtccatatttaggttcatgcttagctttccataatactccattgtgtactcatctgcttgctttatgattttgttttgccattttgtataaatatctaggagtggtttggtgatggggatggatgcggtgcctgacactctaacaccaacaccattttctcagctaacttagggacaaatgagacagagaacaggccaggtgctactcctacacattattcggcatattcaactttctttgctttttctcaattctcaactacagttttcttatgttgagcggaaaacttattgatgatttatttctttgtgttctaagtgctcctagcagtgaaagctctaaccataccatatcttttatctcaactcctgaaataggaatctccatgtcagtgttttgtcgtccatttcaacgacccgttaacaggaggcttgcatttaaccctatcaatcctgctactccaatagatcaacattttgtctcctcatcagatggcccaacagtgccaggtgttcagtcccttcctgcagtgcgcggtaaaggtaagcccctctattaagaattaatctctatttgattgtgctcaagcttgctatactaccattgtatcattttagattcataaatgccagttcaggtacctgtgccatagttgtacatatttgttcctttgtgtctgctcatataaatttggatgcttctcacattggcataggtcctttggataatattggtttgagactgcctcgaccagatccatctattgctacggaagcacgcaagaagcgtaaagtcacaatggttttaaggagaggacataagttacccatatccaatattttctccttcaactaactggcttatttgttgcttccattggttcctacatttctatttgatttcgttcagcaagtgctgattcgaccaatctatagctcctcaatttgtgattgttacattaggagctggacctgatgatttctcatcttcatatcgatgtgttcaacgatgtatttccccacaagttaatgccaggcattgtgatgtgcggatagccaggaataatgggatgagtactactattggcgcttctccttcatctcacattgcccaaaatgacacctccttgcatagggtgaatacatgtcaacgaagccgtgtagggcggtccagagctgatggtaccttatttagtttgctatgatttttccttatttttacctgt

SEQ ID NO: 27123 - DNA, 1067 bp, Oryza sativa
atctgcatgctcaagacttataggggtgttcccttattattaccagctgatcatgatgctgctcgatattcaggctcaacctccacagttcatgttccgaagtaatttttgctgctcaacactaatgttctatctcgatgatcgtaaagcttctcgacaataatactccacccaatgatcttttttctatggtgaaaccacttaaccatgttctaatttatattatatcatccttttacaagattttccattctaatttttctcttattcctttctattaggtactattttcacacctctcaatttaggaggccctacccatacttgccaacattgtggtgctcgattctggtatgaggaacgcgtacgtgggtgtggacgaacagctttgcaaatttacaacaaatgctgtagaggagggagcatttatttgcctccatataggccaccaccagaacctttgctctctcgtttaactggacgagatcgtgttttgtccaaccacttctttgaaaacatcagacgatacaattctatgtttgctatgacatctatgggtgtaaatatcatcaactcaattaatgatggtcatggcccttacattttcaagattagtgggcagctatgccaccgaattggatcgcttattccaaagcatggtgcaagaccagaatattgtcaattatacatatttgacactgagaatgaaataagaaatagagtggctgttgcttcacatagagagatgagttttgaaccaaatgaggatattgttgcatctttgatgaccatgctcaatgcacacaacccagttgttcagctctttcgaactgctcgtgataggctgcatgatcagttagaggatcattactcagtgaagttatttgccacccccaatgaacatggtaatatctactcagccccagttgcatcagaggtggttggtttgatggttaatgatataggcactaccgagaaaggtcgtgacttaatagtagaggatcactcattgcagcttcaaagggtaaatgaaactcattgcaaatttatggcaatgcaatacccgc

SEQ ID NO: 27124 - DNA, 14857 bp, Oryza sativa
gccgcttgaaccattataggaaaaaaaaaacttttcagctgaagtataggagtagcccctataaagctttacttgatacagtcagtagcggcattattgatgcttcatcggtaggccagaggattattttgccaggttcattcactggaagtccacgctattactaccaaaattaccaagattgtgtggctctctgtcgtagatttggatgcccggatcttttcatcacttacacgtgtaatgctgcttggccagagataacagaagctttagcatttataccaggacaacaaccttctgatcggcccgatattgttgatcgagtttttgaaatgaagctcaagctgtttgttgatgatataaaaaaaatatgagttctttggtcccatactcggaagttagctcgtttaattactatgttttaattcttatgttttaatatgagttcttatgttttaattactatgttttgtttcagttttgtttacctcaatattttttttcagttgtctacacgattgaatttcagaaacatggtcttccgcatgtccacttgatagtgtggcttaaaaaggatagaccccttgatgccgatcagatagacactttcatatcagcgcagttaccagacccatctattgaccctattggttatgaggctgtctcacaattcatgattcatggtccttgcaatattccaggttcctcttctccttgcatggctgatggtaaatgcactaaattctatcccaaggaattttctgacaaaacagttgtgctacctaatggccatgttaggtatgctcgaccaaataatggaatcatacaaagaaacgtggcattgagattgataatcaatttgtggttccacataatgtagacttattagttaagtatcaggcacacataaatgtggaaagtgttaatcgtgatggtatggagaaatacatgtttaagtatacaaacaagggccctgattttgctaaagttggaatcaaaagaaaaagatacccccggttcttctacagaggaaataaatgaaataaaggaataccttgaatgtagatgtgttacaccacatgatgcagcttggcggcttttgcaatttgatatccatcacaccgatccagccgtggaacgtcttccagtgcatctcccactagaaaatggtgttgtatttactgaggatgaccatcttcaccaggtgattgataatccatgcaatctcataacaaaattgactgcatggtttgaggcaaacaagacatatccagaggctcgacaacacacatttgtagagttccctgaacattggacatggcatggtgatggaaaattttggaaaccgcgtcgtaatgcccgtggaaaggttggccgtatagccaatgttagtcctaaccaaggagaaagattttatctgcgtatgctattgcatattataaaaggggcacaagacttttctgatcttcacaccatggctggccaactatacccaacatttcgtgctgcatgtcaagcattaggtttacttggtgatgattgtgagtggtccaatgctatggctgatgcagcacaatgggcattaccataccaacttcgccagctatttgtcacattacttcttttttgtgaagtcactgtagcgcccgttccgtcgtggcgcctagcgggaaaattatctcttaaaaaccctaattgcgaaatttgtttctttgcttgttgtctagtgtccgtgccatctcaagatctcaatccccgatctatcgtcgagttcaattccgaatccaaatccttccaatcaaattcctccgcaaaagtctattttgcctcccccgaggtcgatgggccgaatctcgctcggcccatcttcccctcttccccggcccatcttcccctctctccccgggcgctctctctctctctctctctctctctctctctcgcactctcccatctctccccccctcccgctcggcctcgcccgtacgctgctcgcgcgtgcgagagccgccctgagcgcctctctccccgctcccccgctcagcctcgcccgcacgccacgcgcgcgtgcgcgtaagccgccgcgccgagcgccccctccctttcccctcgctctgtcgcgcctgcagccgcgcagccgctcgtcctcgcgagccagcgtgtgcgcgcccgcgcacgtggtggccgaccgcccggtcgccgccgccgccagcctctgcacgcgcctgtcgccagtgtcgccgctccgctccaaaccgccccgccgtcatcgtcgtcgtcatcgcccggcccccgcccctccgcgcgcaagccgccaagggacggaggcagcgcccctcctccctctgccgcgttgcccccgctcccctcctcctttttcccgaatcggcaaaagggcaagcccctttctccccctcctttttttcccctttttcccccgccggcgtcatcctccctgtcgccgctttggccgcgaccgccgagcgccagctcgcgccttgaccgccctaagtcggttcccaaaccgacattgccgccccctttaaaccccagctccttcccctccaatctccctcgttttcgcctcctcgccatagctgccgcccccgtgctctgttcgccgtcgccgtttgttgttgcacgtgtcgaaggagtcggcacgagcaaggacgcggaaggggactccggccgcgccctctccttcctcttccccggcccgaggccggagatattactcccgcgccgtcggcctctcgtcacagcgccccgacccgcacggtagtgcctccctccgttcttcctcctcgccccatctcctccccctagctttcggtagtagctcgagtagactacccgtagctagccggcgccgccccgaccgttgccgtcgctcgccgcgtgctcgccgccatcgccgctcgagctccgtagcacccgcacgtcgccagcctcgctcggcgtagctccgtccaatccgacgctagcatcggattcccgtggtcgcgtggatgctctcaccgccgggaatcggtctctcgtgacctcgtcgccgtttccctcttctcccgccgccggttgccgccgccgcaatccgccgccgtcgagcaacctccggcgaatccgagccgttggctcgtctccccttgtcacgtgcaaccgcccggtgtgcacgcttttgcccgtatcgccgtggttcgctccgccgctcgccgccgccgcccgccgtccattcgcggccgggtcgtcgtctacctcccgccagcccacgtggccgccacgtaggcgccacgtcggcgccagctcagcctagaccggatcgagccgaccccggtcagtccctccccgtgcgcgcgttccaccgcgagccgtgaggctgcgcgtgggcccgccgcacctgcgtccaccgcggaccgcgcgcatgcaccgcgtcccttccccgcccgcgcgcgtgcgtcgcgtgctccctccgcacggtgagccgagccgctaacaagcgggtcccacccgggaccgcgcgtgatgagcccggtccaccggctctctctctcctccctcccgcgcgcgcgcgagtttgggccgccttgggccggccagcccatttagcttggccagaccgctccatttctcttgggccgcgccctagccatccgagaaaagtctatattccctccctcccttcttttctttttcttttccaaaaaaggatttaaataaatcctttttcctttagaccaaaaatccaataatcttagaaattcaatatcttcccaaccgtaaatccgattgactccgttcaacttccaaaattcctcaaatctcgagatctatctaatggcacgcttagaggtcattaatagggctttattttcgccgtttgttgagttgtcccgtttcgcgtgtagtttcggagcccgaagacccgcagtgcgaggatttcgaggatcaagctccggatctcgagcaaggcaagccacctttgaacatcttgagcctatatttgaaatttaattatattgcttgcgaaatattatgcattgataggatcacacttaatctgttgtcccgtctgcaaggcagattggcagacctacctaatttgttgcatttgatccttcctttgttaattgttataccatgtccccttgtaaccacccagttgcacctcgatattcgtgcactctgtgcaagtatcgacggtcgccttcaaacttaaaatctgagaaacaacttgggtaaaactggagttttacaaaagacttggaaaacccgacacctgggtcggtgcttgcgaactaaatgaatttccaaaaccgcggaccggggaacgtaccgggtgtacggtttcccgctctcgcacttaaggaccgattcccttggaatttcatccaaacataagacaagtacgaccacatgggtggaatgggacacccctggctgagtaactagcttatcaggggagccttgatgccgagagacatgtggattcgccggggtggtgtcggggaggacccctgggcttcctggcacagtatggtctgggacctaacctgttgttggtctgggacccctctcgtcggcatatggtaaacctgtatcggctttcgaaatgccttgtcatgaaagcttggaggtctcccgacgtggctgatccccacgggctgggtgatccgggttagtaatgtcgtgtgggtaaagtgtaccccctctgcagaggttaacaaactgctcgaacagccgtgcccacggtcatgggcggatgtgaggtgattcctagcgtagttttgtttgactactgcttgtgaaattgttgttgtgaaaaggggttcgatgtttgaaaaatctgcagctgatgggatcagctaggcccgggtggccgtttgaaaagttgttggcccgggtggccgtttgaaaagctgttggccgggtgccaaccttgttgcaatcctaaagactgacacattgcacatactccgaccggacgagacgcactgtctcatccgtgtcgtttgagaagcactcacttagactttttagaaaagagttcaaacaaaatcaattacgaaaacaacagcctttccttgaagcctgcattaaacacttatttcccctggcttgctgagtactcccgtactcacccttgctctatataaataatccccccccagttgctgaagaagatgaagtggatcctactgacgaggagttcttccaggagcaagtcggctacgatgagttttagggtttcggcctagttcccaagtcgcgcctgtgatgattggtccaagtcctggcttccgctttccttttgtaatgcagttgtgagctcgggatctgtccgcagcccaacatgactgtacttctactctataataaagagacctctgttgctgtgatactctgtctccctgtgataccagcactgtttcctgggactggtatcgattaacaggttaatttggagcgtcacgggctagttccggtcgggactagttcggggcgtgacagtcaccgacccaataaaattgcttgaagattatatcaagccaatgggagaagatttggcatatcgtactattcggcccacacaaggtatctctcaaccattagtgcagcaacacattaggtcatatgtcttggatgaattagacaaattactcaaagattctggatatagcctaggtcacttcaacttgccagagccagaacaccatgattacaatgttttgaacaacaggttggtagtggatgagctctcttatgaccttgatgctactttagtagaagcaaatgagcaacttaacaataaactcaagtcagagatctatttatgatgccatagaacactcagttctgaatggttcaggtcacactttctttgtatatggatatggtggtaccggcaaaacatttctgtggaatgcacttctcaataatataagaagtcgtggaaagatagccttagcagttgcatcttctggtatagcagctttgttgttgccaggtggtcgaacaccacactcacggtttagaattcctatagatattcaagagtattccatgtgtgctattaagaaaaatacacatgtcgctgagctcatagaaagaacatcactaatcacatgggatgaggcacctgtaaaccataagcactgttttgaagcacttgatcgaactcttagagatatcatgccatcaaacaattgttatctaccaaacaagcaatttggtggtgtcacggttgttctaggtggtgattttaggcaaacattgcctgtcatcccaaatgcaaataagcagcagatcctcaatgcttcaatcacacgatcccatttgtggcagaattgtgtggttctccatttaactgaaaacatgagacttagatgcccaacactttctcaggttgataggattgaattagaacagttttctcactggcttctttctattggtgatggcacactacctaatagcatgccaacagatcgacctgacacaacatggatccaaattccagagtatcttttgttacctgctcaggaaagaaaccttacaggtttaatttcttttgtctatgagtaaacaccagatgcctcagaattaccagcctatttgtgtcagcgagcaattttggccccaacaaatgaggtggctgctgctataaatgctcagattattggccagatagctaatgaggaaatgtcatattatagctttgatacaattgatgataccacagctaactattgcactcttcaagacctgtatcctccagagtttctcaacacggttcgcatgagtggccttccagatcaccatttacaacttaagattggtgtcccaataatgttacttagaaatttgagtccatccaagggcttatacaatggaactagacttattgtgacgcagctcactcatcgtgtaattgaagcccaaataataacaggaagcgctaaaggttctaaagcttatatccctagaattgtttctgtttcgacagacccgaaatggcctttcaagatgagacgtcgtcaatttccagtgcgtgtttcatatgcaatgacgataaacaagagccaaggatagagacttagcaaggttggtgtttacttgccaagtcccgtgttctctcatgggcagctttatgttgccttctcccgcgtaacatcttcaaaaggattacgaatcctcattgaaaataactctgctgagtatgaaagaaagacacataatgttgtgtattctgacattttccatgatatattaagccaatgttgtcagttctccccagatacccatgtccaatagatcagctttcttactacaaggtatttatgttttacaatttatgctctggtagtctgtttagtataatcttttttatgcctgaattttccatattacatccagtagacaacctacacttgctaatgcgtttctcaatgctctttgatttattaaagtgtatctgtcatcaacggagtgcacaacacagaaccatcttcatatatatattttagtaatgcagtcctcttgcagttctatggttcttttgaaaggagtgacttaacaacaatacataataacaactgttgaatttatttcaagctaaagaaactgtagtgcttatgttgttcagctatgttttcaaagtagcttacttcctgttcacatgtaaattatgtgctttaagtcatgtatgcacatcaaattaccccatttcaatataaatttagcattcttaaatatggttcccaccacctcaggtttgatttttcttttgtcccaagttgatatatctgatttctatctttctacatatccaaccatcctacattcatagctaaacatacaaattagataagtaatatctaaacttacatacttctataatccacatggatatatggtggtaagttcttatcattacttattgttgatatagataagcacagttctaatgctcctctgctcatatgttaacatgagtaaccattttgttacattgtactgctaaattttaattctatttggacagcccattgttaaaagatattctcccctcaacttcctattgaatggtaataggaaatgtcccatttcttattgttttatgtagagatagagacctcaaattcacgtctcatactatcgggtaatgattgacaagtatatttgatctgagttcattttacttattgcagatcaagaatgacatataaagaagaatattacttaatattatatgagggaatttctatcgtttaacaaggtatgacatatgacactgaaaggaataaaatttccaatttataagctcaagagttaaactatgttcctatcagaactaaactgaacgatctatgcgctttggcttcattttagtgtttattttgtagctcctttacatggtgatgaaatttccattaggcgttgatgcaaaattcaacagcgcctactatttcaggattaccaagtaggtactgcaggagacgtgctcacatattatcacaactactctgttttgccacaaatgatgcctatccggacatgtgcaacttggttatctcttctgcagttctgctgattgatcctactgatttacagagcttcttaatgtatgttttattcttagtggttttgtatattctcatatgagtaggctgagatttgtataaacctaatgccatgcccaatgttaaaaaaacatgtaggatacgatttaaccctatgattgttgtactgaactttccatctaattcttccaatatttagtgcccgcggcaacgctcggggtatagagtagtataactatatcagcgtcatgctgtcaaaacatatctacacatgcatacatgtgtacttttatgtattttatgatttgatcgcatggcatctcttgatatggatcattatcatttcataattaagctgcagtggtatatatatatacatatactgtatggccaaggatagcatgccacgagcaaagatatttgacgtcgattaatctatatgcatgattcttgctctcacaaattctaacggtctcggggaataagccaaacgatatatttataataaaaaataatttataaataaaatttttatatatgtattattagcgatatataaaagtaaaggctgtaaaataaatttcgataaaaaaaacttaaaatcaactttaaattaagattgaaaattcaaattctggctggtaagcataaatataaatgcaaagatgaggctggttgatgaaaggcacgtaaagttaataagaacgatcgatccatatgaagctgaatcaatcaatatcagtctctcattttcggtgatctgcccgtacctggaccaaaacctgcatgaggttgatccaccaatgtgtatgcagcgaactgccgaggttcactcgctcacggtttgcaatctcgttttgggttgaaatgcgagcttgtttgtttgaatggacatgaatattatcactatctttccaaatccaattgacgactctgaataatcagatcgatctgtagtccatggatttatgcaggtgaatgttgatttcccacgcaaagtgtacgtagatgggatatttggatttgtataaagactttgacttttttaactgggactggtcaactaattaattggttccaagacttattgccaactgtactactccattatacaagaatatttttccttagtccccacaaaacaaatattatgggaaagagtgcaagatactctttatgggaagggacagaattttgcagaggattaatgttttttctctaactaattctttacgtaaatataaaattacaaaagtagtataatactatgttacacaaatgaatttgaccacatcaattttcacatatatggttaaacgcacccattatccaaaacaaataatcataatgattatggtataatatgtgtgtgtgtgtgtatatatatatatatatatatatatatatatatatatatatatatatatatatatatatatatgccaccttgccaaataaaatggcattactcgttgtgggcgtctgtgtttgtactgtgtttcttaaaaaaatgacagtatttctctatgcgaccgaatagattagcactatccccttcccccttagcgtatgacaccattaacttctgtacacatgttttatctttaaccttactgaaaaaatatgtaataataataatattttttgttgttatttatttttaccattaaagctgctttaagtatgacttacatatattcttttatatttacatttttttaataaaatcactgttcacgcactacaaatcgatgacaacgtatattagaaatggagtgaatatttcatcgtgtagaacggataggatggtgatgtgtagggtctttggttggagttggcttggctaactattccaattctatctgcaagctagcatggccggcgtgcgtgcaccgggatggcgacgtcgactttagttcttagaatgaaattattggtagaaatttggaatgcccaagggccaagggacaatatgctgtgagacgagaagaatctgccaactgcttgcatgccacaggcaaccgccggcaatgatatcattcatgggattttttttccttatgataatggaataaaaacatcggatattatttagtttaaaaaaaacatgggatattattttattatctgaaagtcacaattataagaaacacccatacccaatcatatgtacagtactaccttcgttttatattataagactttctaacccatatatatatatatatatatatatatatatatgaatgtaggcaatggtagaaagtcttataacctgaaacggagggagtagtatacttcctccataaaaaaaaactcaacttaggaggggatgtgacccctcctagtacaatgaatctggactaccatttatccagattcgttgtctcacatcccctcctaggttgagttttttttgggacgggagagtaagaatcactcatatgagaagggctcactcttaaccaaaacacagcaggggagtctcccatagtaaaaacactcaagtatcatattgtgatatagtagtaataatatttaaaactgtacaattgaactgacacatagtaacaaattacctgtagcagtataccactatacttgtatagacatgtttcatctattgcacatatatgctcattattaaccatctagcccatcgttaatctagtaccacctattttatatactgatctcaaaaaagtatcgacaatagacatatgttgtgctctcttcgtaaaaaaaacgaatctggacatacactatgtccgtgtatgtccagattcatttatagaagtgggttttttttttgacatagggagtacgagcctaaacaattctactctgatatcgatgtcccacaggcgacaacaaacgaatttgcgaagcctccatatcctgcataccataaataaatcaataggataatcccatatagtttttccccgattgaattttcgtagctgcaaacacttatttataggcagagagagagagggagagagagagctgtggcttgggcaattacgccacagctcactgaattcgatcgcctctctctctcgttgctgccttctggcaaaccatggccgtccaggttcaacgaacgcccctcccccggtccacgtacaccggccatcgggtctatctcctgcgggccccacctgcagtgacacggtgcaccgtggaccgcgcctttccgcgcagtcatggacctccccttcctcctctcctgtataaaacctcgcgtcctgatgcttcctcctccaactccacgagccgccatttcccaaggaggagcaaggattgttgttgtttcgctgtcagatcggtaggcagtgccccccctctctgttgtctcggattggattggattggattggagtttttctgggttgatgtggtgattttgagggtgatttttttgtgtgtgtgtgtgtgttcttgatttttgttttttatttggtttgtttcagattcctgacgggataatgggtgagaccatcgccaaggatgtcaccgaggtgagcgagcgccaaaatggtttcttgttcttcatcgtggtggcatttttttggattggtattgggatgtgatttgagagagaaaaagaagaagattgaatcttttttgtgatgtgctgtagttgattgggaacacgccgttggtgtacctcaaccgggtgacggatgggtgcgtcgggcgcgtcgcggccaagctcgagtccatggagccatgctccagcgtcaaggataggtgaagctctactgaaatttatcatcttgtcatgttagggtggtggattatgtctgaaaaatcggttatttgtggttgtttccggaatggagatgtgatttttctctgtttagttctcagctgtttatgattagagctcttacttgcatcttggattttgagatgaaattttgatgtgtggttgtgttgggtttgtacaggattggatacagtatgatcactgatgcagaggagaaggggctgatcactccaggcaaggtgaggattttttttaatgatttcggtgttctgtaccaatggaacagtttggtcttataaactagttgttcttcctgcatcaatgtgaatgttgttcatttatttatttgttggatcccactgcggtttgatagtatgttggagctgatctgctgatgaaagggcgtgcatagcagagagtttgagttgaccggcgcatgtgcgaaagctcaaataagtagttagattgataagaaatggaccattcacctactgcattggtctagatattttatagaaaatgaataaggtgttcctcgcgttatctaagtcagaaggcaacgaaatgtgatccccagctgtcactcgattgcataatcataagttatccgatagctgttattctgccatctcatgttgtggcatgtttccctaatttattcttgatgaagaggccactaaacattatttttgcaatggagataacctaatgattgatgcttgggcctagactggttttgtttagttgattttattggaaaaataaattgattttcttcattaaatggaaacctgctgtatggactgattagtactagatgaaccagcatatgtttctagctagttatgtacaatagaccttgtcttgtcttattttagaaatagttttcgtagtacttatgctattaaagaatagatgaccaagtaaattttttttcagccaaataagatcacggctccattgcatcactgaagtttttcgatctgcttgctctttataagaacaatcatattattttcaatagcagcatattttgacataccatgcttcttctagattaatatatttgccgtgtctaggagtcatgaatgatgaatgtggccttgtttgcagtattgttcgttttctcctgcatctaggtgttttatttctgcagatactttgccagttgaccaaagtaatttttatattgccagttgaccaaagtaatttttatatttccagttgccatctgcatgattcaattagtagcttaaagcatactccctccgtcccaaaatataacttttagcattcagaatttgtctcaaaatataacaacttcttcacctacattcccttctcaaccaatcacaaccttccaccattcaaattcaccacctactttctcttcccaaccaatcacaaaccctcgtccatttaatcccacatactttcttaatacctgtgtctaagcctagaactccttatattttgggaaggaggtagtatttaaataagggaattttacaatgctttttatgtgatagtaagttagcagtttttttttgttggtaaacactttcttcaaactgctagtaaagctaaatctattataacttccatatagttaagaacgcaagatctggctttactgatgttttgctttgtctgtcaatgattgccagagtgtgctgattgagccaactagtggcaacacaggcattggactggccttcatggctgctgcaaagggttacaggcttgtactcacgatgccggcctccatgagcatggagaggagaatcatattgaaggcttttggtgctgaattgatacttactgacccactcttgggaatgaaaggagctgtccaaaaggcagaagaactggcagcgaagacaaacaactcatttatcctccaacaattcgagaaccctgctaacccaaaggtgtagcatgatttaacattttaatacccttgtttatatttgtgttctgtggactcatactgggatgttattatgcagatccattacgagaccactggacctgaaatctggaaaggaacaggaggtaaagttgatggtttagtttctggtattgggacaggtggcactattactggagctggacgatacctcagagagcaaaatcctgatatcaaggtaaggaccagaaaagctctatactacagttttggtttgccacattgaataattaaagttccagcatttgttcctttaggaaaagaatagtatctgattttattttttttcttatgtaagatctatggtgtggagccagtcgagagcgctgtcttatctggtggaaagcctggtaataaggagtcatccattaattccatgtcatgactttatttcattttctggttgtgtcaataaaaaaataataaattgtttgccgcactttagttttcccacaacagccaaaagctaaaacaaaatctttgatttgtggttgtctgggacttagtcatgtgaatatccttgttgaggagggagag

SEQ ID NO: 27125 - DNA, 1798 bp, Oryza sativa
tgaaccatttacttctaatgcagggccacacaagattcaaggaattggagctggttttgttcctggggtcctggatgttgacctcatcaatgaaactgtacaagtatgttatgcttctgtattaagttgagctgtagaaagacatatatataatttagcaccatgttttttttctctcacttgatccatagctttacttttcttcattcgaatagtagtcggtactagatctatattattcatgatgtcttagcaaatatctgcttcttttaatctggtatgaacgtttggtgcattgaactgtttgacaggtttcaagtgatgaagctatcgagatggcaaaggctcttgcattgaaagaagggttgctggtaagatttgtgtttgatgttcatttctgtgctctattattaatctgtaggtacacaaattgcttttgttaagcctctctatgtacggatcattcggatggtacctttgctgaagtcatcagtgatgtaaataattgtaggttggaatatcttcaggtgcagctgcagcagcagctgttaggctcgctcagaggccggaaaatgaaggaaaactttttgttgtaagcgtttcatttttcttacctctgaatttctaatgccctgtggcttaaagctacttcgactgcacctgcatttgtttatccatttggtattttagtccaaatgtacagcagtacagatatactccaaatttacactccagtgacctagaggaaaagctaacgaatctgagttcttgttttgtcattgtggcatctataatttcaattcgcatagaacgaactgccgtcccaaaacaagcactatctccacatttgtcatgacccaaggccatgacgggataaacccatggacaacattgtcgatttgtttcatcatgctcatccccacactaacacctttccctcaatgtaggttgtcttcccaagctttggtgagcggtacctttcgtcggtgctcttccagtccatcaagaaggaagctgaaaacatggtggttgaatgaaatgcacaatatccgggaatccacaggaataaaagtttggtatctctgcttgtgtgattaaacatacattgtcctgccattttcaagttgttctgcttgtgtagcaatggggaacacagtgtgttagccttgtagtgttaaacagtttacattttatcttccctgtatatcagaaccctttacatgggcatttgtcagccagtgtgaatgaaataaagcatcatatgatttgtctcatgttttgggatctcgtctgaaccataatattcttataagagaacaaggccctgtttagttcacaccaaacttctcccaactttccatcacatcacatccaaaactttcttgctcacataaactcctaactttttttccaaactatcaacttttcctaaacttctccctaattttaggaactaaacacagcccaagtctcatgttttgggatctttctctgaaccacaaattctcataagagaacaagtctcatgttggatctttctctaaagtctgaaccataaatattctcacaagagagcagtagtgctctgaagaatgacatcaggcccaaataagggttgtaccagtttatgggccatgggccatgactgacagagaaaatacaaaatagtagtactgatgaacattgatgctcctagtccttgctgctgctgctaactggcttttgcaggaaaaaggagccaacatcagtcaaaaaggtgcaatgcaggctatgctcatgttccaggaactgttttggc

SEQ ID NO: 27126 - DNA, 77593 bp, Oryza sativa
agactgtcccggtggggtcgctccttaccggcgaaatgagaaggtgaaacaaaaagaaacacagtaaaaaaaattagtactacctctgttccatagtaagtgtagccatgatattccgcgtcaactttgatcgagctaactttgatcatccgttttatttgaaatttttttataattagcatttttgttgtcatgaaatgataaaatatgaatagtactttacctcgtgacttatgtttttaattttttttaaaaaattttcaaataagacgaacggtcaaagttggacgcggaaaaccatggctgcacttattttgggacggagtaagtactccctccgtcccataataataagggattttgagtttttgtttgtaacgtttgaccactcgtcttattcaaatttttttgaaattattatttattttatttgtgacttactttattatctacagtactttaagcataacttttttttatatttgaaaaaaaaattaaataagaagagtggttaaacgttgtaatcaaaagctcaaaatttaagtgggactgatggagtagtatatgtaccagtacttgtctgatccaacaagcaaaaactctctgtgtactttgttcgatcgctttcctatgcaaaatgtcggtagcggagatagcgcccggctagcacgggcgcccgggctccaccctccaccacatttaacagctgcacacttaattaatgtcatacttaatctgttggttcgccggtcaaatcaggtgggcaaactagcgaagtaatccctccatcccatacctccatcctataatataggagatttttggtggacgtaacacatgctaatacaataaatttagacagacggttttaactaaatttattgtactaagatgcgtcacatccatcaaaaatctcctgtattataagacagagagagtatggtttaacatcatcacattgtgcagtctgcagcttatggaccaaagagaggcagtacacagccatattattgttccatcgcaataatttgtagcactggtccatcacaagttagcaactactcctcgctatttttcattttatattaggagtattaaatttgcccgcatctatattaaatcataactgctatgtgtaggtgtatggattaatgtcccgagttcgaaaatgccgacgatggcaatcaactaatgtctccgtccaaaataaatttatttttcacctatttcatgcatacaaatataaaataaaaaatagaatatcatactttatcaaatcgcaatgtaactactttttaatttatctactcctaatataattattctctacttttataaactccgatgcaataattactcaaaaataaacttactgtaagataaatgaaatgatctaaaaccaaacttattatgaagcatttttcacttatctcacacatatcaatacaaaataaaaaataacacagccatattttattaaatcctaatacaattatttctctttttatctattactaatatatttatcttatctcacatatatcaatacaaaataatgattactaaaattaagtttatgttggatacaagaagttattatgtaacagagggaggagtaactattaaggcttgtactctcttcatcccattttaaacgcagtcatgagttttttttccaactctaattatacgtattatttaaaattattttatggttagtattttttattgttattttataataaaacataaatagtactttgtgtcttatttatgtgttttaaatttttttaaataaaacgaacaacaaaaattagacatgaaaactcatgtgtgcgcttaaactgggactatactacctaagctcggtatcgtaaaaagctgcttagctcggctatatatatattggtgcgctgaaagcctaggttggttccggttcgcaagttaactcattacgagctttggcttattcatattacctttacgacttttagctagagttctgacattatacatttgccgatttatcatttgctagtcttaaacattattccttccatcctaaaatataaacattaaaaatcaaattcataactaaaatttactgtattttaaaatggatgtagtacactacaagacttagaacctagcctgtaggagcgaaacaagtaattaaaaacttacgagcagggttcactgtaccgtcggtaaccgcgcggttaccgtggggtacggtaatgtaaataccacggtaacctccttaaattcaaataaatttaaaaaataatttaaatttttgatgaattttgtacagtttttcacagttaccgtggtttaccgtgcggtaaccgtgcttacggccggggcgcggtaaccccagcctcagcggtttgggaaaccctgcttacgagtaaatacaaatacaatagcttacaaacaatcggagacttacgagtagtattgagtaagaagcataagcataaatagagatattggtcttgcatactaccaagcttaacacgccccactcccgtctcaaaatattacaagcaagctaaaactggacgagatacattctagtataataaatctagacagatttatttagattgtaacacataattaattaactattagctaaaaatgtttaaaaaatgaattgatatgatctttttctaaagattattttcccaaaaacatattgtttaatagttaaggatacgtgcatgcgaggaatgagagagtgcaggttgagaatcttgagttaagaagacagccaagggcaaatgaaatggtgaaactattctaaactctcgaggcgacatcccttcgttgtttacatgtcactcaaatgataagaaaaaaattgataagatagattaataacgatgtgttagatcactccacaaacatgcaaattaaattttaacttctacactttgtaaaaaagacatgtgtgactacgaataaacattaattagctgtagtttatttttctcattgcaacttataaaagttggattttaacttacatgtttctaaagtgatatagtatatgttaatacatcttctcaatttttacaatatttttataactattctacgtgtcatgcaaacaataaaaagacatcacctcgagagtttaaaatccactctcaaatgaaatgccattcaaaattgtctgatcggttgagcaacaaaataagctataaaaaaattaacaaagcaaaaaaagtaatttataggtaaataattattactagaattttaaaagtagtaggcataaaaatacaatcaccaaaattaaattataaagttctaaaaagaatcaaacccaagggatgaatattaacatacatgtgtggattcatcccaggttttgatttcttttttcacagagagagtataagccagcaaaaagacatgaaaaccgaatctctctaaagaaatctactcgacgtacgtgttgcagttcccacgctagttgcattgggaagacgaggaaaaccaagccatggcgtcggcgaggcacctccggaacgtgtccatgcgctccggcagcagagctatgcccacctcgatgccgccggcgccagaacgatcctccgccgccgacaccgcgccggtcttcgccacggacacgatctccaccttcgccggcctcccgaacccgaagtcgacgtcgtacacgcggaacctcgtcgacccggccaccgagaacggcgcgtcgtccctgcacgcctccacgatgcgctccttccacccctcccagtacgcgggctcgccgcgcaccgcctcgtcgatggcggcggccaccgccgcgcaggccgtgaagacgccgcccgccacggcggcgccggcgagctcctcctcgggcgccgagacgaagcccgggccgacgcagttgccgaggtacttgtcggggacgcggggcaccagccgcgaccggtggtcgacggagaagatgaagtgggcggcggcggcggcacggccgctgccgccgttgtcgctttcccgtctggagcggcggtagcagtgccacatgaggccgtacatcgccacgagggacgtgcaccgaggcggcggaacgccgcgacgtgcggcctcggcggcgacggcgtccttgacgccctggaggtgctctctggacagggtgaaggtggcgaggaacttgccggcgtcgggcgccttgaacagatctttggcttcgttcgtgggtgcggcgaactcgtcgtgcatctccggtacgtcgcggatgagcgtgcggtcgatgacgggcggctccgggagcttccggtcgccggcgcaggcggcggcccaggtgtggaggaagtgcgtcgagcccaccccgtcgcaggcggagtggtggacgatgacgccgagagcgaggccgcggcgcttgggcggcagcacggtcacctgcagcgcgagctccgcgccgccctcgggaagctccgggacgagcggcgcgatcttggcgagctccctcggctcgtccgtggcgagctcgtcgacgccgacgccgacgccgtcgtgctcggcgacggtgaacgccacgccgtcgccgggctggtagaggagctcgtaccggttggtctcgccgggcgtggggcggacgcggccggcgagcgggtagaaggcgtggatcgcccgtggcagcgactcctccatccgggacagcacggcgtcgacatcgtcgtcggggccgaggcggtagaagaagacgcgctcgacgggctgggcgcggagccacatcacgtccatgaagatgagaggcagggctcgcttgggcagcgcgggctggccggcgggcggcgccggcgcgacgcgcgtcgtgcggaggacgcggaggccagcggcgtgagcggccggtggcggcgccatggtctcgccgcagaacaggtgtggtttgtgttgctcgtggcttagctgcagagcgatggagctttgcttctactcctataatacaatacaatacttatatctctctcacttcacttgtccatatagtaattaatttctaaggttaattagatacatatatcattacaaatttaacggttttaaaatattttattactattcatctaattgaaacaaatatgccactaaatatctccctcacttcactagtccgtagccattaatttctaaggggtactttctttcttaaataaaacgttttgagttttaaatagatcatgtaagcttgatatatatatatatatatatatatatatatatatatatatataatttaaattatacgtatattagtgactctaaacgactgacggtggtggagaaactaaactatcatattattagaatggaggatgagagtaggttattctacctaatcatgtgggactaattgccaatttcccattggcatttgccgagatgaacagtgatgtcacggctgacgacgggtactacgaaatgcttgcaattttgaggctatgagccaacagtttttgggtgctagtttaagctgggatggagggtctgtttggcacaactccagctctaactccacctcttctgaagttggagttcagccaaacagtttcagctccacctaaaatgtgagcggagctgggtgaagctctctcacaaaatgaactagaaaggtggaggtgggtttagacagctccacaactgcactccagacctaacttttggagcaaaatttttaggagttggagctctaccaaacaggtccagagtgtatggtttggcgtcagattcgttggtgccataaaacatggaagtggattcagaggatctcgttagtgccttcacaatgtgctgagctgtcatttagcccgatctctccacgtcagaggttcaatacgaatctttaccatgttcatgagcgggcccaccaaattgaagcccgtgtgaccctttttgtcatccgttcttggcacggggagagaaggctgcaaacgcgttgggagggtgtggcttcattccgcttttcctacatgcactgttgaccttgtggctttcctaggttttggtggcgccttaggccaagcctatgcgtgacccccttaccctcccatctatagatgcaatcatgctcttagggatggcaatgatgatattagatttgctttgaggttcgtgcaagccctcaaccctaactccctctctttctttgtttcctcgtaatgccgctagttctctactctacccaatttccccgcctcctatgttgctacaacgccacccccaagccttctctcacacaatctaaatagaaccctatctgacattgatttatttttaaaccatactagaataattttgtttaagattttaccggaatcaataaaaccattactgacatgtgctattgttaataattagtacatccgtctcaaaatgaatctatcactactacaaaactcctaatatgtactagttttccaccttcaaaaaatagagaaaatataaaaccgatatctttgatcaactatatgtaccggttttaaataaaactagcacatataatattagtgcaactggcatctacacttgtattatctgtgccagctctaaataaaaaatcaacacatgaaaaaacgatctgagctaagagccgagctgaacccatccttatctactcaagtgacttgtacttatcctcgactctctctcgtgcttctctccctcttcctctccttctccagcatctcaccctctccttctccagcgtgcttctccagccattgtctactaccttcaacgacactggcgatgcagcggcagaggcggccgccctctgtccatggagagcagaggtggccagtcccgagctcgggacaaccagatccacgcgcggtagcctcttccttcctctcccctgcgtggcgcggtggcggccgcctcttcctctacctagtgcagtggcggtgaccccttcttgttctctgcacgtcacgacaacagttgcgatgattgtctcttcctctccctgccccagcacgatagacactggatccggccaacacgatggtgactgcaggttattcatggtggagagtaggaatctaattggattgccaatatttcagaatgaatttttgtgatttatgatgtttgatttgtgcggggatgttgttgttggatggatccatggtgatttgtcctatgtgatttggggatgttgtaggatggattgatggtggtatgtggatttctgatgtgtgatttgggtaatggggaggggctcgatgcatcggctcgttttgagccgatacatcgagctgtcttttcatttgtggagtttcaaaggtgtcagttcgtaaactgccacagttgattcctccatatcaatgcctcttgggctgcgtaggttgagaaatccaaacatctatgtgggcttcccaaccgacacctaacacatttatgtgtatttctcccttgccccatcatttcaactaattacaagcattctccatttaatttcttcacctacttactttttttcaattaatcaaaatttttataatcattttcacatatcctcttactataaagttagagcccactaaatcctaaagcttaacatacaaagatgtcacatcatcatccactgataattacaacactcaggctgtgtttggtacggagagtttggaactctcccttcaaacacgtaaaacgaggtggttcattaacacgtgattaattaagtattatctttttttctaaaaaatgatttaatatgatttttttaaagcaacttatgtataaattttttttacaaaaaacgcaccgtttagcagtttgggaagcgtgcgcgcggaaaacgaaagtggtgtggttgggagctcaagctgccgaacacgaccttaaacatcatgcaagcatgttatattatctataattttataatatattaaattttatagcttatcaaatgcaaatatattaaatcatctcacataatatttgattatgtctcatcatctttttttataatatcttatatacctatatagttcatcctaactcgtaacttagttaatgcgctctctctctctcttctctcattaagtcatatcacatcaattgttttgtccttaaatgattatctatggtccaaatcatctcactccttttcttctcttactagaccttacatgattaatctatgatccaaactatctccctccttttcacatcaatttacttttatatttgaatcatcattctatatactatttaaatttaaattatcataaaccatacttgttagggttacgagtaaggtataccctctacccttcgatatacgctacatatcgatatggtatgcttgcgcgtatacggacgttttcggcataagttaaggaagtccattatggagtccacagatggaaagagtcctacttagatagaactgggtcgtcattgtatcgtaccgaatccgatgtctccgagtcctacttggaaaccagttgacctgcggtataaaagggacccccgagaggacctaaggcatcgaatcttaccaccaacacatccactacagcttacgaagccggagcctccaggagccaagtcgccgggatatctagtcgaatctgtggtttccatcatataatcccatatcaactggattagggctattacctaccaaggggcttgaaccaatataatctttgtttttctgcctgcttgatgtcgtactacgtagatcctcgtaccagcgtaccccaataccctctatatccggtctacgtgtatctcccgtcgatagtggcgcgccaggtagggggacttggtgctcaaggttctactattatgacatcctgcttcgtcgacaacagcatcaacaccaacttcaaccaagtagttcctacttcaacaacgctggtgtggactcaagtcggcgaaatcgtcttcccggtttacaccacagtgccgatctcagctggcccgccgatggccggaaatgagaacgcagtggctacaacccaggacgactctatgtcgaaggatcctcccgccgaagcggagatcggaacgtcgacgatatccgagctcgagaaggaacctagtgcggccaagccttgtccttctgacaagaatcacgagccgacgaggatgacttctgaggtgacaaggtcctggtgtcctatccacaaaaccagaaaacatgccttgcaagcctattgggtttttctcaacgtccacgctgaaattcgtgccggcaaaaagcgcggaattcagcgtacttctccaactcgtgatgtctattgtcctattcacaagtcaaagaatcatgacctctcgagctgcaaggtctttctcagcgccatgaagacgccacctcctaaggtccagcagtcacgcgtcgcccttagggatgaggacaaggaacaaggagcgacgccgatttcagatcgatttgttagggtagtcgacatcgatccccacgaaccatcagtcttgcacctgctcaaagactatggttcattgacaacgagtacgccgcgcgaggtattggctatcgacgatgtcggcacgtcagcacacgcaaatgcggaagcggaaaatcaagtgactacaccggcccagcacattggagccgtcaacgcaatattgagggaaaccctctatgatcccgttctgaacgacgatctcgcacgatggacagagcgtttacgggaatcagtgaccaacctcagcaacgcgttcgaagaggccgctgctgtagcgcacccggaacagccaccaactggcgatgctaatggtgaaaaccctgaacagcgggaatcgcctcactgagccacccctccacctcgcggcaccggcgatctccgtgatcacctgaatggtcgccgagaggcgcgacacacacaagacaatgagaaccgttcccgacatcgcatctcttcacggcgtcatgataatgaagaacgaggaggccgttcgagcgaagaccgagaccatgataaccgccacaaccgccgcgatcacgacgatcgcgaacggcgggtgctgggcgatactagtcgaggacgtcgccataatgacgacgacgatggagatcggcgccgagacaacaatgggagacgacgacaagattctcaaaaactcggccgacgtcctcgtaatcgtacgcgaaaccaagcgacccatcgtcatcatcgtcatcttcctcatcctcatcatcagatagacatccgcaaaggacgtacgatcgccgacaacccaccgcccccagcgctgtgttacagctttcggccattcacttcgagatgtccgatggcctgaaagattccgacctggagcaatagagaaatacgatgggagcaccgacccagaagaattccttcaggtttactccacggtactctacgctgccagagcggacaacaacgcattggcgaattacttgccaacggcattgaaaggctctgcacgttcatggctgatgcatctcccccctactccatttcttcgtgggcagacctatggcagcatttcgtcgccaacttccaaggaacttacaagcgccacgcatcgaagacgacctacatgcattgacatagaacccgggtgaatccttgagggattatgttcggcactttaacgagtgcagaaaaacaatccccgaaatcaccgatacttctgtaattcgcgccttcaaatccggtgtcagagatcgctacactactcaggagttggcaacgagacacgtcacgactactcggagattatttgaaattgtcgatcgatgcgcccatgcggacgacgcactgagacgcaagaacgacaaaccgaaaaccggaggagagaagaaaccagccaagggtgcacctgagtcaagtaagaagaaaaatcgcaaaagtggaaaaaggaaagctcaatcggaagtcctcgcaacagaatacgcggaccctcccaagcgcccagacccacaaggtagcgacgcgaagaaaacatggtgccctatacacaagtcagacatacactctttagaagattgcctcgtcttcaaaaagtcgctcgcaaaacatatggcattggaaaaaggcaagcgagtacgtgtggtcgagaaggacgctgagccagctactcaggaatcagactcaacatatccagactccgatctccatgtctcgcacatcttcgggggttccacggcatactcctcaaagcgagaatacaagaaggtggaacgtgaagtttgttcgatgtggcaggggctgcgcccaagatgaagtggtccgagtagaagatagaattctcagaagaggaccacccaaagactgctgtcatcccagggcgatatccgatcgtgatcgaacccactattcgtaacatcaaggtcgcacgagttctaattgatggcggcagctcaatgaaccttctcttcgccagcaccttggacgcgatgtggatcccacgaagcgagttgacacccaccgatcaacccttccatggaatcactcctcagtcatcgtccaaaccattggacaaaattacgttgcctgtgactttcggccaagcaaacaacttccgaatggaatagatcacctttgatgtcgctgaattcgatacatcatacaatgccatcatcgggagaactgcactcgcgaagttcatggccgcatctcactacgcgtatcaagtactcaagatgccgggaccgaagggaacaatcactattcaaggaaatgctaagctggcagtgcaatgcgacaagcggagcgtcgacatggtcgagcacacgcccaacccacctgccacagctgagccacccaagaaagtgagcaaaacaaacaagatgccgaaaccggacggtgcaatcaagatcgttccactctccagtgcaaaccccaacaagaccgtcaaggtcggggcatcactgggcgagaaataggaactcgcgctcatcaccttcctccgtgacaatgctgacgtgttcgcttggcagccgtccgacatgccgggggtacccagggaggtgattgagcacaaacccatggtgcgacccgatgccaagccagtaaagcaaaaactatggagatttgcaccagatcgaaaacaagccatacgagaagaactcgacaagcttctcaaagccagtttcatcagagagatactccatccagagtggctagcaaacccagtcatggtgcggaaggccaacgggaaatagagaatgtgcattgatttcaccgacctcaacaaggcgtgtcccaaggatcacttccctcttcctcgaatagaccaactggtggactcaacagccggttgtgagttgttgagctttctcgacgcttactccggctaccaccaaatcagcatggcgaaagaggacgaggagaagacagcattcatcacgccgttcggggtattctgctacgttaagatgccgttcggactaataaccgcaggaaacactttccagcgcacggtccaaggtgcacttagaaaccaactcggaaacaatgtcgaggcctatgtcgatgacattgttgtcaagaccaagacaagctactcattgattgatgatctgtaggaaacgttcgacaacctccggcgatatcgcctcatgctcaatccagagaagtgcacgttcggagtaccatcgggcaagcttctcggcttcctcgtctctagcagaggaatagaagcaaatcccaagaagatcaaggcaatcgagaacatgaagtcgcctacaagactcaaggaagtacagaagctaaccggatgcatggcggcactaagcaggttcgtcgctaggataggagagcgaggacaacctttttttgctctgctgaaaaagcaagacaaatttgtatggacacaggaagtcgaagaggcattcattgcactcaagcgctacctatcaaatccacctgtacttgttgccccccaacctaatgaagaattatttctctatattgctgccacgccatattccgttagcactgtcattgttgtcgagagagaaggtgcaacgaccagtctactatgtcagcgaagctctccacgatgcaaagacgagatatccacagatccaaaaactgctctacgcggtaatcatgacatcaagaaagctacgccactactttatagcccacagggtcatagttgtatcctccttccctcttggtaaagtagtgagaaacaaagacgttgtcggccgcattgcaaaatgggtagtcgagctaagctagtttgatgtccgctttgcaccacgaacagccatcaagtcccaggtacttgccgacttcatcaccgattggactatgcctgataacaggtcagacaaccaaatcgacaacaaaacgtggacaatggcgttcaacggcacactcaacaaccaaggagtaggggcaggattcatcttgacatcacctttgggagatcaattcaagcatacaattcacctcaacttcagggcgactaataacatagccgagtacgaaggactactcgccgggataaaagttgcagctgcactcggagtcaggagactgatcgtgaaaggcgattccgaactagtcgcaaaccaggtgcataaagattacaagtgctctagccccgagttatccaagtatctcgcagaagtcaggaagctggaaaaaaggttcgatgggatcgaggtccggcatgtataccgcaaagacaacatcgaaccggatgatctagcagggcgtgcgtccagacaagagccacttgaacctggcacctttctggacatgctgaccaggccatcagtgaaagaggcaagcgacgaagatagcctggtcgcccccagcatcagctcgagggctattgaggcagagcgcgccgttcccgatatcgagaccacagacgactggcgcaccccactcattaaattcataggcagcgaagagttgcccgaggacgacgcagaagctgagaaaatatcccgaaaagcaagagtctactgtatgatcggcaacgatctacacaagaaggcaccaaacggggttctcctaaaatgcgtctcgtccgacgacggcagacacctcctcctcgacatacatgaagggatctgtgggtcacatgccgccggtcggacattagtcggaaaagcttttctacaagggttcttctggccaaccgccctcatagacgcctgtgacatggttcagcggtgtgaagcctgttaattccacagtaaacacacaaggttaccagcgcaagcactctagactatccctctcacttggtcgttctcgtgctgggggctagatatactcgggccattcccacgaggacagggtggctacaggttcctattcgtggcgatcgacaagttcactaagtggattgaagcgacacccacggggaaatcaaggccgacaacgccatcaaattcatcaaagggatattttgcagattcggattgccccaccgtatcataacggacaacggctcccagttcatcagtgccgatttccaggattactgcatcaggctaggagtcaagatctgcttcgcctcggtttctcaccctcagagcaatggacaagtcgagagggcaaacggcatagtactacaaggaatcaagacccgcgtctacgacaggctcatgtcgcatgacaagaaatgggtcgaagaacttccatcagtactatgggccgtgcgtaccacaccgacaacatccaacaaggagacacccttcttcctcgtgtacggcttagaggccatgctccccaccgagctacgacatcaaagtacacgagtacagaagtattccgatgaggatcaggaggagcggcgaaatgacgatgtgaatctactcgaggaacatcgcgaacgagttgccgttcgagcagccagctaccaacagtcccttcgccgttaccacgagaagcgcatccgagcacgcacgctttcgatcggcgactacgtcctccgacgggttcaaagccaagcagggcggaacaaactctcacccaaatgggaaggaccgtacacgatcacacaagttgtgcggccaggcgcattcaaaattgcagatggcgatggtcgcgagttgacaaattctttgaacattgatcaattacgtaatttctatgtataagtcaatagtatccatacttgtgagacatcttacagcttcaacaaggcctattttcaggtccagaccacaatcaaagtgttccttcccgatgatcccttacccagatgacacctagcgttgaaacctatcatcatgtccctttacgccgtcttgacaaggcctccgaggtacctaagggaacttcggctagggacgcccagagccgataaggccttgtcggatcctgtagagacgaaagaccatgtaagacctggtcgtgtaagagttctcaccgtgcgtattaaccaagccgtgtaattggaaataaactttccaacttcacggctgggggctaggatcagtgcttgttcaaccgaggcaggtcaaaggtccaagagccttatcttccgagaacaattctccaatgacaaggctgggggctagcgagagtgtataactcaaacgactgatcgaagtcgcgaagtgagaagacactcatacacgctacatctagagtaagaaagcttagttatatagatttcttcactatttcacaagtacttacaattccgtcaaaatcaaaagttatattacaccttttttcctaagacatttgtcacaggatacagagactactaggaaggccaacgctagtccatcgactggaagaccttctccgccagcggcgccatcgacttcgccaggccgtctatctccgtaggagttctccgagaacgagaaaacccttcgcggaggaactcgaggtgcagttgcggacgatgatctcgtatgcaagccaacacatgccccccggcatatcagcttgatcgacgacactcctgcttcaaggcctcgtcgatgcgttgaccgatgccttcaagctgggctcaagccccattcagccacgagatgtatctggccaccgattcctcgggatccccacggggtactcagagctccctacaaactcttgacatgaacgtgcaacaactcttcctatacaagttgaaccacacctcacgaccccggagtgtctctacggcttggtccttcttcacttccagcatagccctctcgagttccgcgacctcaaacttcgtcctccaatactggatgcgacaatcctggtctgcaagcgcactctcgaggtctgcgcagcatggaaacaattaagtcaagctactcttctctcccgagaacacagcaaatctagtcggtccagacagaagcataaagaagatgagaacaaagacaaccgacctaagggagtcgttgctaggctcgtccccacaggcgaactttgatctacatcgccccccggcacaagtggctcgaacgcaagtgctggaacgatcactggcaactcaggcttctcgcgctgctggacatcctcgacatcaacatctctacaaacgacaacaaagtactcaagatcaaaatgctaaagaaagctaaggtgatgaccgcacacacaaaggcagttggaaccaataagagttttacaaagcatgactaaagagtacaagagagctaagatcctactcttcaaaaagtgggaggacggactcccccaggtcgccgacctcctccatcacatccttgcgcgcatcgctggccgccccctgatccaagatcttccgcagatcgagttcagggtgcgccagcctcacacatgcatggacatggcacgccccggtatagatcctgttggacgtctcctctccgatcctggccgcgtgcttagaggggatctcctccatcgccgccgccagctccgcaagagaagtcgtcagggagaactcatcgggatacgccgggatggtagacttgatgccgcactccccggcgagctggtgcagcccagtataggtggcccacaacgagccacggatctccgacaagttgttctcgagctccaacatgcagtgctcaagtccctgccgttgtcactcattgccgaccactagttccctcatcttctggaggtcctcgcgaacctccgccaagttgcccgccagccggtcgtcgcgctcattcgccgacgacgccaccgccgccctcgcctccgcaatctcgtggctaatgccgcaagcactagcctcgaggaggcgccccatctccacctggagctcctcccaggtgaggacggcagccggcgaacaacggccagccacaagatcgctggttgggccgctaggtgtcgcctcgcggctcctgggcactgccacgacatccgtcgaggccacagcaggagacgcgctggaggtccctccagacccgtcttgcgccgccatcgcccgcgccgccctgcgaaaggctgcaattgagacagactgcaagagttcgacgaaatcacggaacctcgaattcattcacttacttctcgccgagcgtcactagctgctgccgtcgcggaggcgggggagacgcgtccgaggcctgaagtatgacagatataatgtgaggtgaaaatcttccgactacgtgataaaagaacaggagaacttaccgagggggtgggtgtcttccgacgatgtccgaccacagaggagaatttcctcccctttttcggaacgttgccaccactcgttgtggcagcggcagcagcagcgtcaggcgcctccttggcgaccttctccttcagcgacgccgccacctgatggtccacgagcggcccgatgatgtcagtcagagggagagcctacacttcatgaagtcataatgcgatcccggaagaaaaatgcaaaaggaccactcagtacacttacattgatggcagcgtcgcgctcggctgcccctttctcgcaaaggggaacggggacatcgctcgacgttgtcgggccactgatcatcagttggccgacgcggcgctccacaggtgcgctgtccaagcctgtagattgagaccagagtcagataagtcgggaagaacacgcacaaaagggagtcaatttaactaaaaaaggaaaataccccgaggaggggcactggaagggaatgtatcgtgacttcaggccatcccgaagtcggaagccaacacacccggacacctttgtgggttccatccaatgtaactcatagtaaaagcggaagaggtcgagaaacagctctaccccaatgtaggcttcacaaagatgcgaaaagacactcaggaaggcgatggaattggggttcaaatggagcaaggaaagaccatagaaattcaagaccaagaggagaaattcagaaggcggaggaagaaaaccgcagagaataaagtcctcgatcacaaccatgtgacccaggacaggctggggttcagtacctcctacttctctctccgcggtctcgcgaccggggagggcgccttcttcctgcagtttcttcagcgacgcgctggtggaggtagacttgtcgagatccattgccgccggggatcgccgaagaatggaccgagatgagctagctagggtttttgcgggagcgaagaagacgagggacgcttggaagctggagagctttttcaacaggcgggcttcaaattggatccccaaaacccccgtaaatagacgcactcccgatggtgcgaattccaaggaaaggagagagatggccgccggaaatttctgggtccgttacgcgcggcagtttttcggacttcaatttaaattcactcacgaccgttgagcttcactcgacgttgtcgatcactccttgtctctcggccctcacatcgagaacgacgacaacttcgacatcagaagtcgcgatcggtctcacgagttcatttaagcataagtcgggggctactgtcagggttacgggtaaggtataccctctacccttcgatatacgctacatatcgatatggtatgcttgcgcgtatacggacgtttccgacataagttaaggaagtccattatggagtccacagatggaaagagtcctactcggatagaactgggtcgtcattgtatcgtaccgagtccgatgtctccgagtcctacttggagaccagttaacctgcggtataaaaggggcccccccgagagtacctaaggcatcgaatcttaccaccaacacatccaccacagcctacgaagccggagcctccaggagccaagtcgccgggagatctagtcgaatcaactcgactacgatctcatcggtatcgtcaagttccgctattccctttgtaatatgtggtttccatcatataatcccatatcaactggattagggctattacctaccaaggggcctgaaccagtataatctttgtttttctgcctgcttgatgtcgtactacgtagatcctcgtaccagcgtaccccaataccctctatatccggtctacaggtatcgccagtcgacaaaacttacaaaccatatcaacttatctaagtttatattgtctagctatcttacacatcacgtttactttgtgctatcatacttaatacatgtgtacacctaaaaagaatcttactccctccttctcaaattgatcatcatataatggaatttaaaatttctcaaattgatcatcatgtaaccgtatggatacggatttcgtcagaatataattaatgcggtatggtcgaatgtgtgcatgctaaagtgtaattagcatagtcttttaatcgatacatacattgtgagagactgtatacatggcgtgttgattgatgtgatttaaattattcttggccttggtatagaaatatatacgattatcagaatgaggaaataccatttaggacaggttagtaatctctaactgttgacaataaaaacgaatctgagacgtggaaaaaaaatcaataattgacatacagaaaaatatgctagtaaaatagaaaggttcctgtgtccaacattgatcatccgtttatcacgtgaaaaattgattctccctgactacctgcactcctgcagccatttaattatcacatgaaaaattgtactatataggggtatctcttacttccttcgtcctattacatttcaagtactgtacttatgaactttttacgattacttttttatcataaaacgttaatagtactttatatgtgaatttttatttttttcataaatttttcaaataagacgaacggtcaaacattgaacacgaaattgcataactagacataatgggacggaggaagtactgaattctctacactgtagactttagagtagagctcacttcttacgccaatatatataatagattagctataaaattggctataattttcttctactctctctatacatatttaatgtatttgtcttgtaacctgtgataagagcagatacaatgggcctgctcgcctgccaggtacagtagctgcctgcgactagccgctgctttttttttcgcttgcttcactgcaggcttcaacactgctgcagcctttgtagctgaacagacccaataatagactataagacaactacagacttacgtgtaagagatagaacatatagaagagaagcggactacagatttgtaaccagttacagcatagacttcaaaaggttgtgcctgtatgaaaggtgggagcaattattaatgatgtagtatatatatttatagttaaatattatatgaattgactattaattgatttggagctagtaattggctatactatatagagcaaggataataatacagccaattgcttactgtatagatctttatagcatatgtgctcactcatatagtggttaactcttcatgcataagccggctgtaaactaacagcccgcttcacatctctctcctctcctctatcatccacctcagcattcagctttcttatagctctctattatacttgctctaaatcagctcttgcatgagagccaacgcccttgaaagctctcactattatacttgctcttatataaatataaatattgttgttttcaatgtcagcagacttttacgtcttcattatcagtatagaaaaagcgggaatttatgataatcggacaaaccgatgaagtagcttaagtagtcttaaatctaaaatagatcctagtacttgtatgatgactcgttcaccgttcaagatattgcagttttgtactactatcagtgattagccttaacatcgaatataaaattttttgggcatggtaaaattgcacattattttttttgttaatgtgatccatgccactgtaaatttaaatttggctattaaaaaaaataccactattcgctctactgaatttttatgaaattagaaccgtgtaactaccataacgttttccatccatccccaccttttccgtcttcctacttccttctcccatcttctgcggtggagcaagcgtcggcacggcacggcgtgagcatacccgacggcggcgacgaagactcgaagacggcggcgaggtgctcctgctgcttgccgtcgtcctctcagctgcagtcccaggcggtgacagtgcgcgccctgcgcgcccgcatctaccacgccgtcgcgccggcggagctcctcctagcggcgttccgccgcgtgtccgtgctcgccgaggaagctgcggcggcgctcccggcggacccggcggacgccgagtgcgtggcggggttcgtcggccgcgtggaccagctgcgcgacaccatcgaggcggtggtgcggcggcgacgaagactcgaagacagcggcgaggtgctcttgctgcttgccgtcgtcctcccagttctagtcccaggcggtggtgcgcgcgcatcgaccgcgccatcgcgccggcggagctcctcctagcggcgttccgccgcgtgtccgcgctcaccaaggaagccgcggaggcgctcccggcggaccctgcgtacgctgatggcgcggtggggttcgtcggccacgtggaccagctgtgcgacgccatcgaggaggcggtggcgcgtggggacgaggccgtgaggagggtggaggaggtcgtgggtttcctcggccaaaccaaggccatcggccgcagttgcgtgcggcggctgaccgatgcggtggcggcggcgctgcgcgcggtgtatgaggcggaggcggaggagatgcgcttcgagggccctctcgacgaggcgctgctcgacctccaggacctcttcgaggcggcgaggaggcggtcggagaggcccgccacgatggggaagaagagagcagctggtcacactcgacacccagctgcgttgctcgaccacgccctgcaggagaccaacgctagcatccacgctgcgctcgactgcgctcgaggttaccttgccggcaagctccctctccggcttgactccgggaagatgatgggagaaggaaggaagaagacggaaaagatgggggatggatggaaaatgtgacggtatggtatggtgctaatttcgtaaaattcaagtggcatggttattaatagatgaattataatggtatttttttaatagctagatttatagtggcatggatcaaattaaccctatttttgattggagggggtaacagattgataatttttgttgggtgtagttccatcgggttccatcgtgggtggggcacgcaagcattaggaaagttttttcaaaaacactatatcgaatttttggacacgtgcataaagtattaaatatagattaaaaaaattaattacacagttaggggagaaatcacgagacgaatttttgagtctaattagtccatgattaaccataagtgctacaataacctatatatgctaatgacagattaattaggctcaaaagattcgtctcgcggttttcagacgagttataaaattagttttttcattcgtgtaaaaaaaaaacatttccaatatccgataaaacctaaaatattttatttcgcgaactaaacagctccttattttccaagcgccatcattcgtgaggctcatacacccgctcagttcacatgcccctgctgcagctcagaatgatggcgctcggaaaatatctgcatatcgtcaaatttaattttctctggtaacctagctcaactgaacagattttctttaaccaatctacccggattttaattagatttgatccggattttaattagatttgatagggatattcgatgtgacagcttaaaattttttattttgggaactaaaattggccaacatatccctgattcgaaaataccgacgatggctatcacctgctacttctgtccgaaataaatttatttttcactcatctcatgcataacaatataaaataaaataaactaaaatatcatactttattaaatcacaatgcaactatttcttactttatctcactgctacgaaaatcaatttttcatagcatcaacctacttttttcttaagcggctatacacaaccaccgccagtgaaaatgtaacgaggggaagggagttacggtccaaggttaagagagccgccagcaaaaatatctagaatttcacaggcagacaacttaacatatcggccgtgaagattaaatttcacaagcggcaggttaagagcactgtctgcctaaaaaaaatccttaaaataccctcctctccctcccggccacacaccctctccttaattactcgctggcggtcgggttaacctagccgcttctgaaaattgatttgcgcaagtggtgaaggttcgcctgtgaagatgttgattttcactagcctttaatagatggtgaggagctgagccgcatgtgaaaacacgttcggactgcctggaaaaactcatttttctagtagtgtctactcctaatataattattctctatctttataaactctggtgcaataattatattactctaaaaataaacttattttaaataaatgaaaggatcttaaaaaaattattataggacatttttcacttatgtcatacatatcaacacaaaataaaaaaaataacattgccatactttatcaaatcctcatacaattatctctttttacctatttctaatatatttatcttgtgattttataaattttgatacaatgattactaaaaggaaaaagtatataataccctctaaactatcacggtcgaccgaattaccctcctatattgaatacacgaagttattctagaatagagggaggagtaactgttaaggcttgtactagctaagctcagtatcataacaagttgttaacgaccaaattcggtaatcgtcatcggagatggagattagactgaagcggaatctaaaatagagatcgtccaggaaacagagtgggaatcggctaagtccgaattggttgtggctttaattggcagagttcgagtcggacaaggttagccgaatccgacaatgtgacacggcatacgttgttgggttgagttaacgtgcttcatgaggattgccacgcatggattgagtcctgagaaggcaattgtatctattaattaggatatttcatgtaatttccttagagatatgtttggacaaaagtctgccgcaaagacttatggtatcttagagtttgttagagataagagtcgtgtgtgacatggacattttttgtaatatcgggtataaatagaccccgagccccatgtaatcaatctaacacacgctcaatataatctcggcgcatcgccaccctttactttcgttttgtttcgacgagttcttgctttcgggttgagctgcatcggattcgatcttcaactagaggtaaaacttcttatggcggcttgcgttctcgggattagtgcttccatctttatgatactctaatctcatttatgtaattcgtcgagttatcatatatcttatataatctctggcaatatcgctatttaaccttcaatcggctaacgtctgttaccagaagacagccgatcaggttaaataccgacgttgacctagattatataggatatctaccactctatgaaagatccaacggcttgattgtctagatattatccttcttttcatacttatagctgcatcagttgagtttgatcttataagtcgtgattagaatctcgatctctagcctgcttttggttgccgattagaggagcatcggggtttcagccgattttacctgatataactacttttatcttgtatgcttgattgacatgttaaatctaccctttatattaagatcttgttgcatttaagtatattagactttcgtttggtatattctacttgctttggtatcttaatatagagtagtatcggagtattagccgatacacgctagatatatatgatcagctatgttataaacatatgtagtcttgttgttaatacatatttcgatctaagtgatttatactgtctcagtatggcgaccgatctatcccaatcacttgatttaagtatatatcgatataaggattatatattgttaatgtctacagccgatcgagtagatttagtcctttcttacttattcatgactgccgatcgatttacatatgacatcggctcaaagataaatgatacgtcatcggcaactagccgatcggctattgtttatggatttaaccgcggtttctttgtctttatttcttgttgattgcaggatcaaatcaactggcatgctcacaaatctaaagacaagatttttggacctgcactgaagttaagcagatctttcaggcctcgtgtttttacatcaacacaagttgctaggctcggcttaatatagtgcgctaaaagtctaggttggttctggctcgcaagttaactcaagcgggttaataaactcattaagagctttggcttattcatatttcctttacgaattttagtgttctgacatatacatttgccgatttatcatttgctaatcataaacattattccttctatctaaaatataaaaatttaaaaccagattcgtaagtaaaagttatatattttaaaacagatgtagcagtaaatacaaatacaatagcttacaagtatttaaaggacgtagtattagaagcataagcataaataaatatatatattggtcttgcatattaccaagcttaccatgtactagtcctgtctcaaaatattacaagttagaacgggatggaatatattttagtacaacaatttaaacaaacttatccaaatttgttatatgtatctaatccgaacgaagggagtagcttgagctatgctggagtaaaatcccaacacgaaactcacttctttacatttagggtgtgtccatttggattggtttggaaatctctccccttcacacgtaaaacaaaatgacaaaataatacataattaattaagtattaacacaatagtttaaaaattaaattgatatgattttttacagcatctttttctaaagaatttttttaaataaacattatgtttagtagttcaggattcgtgcgtgtgggtaatgagagaattgatgttgggaaccttgagttaagaacacatcctaggacaaataaaatagtgatactattctaaactctcaaggtgacatccactcattgttgtatgtcactcaaatgactatgaaaaatttgaaaaagaaattaataatatagattaatatgtgttagatccctctacagacatgcaagttaaatttctcactttaacacgttgcaaaaaaaaattgactctgaatatacgttaactatctttaatttattttttcttattgcaacttataaaagtagaattttaccttacatgtttctaaagcgatatatctcatgttaatacatcttctcaatttttataataattttataactattctaagtgtcatgcaaacaatgaaaagacatccccttgagagtttaaaatccactttcaaatgaaatgccattcaaaattgtctgatcggttgagcaacaaaataagctataaaaaaattaacaaggcagcaaaaataatttttatgtaaataattattaccagcagtttaaaagtactccagaagggatgaaaatacaatcactaaaattaaattaaaaagttttaaattttatttcgacttactccttccgtccttaaaaaagaattgatcgaatgaatctaagtacatgtgccgatccatccctagggtttattattattattttttagagagagagagtataagccagcaaacagacatgaaaaccgaatctctgatgaaatctactccacgtactgcagttttcccacgatagttgcattgggaagacgaggaaagccaagcaatggcgtcggcgaggcatctccggaacctgtccatgcgctccggcggcagagctatgccaacctcgatgccgccggcgccggaacgatcctccgccaccgacaccgcgccggtcttcgccacggacacgatctccaccttcgccggcctcccgaacccgaagtcgacgtcgtacacgcggaacctcgtcgacccggccacagagaacggcgcgtcgtccctgcacgcctccacgacgcgctccgtccacccctcccagtacgcgagctcgccgcgcaccgcctcgtcgatggcggcggcgaccgtggcgcaggccgtgaagacgccgcccgcggcgtcggcgacggcgagctcctcctcgggcgccgaggcgaagcccgggccgacgcagttgccgaggtagttgtcggggacgcggggcaccagccgcgaccggtggtcgacggcgaagatgaaatgggcggcggcggcggcacggccgccgtcgtcccgtctggcccggcggtagcagtgccacatgaggccgtacatggccacgtgggacgtgcaccgaggcggcggcacgccgcgacgtgcggcctcgctggcgacggcgtccttgacgccctgcaggagctctttggacagggtgaaagtggcgaggacgtcgaggagcttgccggcgtcgggcgctttgaacagatctttggcttcgttcgtggatgaggtgatctcgtcgtgcatgttcggtaggtcacggatgagcgtgcggtcgatcacaggcggctctgggagcatccggtcgccggcgcaggcagcggcccaggtgtggaggaagtgcgtcgagcccaccccgtcgcaggcggagtggtggacgatgatgccgacagcgagaccacggcggttgggcggcagcacggtcacctgcagcgcgagcaccgcgccgccctcgggaagctccgggacgaacgacgcgatcttggcgagctccctcggctcgtccgtggcgagctcgtcgacgccgactccgacgccgtcgtgctcggcgacagtgaacgccacgccgtcgccgggctggtagaggagctcgtaccggttggtctcgccgggcgttgggcggacgcggccggcgagcgggtagaaggcgtggatcgcccggggtagcgactcctccatccgggacagcacagcgtcgacatcgtcgtcgtcgcaggggccgaggcggtagaagaagacgcgctcgacgggctgggcgtggagccaccccgcgtccatgaagatgagaggcagggctcgctcgggcagcgagggctcgccggcgggcggcgctggcgcgacgcgcgttgtgcggaggacgcggaggccagcggcgtgagcggccggttgcgacgccatggtctcgccgcagaacaggtcagggttgtgtgctcgtggctagctgcagagcgatcgagctttgcttctactcctataatacttgcatctccgcgagtgacttcacttcactggtccatactcgaattatgcccctaagttattaggtgagtacgaattaccccttaaactcaaaaataagataactttcaccctcaactattaatattggatgaaaacccccctcaaatagctttgagagcggttttggtcctacgtggtagttcagtcaacaattcttttatcaaataatcgatggggcccacccgtcagatctctcacctctctctctttcccctctcacacctctctctcgcgcgcacggatgccaacgacgaggatgaggcacgtgccggcagcactgcaccatcctgacggcgctcacttgccgccccaagttgccttagccacgccgccaccgcgccgccatccgccctccccgagtagccttcgctacctcccgccaccatcctgcccaccccgagctgcctccatacccccctccccgccgtacccccgccctcgcttgccgccatttgctgctgccctcagcgcccaagcggccttcgctaccgcccgccaccccgagctgcctctgccccctctgtcgtcccgctgccctcgcccaacaccatccaccgctatcctcgatgccctaagcggcctccgccatcgccatcgcgccgccccgaactgcgtccacccccgccgctgtcccactgtcctcgccagttgccgtcctgccgtccaccctcgttgttgtcacatcgctccgcccctaactcgccgccgtccggcactccccatttagtgatagagagagatggaggtgaggggagggagaagagagatgatttgggaaagagagatatagagaggagggggaaaagatagagggtgagagctgacaggtgggctcgttgataaaaaaactgatgactggactgccttgtagaaccaaaaccactctggtttgtcttagggaggtaattcgtctagtattaatagctcagggtgaaatatttctggttttcggtatatggagataatttatactcactcaatagttcaacggtataatccgtcccaaaaaacgaatctagaacgaaatgacgaatctagaacgaaatgtggcacattatagtataataaaactagacaaatgtatattcagattcgtagtactaggatgtgtcacatccagtactaagttggttttttataggacggagggagtagatatctagaaaaatcactaactgttcaacttaaattgataaagatattacaaggggcagaaaattataaaataaagcatactccccttgtatattgattcgccctagctacttgcagccacttaactatcacgtcgaaaaatatatctcttatcatgtatataaataatttttttcattgtggctataattgtttgtaataatagattgttgtagattagtacttatctatatctctctgagatatatagtttgaatccactgtcacttaaaactcaaaatacaaaaattggtcacatctctcacactagtcccaagtcccaactacctcttgtctttcccaagtcccaactacctcttgtctttatgatggctccaagcagtcaatgcctacatctcacacactactataaaaaaatacatttttcatgacactccattttattctcaacgatggacttaacaaaggccgtgtttagttcacccccaatttctaactttccatcacatcacatcacatctaaaattttcctacacatataaactctcaactttttttccaaactaccaactttccccaaactttcaacttttttcaagaactaaacacagacaaaagcatactgggagtatgtggtcacaactgtatgagaattaatttttacagattgtcggtttaggaggccacagccagaaaaataattctattttacgagtggacctcctaagggcaagttttatagtagaggtgaccatcacatccaattttatacatgatatacataattaaattaagaggtgacatgtataataggttgcctctaccacacaatccccaatatctctaacactctcacatgtttattaaagtttgtgtaggggttgccccttgcatgagatgtgactatttctctctcatctttcttctctcctccacctcactatatagtcctatgtggcatcttgaggtttgtgcttggatgcccatagtacttgccctaacctaaccaaccacctggaaaagaggaggccactttgaaaaaaaaattaatgaacctatctcctagttaccactcaccagcccccacttctcgatgtgtcctcccacaccggggacgtggtggatccggcattccggctccagctcaacatcgacatgagggcagcgatgacagtgaaacagagaaggtggagcacgtggaaaatatagtcatattttaatcctaaaaattaagacaataaacatgacatgtgtagcaggaattgatctagaaaaagtgctaaacatgaacatgctaatgactagaaaagcatcatagagaaacacatgtttaacacacaatagttaaaaatgtaacatacccggataacgcttcggtactggataatgcattgatggtgttgttgcctccgttgatgttgacgttctcgccttctccagtgacgttgcctccaggagcgccattgccgccacctctaggagcgtcgttactaccaatgcctctaccattacctcctccagtagacatagcgatgtagaggaagtagacgaagaagacgacgccgtgcagaaccgatgcagcagagcagttgcgctaggaagcgctccccaaaaacttaaacgcccgcatacccatgtaggtactcaagcgagctgagttcgggagacctgtttatcctaaacacttgttcatgcaagtgctttgaaccggggaagcagaggtgcagcgcaggaacagaagaagaaaagatgtagacaccgaggaggagccggtgcgcgaagagaggtggaatcaatccgggattgattcgttcatccggtgatgggtttgcatagtgtgtctctgttattggagtaataacggaatcaatcaatccgggaatgatttgattccccagccggctcggtgcgcatgtggtagtcccactaccacctctaccggttaacaagtgctctccaatagcaacctagttaagttgaaaccttccacataaatttttaaggtgacattaatctcttaacattaattgtgggcctataaaattcattaggaataaattaggcctaatccattttctctaacataggatacagcagtgacggggccggtgagcgttggatctggtggaggcaagcgttgagggtgccggatccaacagctgtagggttactgctcggcaaggtcgaccttgagtccatgatgacaccatcgggtggatacaggccgttgtgcctggtcgtctcctgcgcttgggcgatggtagctcgggagagctgtggcggctgtgctcgggggagtgacggaggcagttgcaatgagggagatgatgaccacgacgatcacgatctggatgctgtcggaggccgccgtgttttgatggttctcatgagctgttgtcccatctgcatgaatttatattttgatttggatgatattgagcttgtgtttagaggtgttaaagaggaaatacttacaagaaggaggtgtgttccaggtgaaaaatggtgttggctcccaattttggagaggtttgcttaatattagaaaatgggtgattttgggtgctgaatggaaagttggtgagggctcacatatctatttttggaaagatacttgggtggacaattgctctctaaaaattagatttccatccttatttgctatctgtaaccaacaagaggtggctgtctaatagattgctagtgagggcactgattgtctctctttcagaagatcttttggtccagctgaaataactgaatgggaggaactcaagaaagtaattgataatctggagacttcccctgttcctgacactttactttggggcctagctactaacaagaaatataccaccaaatctatgtacaggaccctgacctttaggggtataagagaggtgaatactgagatgtggaaaagcccctttcccatgaagattaaacactttctctggctagccattagagatagaattcagtctgcggaacaacttaaaaaaaaaagaggctggaatgattcagagttctgtcagctttgtggacatttggaaactaccaatcacatcttgtttaattgcgttatggctagacttatctggtgtatttgcagagatggcttaggctggaacgttattcctaggagtttggacgagttctttttgctttgtgacagtgataattcccctacttcgattagattgcatcttagcctacttgctgctgtgtgctggaatttgtggctaaccaaaaataatatggtgtttagagataaattgttgtatttccccctgtctctaacttttcaaattgttgcaaatttgctgcagtggaagaagctctttcgtcctgaaggctggagtacaggatcaagatggtgtcgactagtctaagatctccaagaatgggtgtgggttaaaattctatcgttctgttgcttagtcgttagagtttttgtttcccaggtagatgtttccctggctcatgtcgttgtcagcttagagtttcggctggaatctagatcgttcgctacttgttcgccagtctggttgctgttcctggtctgtattttcttgaactcctctttgtcgctggcaaccccagctgaacacttcgatgtggctttcagtaaaaagccgagtctctgaccttttctctaaaaaaaatttggatgatattgatgccgatctagaacgtttcttgcacgaacgattcaagaatttgaatattgttttgtttttctccggaaatcctccgtacaggtggttaaggttttcatctattacaatcgattttcccaagcggaccatattcgcttacaaatcatggactgtcataggcgttcagtcgcaggcggtcatcatgattgccagcaaaaattgattttggttacctctaaagtcaaattttttagcagtgccatacaccctgagaagagaacacgtctttttaccctggacaatactctcttaggacggagggagtattattccactgcatattaaagcttatgcaagaataacatatcattcataatcccttctttctatcaatctaatatcaactaaacatctaaaattcaacatacaagcatagtatttattagcactcctaaaacttacatgcaagcatgacacatcaacccattagacacacgaagctcaatatgtaaggatatagtaattatatctaaaatttatttcattctaaatctagcatacatatgctacatcatcgttctcaaatcattttcataatgtttcaatccaaatcattttattatttctccaatatataacatatatcctgcaacaaaacacgggagatcatctacgttattataatctagagtttagcatgcatacgagcatttttaatcatcctccacacgttattttcttaatatttcaacatatatcttcccatcatttttactagtataatatgcaacatatattttccattcattccgaagcaacgtctaggacatcaattagttatgtaattaatggttcgttcactgttgatatattgcagttttatacggtcaataattagcatttttccctaagtactgttttaacgtcacatataagcatttctccgcacattggtaaaatcgcacattattgtttcagtctagatgaacaccataccaaaacatgtgctgtatatagtgtatacgtagcaggctgataatttttgcgatctcgttctttcccaaggaccttcaaaacatgggttaatttgattcataccataataaatgggttaatttgattcataccataataaatgtgtttatacagataaatgtcattacaatttgctatatgtagccgtgccacttaaattttataaaattgaaaccatactatcgctgtcacgtcacgtttttcatcttctttcccatttgcacgtgaggtccagccatcaaattcatcatcttctttcatcctcccctcttctctttttgcccatctctgagagccttggcgcgacaccatgctcgtgggcaacctggagtccagcctctcgagatggcttgtcgaggagccctctgctcccacgcgtgagcacggttgggcggtggctgccattagctgcgcactccggcacggggagagatggattggtggagagaaggttgagaagtggtggacagataggaagagaagaggggaggacggaggaagaatataaaactgatgagtgaacccaatgcttagatggaggagaagatagaaaacgtgacggcaatggtatgattttaattttgtaaaatttgagtggcacggctataaatagataaattgtagtgatatttatctgagtagacaaatttgcaatggcacggagcaaattaacccttaaaacataggattgtcatttgtcaaaacgtaagactagaaaaacataagaatataatatcatgttcattgaattcctcaatttgaaaacatagaaaaactgtcgtttgatagtcacacataaaaacgtaggaattcaacatacgggaaaaataaaacattaggtaaaacctcatgcttattttcctttaaaattcgtctacaataatctattccatatgaatttaaaaggaattgatatgaatcaatccattgaaaccccttcaaggggtttcgtaggattatttcctgtagggtattaatcctttgaaatttctatgtttttcctttgtttcaaggcaaaatttgctacagtacaatcaaagaatgtgtaattggctaggagacacagcaaaaatgtgacacgactgatggacactccaaaaattatgtaattggctataagacacagaagacaatattttataattacgggccaaaagaggtgatatttttttcaaatggcgagattgcccctggtgccatcttcccctacccgagaactgcaatgccgtgaggatgagcttggccttggcggcggggcctgatctgttctcctccgcctggatcacgtagttgtggaagttgttacccagcacgcaaacatggcggagcagcaagggtggctcccagttgacggcaaagaaggcatcgtagagcgacgcctcgtagtgtggcatgtagaagagggtgggctcgtcggcgcggtggcagcaaccgtcattgacacctggcacggcacagagaagcccagcgctgccgcagaggcgcactcgaccgcagagaggatggggtcgaagaggtcggtgtgggcggatgattccggcaggaggaggaggagattgcagtggaggagcgcaagctggaggcggcatgagggagagttctcgaagctgccgacgccaagaagtgatagcctccgtcttcacccaccatgatggatcgatgcgtcgcccatcaagcaggaggcggccacatgcagggccagcggtggccacggcgacaacgtggagcacgagcaggaagcagccgcgtgcagaccggtggaggccacggcggtggcttggagcgcgagcaggaggtggccttgtgtgaggcggcggcagcgttccatggcaggggcaatctcaccatttgcaaaaaattatcacctcttttgacccggaaattataaaatattgtctccggtgtcttttttggagtgtccatcagccgtgtaacgtttttacggtgtctcctagccaattacatattttttcagtatcctgtagcaagttttgcctaggtttaatccggatacctcagatgcatgacctcataccgtaaatgtttgccttttctgcagcttcacaatcgtatcagataaaccatttgtccaaaaataacggaaacttcagttaaccaaaggaatctttacacaaaatgttcaaggatttgtactcaatcaaccctaattatattgtctctgactctaaatatgttgtctctgccaaatagtcaaattcaccatatcactatcttgtttcttgtgattgattctttatcctcaccagtggcaatgcaagggcattttgctagtaaaataaaaatcaaggaaaaaataccgaacaaaatctgttcggtttattcagaatacgtttttactgaagaaactaatgctctcgatctcccgttctctcagtgcccatcatgtgaagcgaggcatgggcccatgccatgcatacatgactacagcccaggaatgctgtgggcttcacagcccatgtgttaaaagaacaaagcacgacggccacaaaaaatcatagtaggaaatgtccaattaggtcataggttttatattttgtgacggaggagtagttgattgcatgatctgggggtgatttgatcagtttgttacatgctgaatttttttcattatattttttaaaacaattaatcattcaccaacctgtatataaaaaaggccataagctgatacgcaggatttaagtagtgaacacgttagaggcgcgctaattttttagttgtgttgcttgatgtgttgtctctagtctggttggctctcctgaatatattactttcaaccatctaacacaagacaagtttcgtctgcgcaagcatatatgagccctggaggataataagaaaaagcggaggtcctgtcacaattgaactaaagctccttagtataaattatgggaaataatagaaatcattctaaaaatcacttgagtttgatattcgatttcataagttattttactgtaaatatttaacacccagcgtaaatgcttaaccgaatcaccccgttatcgctgatatagagccaccgtaggttaagctagccgcttcaaaaaaaatttctgatgtttgcattagatttattttttatgtgtcactgaaatctttttctgcatatagagaaacaacgtttaaactctcatcaataattctatttatcaaatctcacaaaaagtgttaaagtctatactcctaaaggtaaattttgataagaaccatattgatggcttgcaatttataaagacatattgatttggataaacacatgtgcactggggtggtttttcaaaacaaaaccgagtagagatgatgatttgcaacaaaataatttgtggggtgaaatgtcaaatttgaagtgacttttatgatagtttttgttatcgcccacgcgcgcacatgacgtcgctagccatccagaatccagagacctcgatcagccgacacgcgcgccgcgcccgacgtactgcaatggcgtcgccaccagctcacggcggcagcttccgcgtcgtgcgcaccgctcgcgtcgcgccgtcgtcgcctgcggccggtgccggctgcaacccgcagccggaggccactctgccgctcacactagtacagatccttccatctgtaacggcccataacaagaatggaatttgcgggccgtcacaaggaagtaatctcaatcaggccgaagtttcgcctgattgagatatggtcgcacagctatggtatatcggcataaaactaaagcccgtcacggatgacacttatctgtgacgggctatagttgaggcccgattgagatgagggttccatatcttaatcgggccctaaaagaagcccgtcacagatgacccgatgacactcttttttgacggccttttattaaggcccgatagagagtacttgtatgcccgtcacggttgattgttttagagccgttacagatatttgttgcatagtataaatacccccaaccacctagtgtaactgtatcccactgttcactattttggtgggaggctatagggggcgattttttgtcctttttccaaggaaaacagaaattaaattcccaaaagtgatcaaaatggatcaatcaagtgagtaatataaatcattaattgagcaatttcatcacgtcttacttttacttttgcaatactgatcttataatatgtgtctctaatttgtttttttttagcaatcgatcgaagttggatgtatgccaaaaatttgaaacgtcattctacatagtaccgaaagggcgtaataaattttatgaacgccgcggaggagaatcggataagaagaaacagtgattacatgtgttgtccatgtgcagattgcaagaacgagaatatgtttgatagcggagaggacatacacggtcatctgatacaacgaggattcatggagggctatacatgttgggtgaagcatggagagcaataatcaggaagtggagcagcagcagacagaagtggtgtgcataatcaggaagatgaaaatgagcatgacatgtttataccttctccattgggcggtgaaatggttgatgtggatcacgatctgctgcaagacatgttacatgacgttgaggacctagcctagaatgagagagatggaatgaaattcagcaggttggtaagtgattccgagacgcctttgtacgctggatgcaaagcaaaacacactaagttgtcaattaccttggacctaatgaagctgaaggcaagtagtggatggacagacaagagtttcacagatcttttaggaattttgaaggctatgcttcctgttgagaatacattgcccgagacgacatacgaagcaaagcaggttctgtgtccactggggttagaggtccgtagaattcacgcttgtcccaacgactgcatattgtaccacaagcaatatgcggacttggatgctttcctgtctgcaaggcttctcgatacaagcgaaagaaaagtgctgacgaaggaaataagtcaaagaggggtggtccggcaaaggttgtgtggtatctacctatcattgatcgtttcaagagaatctttgccaacccgaacgaagcgaagttagtacgttggcacgccacggaaagaaggaatgatggtatgcttagacacccagcggattcgattgaatgaaggaatatagatcgaaaacacaaagactttgctgccgaccctagaaacatgaggatatgtctttgtacggatggcatgaatcctttcggtgacatgagtagtactcacagcacttggctagttcttattgcgaactataacctcccgccatggttatgctttaaacggaaatatattatgttatgcttgttaatccaaggtccaaggcaacccggcaatgatatcgatgtattcctggagcctattatcgacgatctggagattctttggaaagaaggtgtggaaacttgggatacatatggtcaggagaacttcaagctaagagttctattgttctgcaccattaatgactacctaccattcggtaatatttccggacaaactataaaaggaaagaaggcatgctccgattgcaaggaacatacacaaagccggtggctgaagaaatcacgaaagatggtatacatgggtcaccggaggtggctcccgctacgtcacacatttagaagaaagaagaaaatttttaatggtaagagagaacttcagcctgctcccaaagatttgtccggagatgaggtccacaatatggtcaaggacataagcaatgagtttgggaagaaaagtaaacgtaacaagacaaaggagaagggtatgtggaagaaaaaatccatattttggcggctaccttactggaaagatcttgatgtccatcattgcattgatctcatgcatgtagaaaagaatgtgtgtgagagtttggttggcctgatgttgaatattctcgggaagacaaaggacgggttgaacgcgcgccttgatctacagtcatgtaatatttacaaatgctgtttacatttgtcatattgtcaaaatcaatttcaagctgttggaaacaaagttatatagacaaatgaccaaaataaaagttgtagatcttgatgagaggatcaattttgttgttgaccatatttcgatttgaaatcatttactatccaaaaatgtgttatgactaataaaataaattattatacagcagctatatattttgtactcacaaatataaagacttatctgggaaatggaaaaatagtcatcggtgacgggccttagttcaagcccgatagagattaatcgatctctatcgggcattatcttagggcccgtcaccgatgactcatccgtgattggcctgaatggtatctcaatcgggcattagtatggagcccgtcaccgatgagtcatctctgacgggctctacggcaaagcccgattgagatgactcatcactctaatataactagggtttctcagatcggatcgaaaatttttctaagtcccgctacagtttcccacctccttagaaccctagcgttgctgtcatcctccctcaccaagcccgccgccgtcgccaccgagcccgccgccgccgcaatcgtcctccctcgccaagcctgccgccgtcaccactgagcctcctcggccctccattcggacctccgccaccgagcctcctcaccgacgacccccccccccccccgagcccgccgccgccgccaccgagcctttacaccgaccggaccggtgttggccttcctcgtcgtcgccgcccgcgtcctcaccgacccacgtcgccgaccctcaccgagcacgacgccgcctgcctggtgccgacctacccgatcggcgtctccaccgaccagcgccgccctccaccgagcccgggcgccgccgccaccgagccccatcggccatcctcaggtgagtcctccatcgcgccgccctctgctaactgtgaatgacatgtcattgaaatgtggatgtggatcatatgtgattgaactgtgagtgagacatgtcgatgttgggatgaaatgtggtgcatttattcatgttgtgatagatgattgtagtgattgatgaaatgtggttcatttaactttatttatatgcaatatggttcatgttgggatgaaatgtggtttatttatgttgggatgaaatgtggtttattcatgttgggatgaaatgtggtttattcatgttgggatgaaatgtggtttatttatgttgggatgaaatgtggtgcattaatgaaattattgtgaaatgtggtaaatagattgtaatagattgtagcactcaattgtgtttttttggaaaaaaagtagacaatgtctcagcaaggcgaaccaatgtcgacaacaactagtgggtcctcaagggcacgtactcctaggacagggaataaaattcctaaggaacggttccgcataacagtggtggacgccgtagggttgccgacatctccaaggaaaatattgagccgatttaggtctatctgcgaggtcatagggaggcagaaattcagtattctgcaagacgacttcaagctcgtgtcggccgcagagaaggacattgcttggctaacgttcaaggagagctttgattatcctgcggagcatgaggaccgtatcaggcgggctgctttcaaggttatgggcactgctcggaagaacttcaagactaagctagtcggcgagttcgtttacaacccggcaaatccagatccaagagagaaatttccttggatcacggaacaggtatgggaggaattctatgcgaagaagtcgacccccgagtccagagctagaagcgaggcatatcgcttgctccagaccaggaaccagcatccgcaccggcttagtaccgtcggatatgccggtaaggaagaggaatggcagcgtgaggatgaagaagcggaggaatcgtgcacaccgctcgtgtttggcgatatcccacaccctcgggctaggaactgggccaaggctaggtaccagaaacatgatgatggcacaatcttcatgcaaaatgcagaagatcaacgagtatatgaagctatagtaagtgtctaatcaaactagatgttcacattgtttcccatcatgcagtttatttgaccccactaagttgtaatgcagaaggagttggttgccgagcaacaagcctcgcaagaggcctgctctcaaagacgcgaggacgacctcctcacgaaagcgttgggcaacaaggaacaccgtggacggacacggggcgttgggtcttctgttccctggaagtatggatttccagactacgcgtggcagtacaagaagcggacttccaacaaggcggagaaagatgcacgccttgaagccaagatccgggagtcgatacgagctgagctgacatctgaattcgacgaaaagctcgagtcgatgagggccaagattaggcaagagatccgagaagagcaacagatcccccaggccgccgctgctgctgcgcacaaagagttaggaagtcccaccgaaaaatgcagcagttgcgcatcaactgagttggcggaaaatccaacatcgatcgacagcgccgtcgaccacataacggtaaccgtgaacttactcaatacatgaaagacgtaacgaatccatatgatatatagtattctaaaaaaattgattaatctatcgcaggaaccaacgagctgcaccctcacagttagggtgatgccgaccttcactgttctagcagccgagggacttgcgtacaagccgaccccagagacaacagtgcatggagcgcaactcagggccgactgtgcaaaagttcaagttgactcggtgaagcccgaatacgagctgttccctctgaagtatccaccgaacgacgaggtcctctcactaggaaatgctcgtggtaccttcatccaatggcccaaggacctcattgagatcagggttacagcgaggccaaccactgcaccaggcggtcgtccaccaaagagacccgcctctgctccttcagcccctcctgctcaagatcgtcatgcacaatcttacgatgtgcagttgcagtacgacgcggattttggggaggaccgaatggaggccgacagcaaggcgattcataaacccccaccgatgaagaagagcaggaaggcacactcttcccctcagagaattactctcgataaacccgaagcaaaggggagaggaaggggaggaaaggtgcaggcctcgcttctagctccaagaaagctagatctgggcaagggccaggaagagactaagggcaaagaggtcaagaagaaatacgtcgctccacaggagttccaactaggcatgccattggttggagatgacgtgcttgctgcaatgggcaccacttgtaaggaccttcacttatactacatggagaaatctaacgccaggaagccaagtaaagctaccgatattcttggacagcacgatggaaagtcattccttggtccaacaaattatatcgtggtcgacttcaaggatcttttcgacctctacaggctccgagcggtggacacaagcctccttaagtgttactccttgtaagtattgtcgcccaactcattctggtaataacaatcgatttaacttgcttacaagatcattgatcctgtgtgtaggttaagttggcaatggtgtcagaagcatgcaccggaagttgccttccttgatccacaagtggtcactgtcacaaatctccagaatgaccgtcaaggaatggtcaactacatctacgacacattgtggtcccgccgagacaagaagtacattatgtgtgcctataatcaatagtaagtgtgttaactaaatatacacaacagcatgacacattccttgagtacttaattaactttcactatattaatgccgcagtgcctattggatccttctggtcataacacataaatggagtacatgtcattacctgaactctagaattgataagaacgcatatgattggaccccaattcaactagcgatagatgaagcgtgggcccaatacgtgcaaagaggaggcctcaggaagacaggacatgacaccctcatccacaaaaaagacttcccggtgaagcaacaaataggtgaccagtgcggattccatgtgtgccacaacatgtgacttctgtatagagaaaaggtgaagactttggctgagtttgaggtcggtggtctcaattgtgatagactaactacattttagtacttatatatgatcgatggcataatctggaattatgacaatgtagggcacaataaccaagtctctgactaccagctttgaggaggttcgcgaggagatagccagcttcatcctccacgaaataattaaccccaaaggaatgtttaggcttaaactaaaatgatgaacaatgttgaacttctatgtttaggcaatgatgaacacttattatgcaactgtggtgatgtaactgtgatgcttatatttatgtatatatttcatatgtttatgttaagacttgctaaataaatatttgatccaattaactcggttttgcaggtgaaatatgataaatatttgaatggatgtgaaatatgtgaatggatgtgaaatatgatatggctgtgaatgtgtggttgtgtgaaatatattgatgtctgtgtatgttaatgcatatgtatgaatgggtgatgctggggagctggggatattggatatctgtgtttgtttctgtcatttttgcagcgggcatggctagcaaaggcctgaggctagccaaaaaacaaaatttttttttgtggattataatcatctgtgacgggccataactaaatgcccgactgagatgaggtcatctgtgacgggctctagcttaggcccgattgaggtcactagtcatctgtgacgggctctagtttaggcccgattgaggtcagcagtcatctgtgacgggctctagtttaggcccgattgaggtcatcagtcatctatgacgggctatagtttaggcccgattgagatgagtatcatctgtgacaggctctagtttaggcccgataaaggttagtagtcatctgtgacgggcgctagttgtgacccgatagagataggtcatctgtgacaggctatagtttgactggttgtctgggtcaaagctatcggtgacgggctttacttagggcccaattgagatatattcattcgtgacggccgtttgcccgattgagataactcttcacatcagtgacttctagcctgtgacggacgctgtgcccgattgagatggggcttaccgcccgattgagatgagggtatccgttctagtgtcaccttcctcgacgcgatgtggctcatcgccccacccgtcgagcgggtcttcttctaccgcctcggcgacggcggaggcggtgccacatgtgacgtcgacgttgcgctgtccaggttggtcgactccctagcccgcgcgctccacgtcttctacccgctcaccgtccgcctccgccgcacgcccggcaaggccaaccggtacgagctcttctaccagccaggcgacgccatcgccttcaccgtcgccgagcacacggcgtcggtgtcgatgagctggccacggatgacccgagggaggttgccaggattgagccgctcgtgccggagctcccggatggcggcgcggtgctggccgtgcaggccaccgtgctgttgcggccggcggcgccgcgcggcctcgccctcggcgtcaccgtgcaccacgccgcctgcgacggctcgagctccacgaacttcctccacacctgggccgccatctgctcaggcgccgccgccgcccgtcatcgaccgcacgtccatccctgaacgtgaagatatccaccatgtaaagacgaggacgaccaactcgcccgaccccgacgtcgtcgacagcaagctcctcaccacattcacgctgtcaagggaaaacctgcagagcatcagggacagggtcagcgccgcggcgtgctgcctccgcggtgcacgtccatcgtcgcgacgttcgccgtcatatggcggtgccatgtccgggccgcactaggcgcgggcggcgacgtcgaagcagagcctcggaaccatggccgccgtgcccacctcgtcttcgccaccgatctccggtcacggatggaaccccacatcccggacaagtacctcgggaactgcatcggcacgtgcttcgcgtcggcgcccagaatggacatcgccgcaaccggcgcggatggcctattcgcggcctgcgctgcgatcgccgccgccgtcgacgaaggaatgcgatatgatcaaggctactgggacaggtgcagggagcacagggcagaggtgacgacctggccgttgtcggtggccgggtcaccgaggttccgcgtgtacgacgtcgactttgggttcgggagtccggcgaaggtggagatcgtgtccgtggcgaagaccggcgcgatgtcggtggcggagggccgtggcggctgctccggcggcattgagattgaggtaggcatcgctttgtcgccggagcggatggagaggttccggaggtgcttccgcgatgaagtcgcgtggctgtcgtcgtgatccagtcatagctaggtggctgtcaatagctggtcagcgctataccagttatatactacttcgtactagtgtaatttaaatttgaatctgtaagactgtaaaattcagttttcaattgtatcaacttcattgtttgtggtggatatatttgacatggattagtatcctattgtgaccatttatgaagtgtttgttaaatactccctccgtccctaaatatgaaacgccgttgactttttaaacatgtttgaccgttcgtcttatttaaaaaatttatgtaattattaatttttttcctatcatttgattcattgttaaatacataaaagtatacatatagttttttaataagacgaacggtcaaacatgttttaaaaagtcaatggcgttaaatatttaggggcggagggagtatatgggactatttatttgacatttgatagaaaacactctcctaaatatggcaaattctagactgttgggttagcattacttccaaccctaacaccttactcttctcctccctccccgccatcatcgcacagcacacgagagggcaagagtcaggtgatcagaaatctgccccaccttcttcaccaccgctcggtctcaccagttggccgggcggcattaacgacgccgacgaggccccttggctggcctcctccatcacctcccccttccccaagctgacggtggcgaggtcctcccaccccgcctgcttccctgtcttcggtgcctccctaccgtcggatccgccaccgctagcccctgtcttctaaccagaaccttcgctttgcccttaccggcccaccactctcctccatccccgtggcttccatgccaccgctgacacctcgttgctcacctgtgtccaccacataccaccgggccgccatttcccacagtcctctgtcaatgcatcacgatttatgcacctaatgtggaaaagcaataatttctctcatacggtgggttccattgtatgaatacgatttaactttacataaatagagcccactctctctcttatccctccttcccggatccctatcacctcactctctctttctctccttccgtctttccccaaatcatatcccgcggacctcactcttgcagggggcgaggcatggtggccggaatttaggtggagctcggcgtgccttactacggcggtggcgaggtgtcacggtgcggatctgaagccagtgatacaaatccaatgccggcagtcgtgcggtcggtgcggagcttgccttgtgttgttatgtttttattggaaatattgttattttttgtgcacaaaagcacaaataaataaatttagaaatgttatgacatgtgtttttttatgaaaagtactttttttctcaaaaccgaacattatgtttataattgtgtaaaatataatgtttatgcaattgtgcaatatcatttttctcggaaattttgtagatataaatttctgtagaaactataaaatattaaatgtacaaatggaatattgtgtacggtgcatgtgtgtaaagagcggttaactcatcaaattttgaattggaactttgatggggaatgtgcaatgtctgaggtctagatgtctggtaatatggggtgtttgaccacactttaccacgccacaatcttaggtgccataatttattaggtatttcctccgtggtataatgtaagactttctagcattgtctacttttgtatagatgttaatgaaattagatatacatatgcctagattcattaacatctataatgttagaaagtcttacattataaaacgtatgtgtttagttcactacactttttttaatagcatatgccccgcatgtcgtacacttttttattttttttataactatttagatgacatgcaaataaccagagaatcttcactcgactactcgagagagtttagaatctacacccttattttctctcacctttgtttttattctttttctacactcatgcagttcacattgttttttccatcgctcgttttgtggctttaattagcacacaagtccaaagctacccataactatagatggccaagtgggccgctcggccaggcacgacccggcacggcccgccaaacggccatgcccgcccacggcctccacctatggcccaagcacagcctagttagagtctgaccgtgctgggccggcccgaaggcacatctatcgtgcttatctttgaaataagtctattttgtatctctcctttttgggtcctgtcttacctatggctggaataagtctattagcctccctgccctttgggttgtgtcttatactccccccgtttcaaaatgtttgacaccgttgactttttagtacgtgtttgaccattcgtcttattcaaaaaatttaagtaattatttatttttttcatatcatttgattcattattaaatatactttcatgtacatatatagttttacatatttcacaatttttttttgaataagatgaacggtccaacatatgctaaaaagtcaacggtgtcaaacattttgaaacagagggagtatatgcctagaataagtctatcatgcctccatcctctttgggtcgtgtcatatatatatatatatatatggtgaataagtctataacatctctggtgtttcgtgccgtaacgggccagcccaccgtccccaggcacaactatcgggccaggccggcatagaccattcagcactctagccgtgccatgcctgggccgggccaaaaggtcatgccgtgggctgggccatcgatcggcccccgaaccttttggcccatctatacccgtgactgtttggccgtcgggccctgcctaattccgaattcttaatcctaatctcagcttccggcttcgcaggcgagggcgagttgatcgacgagctccgtcggctatgcatgttaggcggcgagggagttgggctagacgaaaacatcatcaggaggagaagacggaggaggctgctggggtcgagcaccgctgactgacactgctataaggtggagattttcatctgcaccgccgcgatggaggacatatagcagcgatgttagcgccgatggtcgcgaggtcgtcgacaagctagctagtggtgtcagtggtcgccgtcgccggaggcggctgtcggcgacgtgtcccaccgtcaccacggagttgtccacttcaacgacaacgacgcacgccgagaatgccgcggcgaagtctccgtgatcgggacaggatcggccactcgggactcgggagtcgatcgggagccatcagcgagaggagcaagctggtcgacgtgcggccagtgctgccgcggcttctccggtgccggcctcttcccctggtcgacgccgagctttccttggtgctgctgcaaatcgatcgcgcgcaggaccgcaggttatgaacctgctgttctttttcttcttgttcttgccatagccgctaatcttaccttccgctcctactgcagctgcagccactggttgacttccgatcttgcagaagggggaataagctagacgagaattatttcatgattgcttaaaaatagcttcttgattttcattttattttatagctgaagaaatcttcatatcccacacgggcagggcatgcatgcatgtggtcatgcgggtccagcgtgcaagctgccagccaaccaatcagcgagcatgcatgcgagtaccaagtgcggccggccactttatccaggcggagtggatgacgcaactctgccctctgtcctctgttcggtgttcgctgactccgatcctctctctcgctctttgcttgtcggctttatgtaccctcactactgtgtatccatttctatagttcgtgcctgctctttgatactgcgaatgtgaaagattaaactagctgtagtttaatttgtttttttcattacaaatttatctgcgacgatgagaaaaatccatatatgttttaaatagggatggatattgggatacggatacgtcgatacaatactacggtattctcttaaaaaaaaaaagagcaaagcgtccggggtgcatgtgcatatagcgtgccttcagcacttatcaatcgtccaagccatccgacggctcacatagggcacgcacgtgatagctgacggaagcagcccatcgaagcccacgaaagccaagcgacacgtgcctgcctgcctgcctgccgcgcgccacgtgtcacgtgtcactggacgatggcgacgatagccacgtgacggcatcagtgaagcacctccggaacctctccatccgctccggcggcaaaccgacgcccacctcaatgccgccgccgcggccctccgccaccgagatcgccccggtcttcgccacggacacgacgtccaccttcgtcggcctcccgaacccaaagtccacgtcgtacacgcggaacctcggcgacccggccaccgctagcggcgggccgtcgctcgtgctcatccctctgacgtgctccctgcacctctcccagtagccgggatcgtatctcgttccttcgtcgatggcggcggcgatcgcggcgcaggtcgtgaagaggccgtcctccgcgtcggcggcggcgatctctttcttgggcgccgaggcgaagcatggcccgacgcagttgccgaggtacttgtcggggacgcggggttccatccgcgcccggtgatcggtggggaagacgaagtgggcacggccatggtttcgagggttgttctctgcttcgacgtcgcttgctagtgcggcgtggatgtggcactgccatatgacggcgaacgtcgcgacgatggacgtgcaccgagggggcggcgactatatccttgatgttctgaaggatctctcctgacagcgtgaaagtggcgaggagcttgttgtcggcgacgtcgggcgagctgaacttgtcagactcctccttcgttcgattgaccatgatgtcgtagaggtcctcacgttcgcggatgaacgtgcggtcgatgacgggcggcttcggcagcaccacagcgccggcgcaggcggcggcccaggtatggaggaagtgcgtggagctcgagccgtcgcaggcggcgtggtgcacggtgacgccgagggcgaggccgcggcgcgcggggggcagcacggtagcctgcacggccagcaccgcgccgccatccgggagctccggcgcgagcggggcgatcttggcgacctccctcgggtcgtccgcggccagctcgtcgacaccgacgccgtcgtcgtgctcggcgacggtgaaggcgacggcgtcgcctggctggtagaagagctcgtaccggttggtcttgccgggagtgaggcggaggcggccggcgagcgggtagaagacgtggagcacccgggacagcgagtcagccagccgggacaggacggcgtcgacgtcgtcgtcggcggcgccgaggcggtagaggaagacccggtcgacgggcggggtcgggagccacatcgcgtccaggaaggtgagcgggacggcacgctggcgcagcgaggggacaccgtcgggcgacgacggtgcgacgcgagcggtgcgcaggacgcggaagctgccgccgcgaggtggtggagctgccatttgtgtcgcgggcgccatgtctcccggctagcgagcgagctatccgcgcgcgtggctgatgtgagtagatggagtcctatacaggacgtagtgacgtactcctactatatagtccattttttctgtctcacggtataaatgctgcatgccccatgcttgcaaatcgcaatgcggccgcatgcaaggttctagaaagccattagtgtgtttcactagttgtcaagtttgtattggcggagagctcgagattgattggttgtagcgtcactggtgacgatggccttgcatgcactgtttgaggagaaaccaactggacttttgctgctgctttcggaattttgcggccgcgcggagctcatcgtcatacagatgcggagcagcttggtcgatccgaggataatacgactgctagaaaaagcattttcacagatgttcagagattttcttccaaacggatatgacctgcggagctaaatggccatgaaaatgtaaatcgggatggagctctcttttcgtctgcgaaaatcaatattttcaagcagaccacttaagagatccgcctaaaaaaacctttatttttgtatgcggacctcttaagtggtccatctggaaaatatgatttttgcaggtagaacatgtaaaaaatcatgccaacaaaaaatatcaaagttttatccctatcctttccccaccactcattttcctcccactcctctctctctctcatttgttcaccagcagcagcaaatccaccaccggctcagctcctcgccacctctgccgctggccacgacaaacggcgccgacgcttgtggatctgccgccggctcgcccgccttctcccggcgaggtgtgactcagctcggctcctccctttcacggtgacgcgcgacaacgacgacgatgacggtgctgcttatgggtagaggaggagacacacgacgacgacgacaacaacgcctgtgggagacgatggcgccgacgcaacgaggacgacgcctgtgggagcagcggcggacggaggagagccgttggaggagagccgttggctggaaggggaggcctacggcggcgcccgtgtgcggctttgttttttattcactgaatgtgtttttgtaggcggatgaatcactgcctacgaagatggagatgtcgcttgcaaaaatggccgcaggcccgcctacaaaaatcatctattttcgcaggagattgcacactagtagagaaacgattttcctagacgagaagctatttagtttatatacggaccgttttcacgtccgtatgcgaaaatcgattttcatatgcgggtctcttaagggtctgcacgtaaaaataagtcgatttttacgtgtgggcctcttacgcgaaaaccaattttcacgtacgaacctcttaaaaacatgcctacaaaaagtccatccatcctctctttcctttgtcaacacttcaaaatttcatctcatccacccatcccaatccttatcttttctatactctctctcacactctctcacctctctatcctctctcactctctcaactctctctcctctccagagcgcggctggcgcgggcacggccggcggcaccgcgccgctcggcgatggccccggcggcatgcgcgcaacggcgaccgggagcggcaggctcggcggctcgtgcgcgcggcggcgggcgaccgggagagacggcggcagtcgaccggacaagtacctcaggaactgcatcggcacgtgcttcgcgtcggcgcccagaacggacattgccgcagccggcgcggatggcctattatcgccgccgccgtcgacgaaggaacgcgatgtgatcaaggctactgggacaggtgcagggagcgcagcacagaggtgatgacctggccgttttcggtggcggggtcactacaccagatcctcacatctttgacggcatatctgtgacgggctttagtattggtcagtgatgagggtcacctttgacgggttctacgggacgccgtcatcggtgaggcatccttctgcaatccgtcacagataactagtcacctgtgacggtcccacagtagaaaccgtcaaaggtgaggtaaatctcacctatgatggcttccacatccggcccgtcacaggtaactagttacctgtgacgggttgcatccttataaactgtcaaaggtgaagttaactcacctcaaacggacccatcactggagcccgtcacaggtggggaggggggcggagtatactaatatgtactcccttatccactctgtccctcacacactctctcttatccacataaacaaaaaatctctctctcccttatccacactcacagaaacaagaggggaggctcttgcggggcggcggaggacccgacgaccctagagagaggcggcggcggcggcgcgcggcggtggttcggcggcgttgggcgacggctcagcggcgcgtggcagcggcggtggtgcggaggcgcagcgacaaggtggtgcggcggcgctgggtggcagcggtggtgcggaggcaaagcggcgaggtggtgcggcggcgctaggcggcgagcggtggcggcggtacccacatcctcctcccccttctttctcccctcctcccccttctcttatttccgatctagtgtgtggctcagcgatgcatggcagcggtgaggagggctcgacagcgtgcggaggcgaggaggaggtgggcggtggcgccgcggcctccatccccgactgccggcctccaggagctcggggtcaccgacgctaagctcgagcgacgacgacgatgaccaccgacgacaaccgccgagtctgcctccgggacacggatctggcctctgggacacggatctggccatcgacgcctcccccacctcccggccgccagcgcctccaccctttcttccccgccgatgtggtcggtcgccatggctgccatccctcgcccgccggtcgccagatctgtcgccggtgtgcggtgtgcccctctcgccccctatacttttgcattgatatgatattgttgtctgtgcattgagaaattcttgccatccactttgtgtgaatacttctatatgagatctatcggtttgaattttttgtgtgatgatgaatgtgagcaaagcagctctgagcctgtgacaacgagcaccaccacagcagtgtgcaccattttttttttgtttgtttttcacaccagtgacgggttgcatgctgcttcttttatttttttttgctgggttaaagacatcagtgacgggccacaaaataatgggtcgtttgagataacagtcacctgtgacgggttttatatgtggtccgtcacaggtagccttcaccactgacaggtctacacccgtcaaaggtgaggagagtcatcagtgaccactaatatctgaccagagctatatccgtcaaaggtgacactttggacccgtcacaggtagccctacccagcgtagtgggtcgccaaggttccgcgtgtacggcgtgggttcgggaggctggcgaaggtggacgtcatgtccgtggcgaagaccggcgcgatgtcggtggcggagggccgtggcggctgctccggtggcattgagattgaggtgggcatcgctttgtcgccggagcggatggtgaggttgcggaggtactttggcgatgatatcgcgtggctgtcgtcgtcggggcattgaatatcaattggtagagagtagctggtcagcgctataccagctatactagtgtaatttaactttgaatctgtaagttaaattgtatcaattttctgttgtttgtggtggacatatttgaaaaggattagtatcgtattgtaaccatttatgacgtgtttgttaacactaccacagaacacatgaatagtgctggttgggaaaccccttaaagtgttggttttcccaacctgcattatggaggcggcactaaagagtgatcgggcaccaattccgttttaaaaactagcatctttaaaaccatttgcgagccaaaaaaataggctcgatgcatcgagctcatccaccccgcatcatagaactccaaatcaattacaatcctcaattcccaatcaaacaacatcacagaacaagaaacattgaagaacatcacataaatctttcatagaaatcattcactaacattgaagaacatcacagaaaatcatcacagaaagagaggagggagggcgccgctgcatgccgcctcccgccgtggccgccgctgggacgcccctccccggatctggtggaggggagggcgcggccactgccgaccagccaccgcctctcatccctgcaagagagaggacagcgagagagagtcgagaagggagggcgccgccgccaggctgccaccgcctctcatcccgccgccgcatcccccctcccctctgccgccgcatgccgcctcccaccgcggccgccgctgggccgcccctccctagatctggcggaggggagggcatggccgccgccggccgcgggcagtgagagagaggacagcaagtgagagacgagccaccgcacgccgctcctccaccgccgcctccaccgtcgagagagagagggtgctcgagagagaggggagagagagcggagagaacgagagaaatcgagagagttcgactgtgcgagtggacgctgcggaccttatctcctcgtcctcgacgcgtcgtggtggggcctaccggctcggctaaattcgtaggtgccggtttgcacctataatttattataggtgtcggtttttaatattataggttctggtttttttaaaaaccgacacaaaatagaataggtgtcggtttttatttagaatcgacacctataattacttaaaggtgtcggtgttttgtgatttcaacctacggaggtgggaaaaggcctataggtgccagttttagcactaccggcttttccaggatttaatggtattgtactttcagtggtaggcgacgtatccgtcaacagcgaggcgcctgtggtgacttcgtcaatctccaggatttaccaaccctgtcttcgaagatgctcataggggtagggtttgcctgcgtgtgttcataggggtaagtgtgcgtgcgttgtgagtatctgcgttgtagcgtgtaattctaaaaaaaagaatatatacatgggactatttatttgacatttgatagaaaacactcttctaattctagcaaattttagactgttggttggatgtgtattttcattcctcgaggggatattctctcgttgtttgcatgtcatctaaatagttattacaaaatttgaaaaaaataacaatatagattaatatgaaatatatcactccacaaacatccaagaccaaattcaacttctataagttgtagcaaaagaacaaaataaactgaaatagttatcgtacattctcaactatatttgttgtttttttacgacttgtagaagtttaatttaaacgtgcatgtttctgaagtgatatatttcatattaatctatgttgccaatttttttcaaactttttgatgactatttagatggcatgcacaaaataagaggatatccctttgagggatgaaatcacttttccactgttgggttagcattacttccaactctaaccccttactcttctcctccctccctaccatcatcgcgcagcacacgagagggcaagagtcaggcgaccagaaatctgccccaccttgttaaaatcacttgagtttgacatttgatttcataagtcattttgttgtaaatacttgaccaatttggttttgttataaaaaccgcatagcgtacgtgcttaaccggatcaccccattatcgctgatatagaccaccacaggttaagctagccgcttcaatctttttctaatgtttgcattatatttatttttcatttgtcattgaaatcttctacaaatagagaacctcggtgtaacaatgtttgaactctcataagcaattctatttgtcaaattaaaataagtgttaaggctatacttttaaagctatttaattttggtaaaaccatattgacggttcacaattatgaaaacatattgatttggttaagcacgtgtgcacttaggtggtttttcaacaaaaccaagtccgaatgattatttgcaacaaataatttgtgataaaatatcaaacttgaagcgacttttacttggtttttgctattttccctataaattatactctctctctattttaatgtacgacgccgttgacttttagactaatgtttgaccattcgtcttattcaaaatttttgtgcaaatataaatatgtgatgtgcttctatgctcttcaatgtattaaaaactgcacaatttttaaagaagatgaccagattagaaggatagtgtaaacttcatttagggagggtaatttcatccttgagggagttatctccgatcctataagtccggagcccacaccaacactgatcaccggcaacttttcacaaactgaaaaccactaattaacaacagcgatctctattgcatttgcatcgcagcacaacaagatctctattgcatttgcatcgcatcacaaaaacaaatcgatcatcacctgatagtctgaaacaaactaaaaacgaaatatgcatgcattccaagctgcaatcattatcgtgtacgaaatgcatcgaaaagttaagcaacggcaattgttggcacagcaccatgggtcgagcaagcaagaatcaatgtgttcgttcacttaccctgatattttattttctcctctatctctctccacttaaactgccatccaagcttcttccaattcatggcgatgctggtccagaatcgataactgaccggattactcaaccgtactgccattgaagcaaccgaatcaaggtatttcaaagcaaatatcgtagatgagacgacagtgaaggaaaagtaatagggcttaattttgtgggcgtcttgagtacgaactcccagtccagatacatcttgtgctagccaaaggattgatctgttgattgttgggatcaatctgcggttctaaccacgacaacgggatccatgtagacactagcgactacaacagttttgttcgtgggtagtgctgtcagtggcgtatctaaaatttaaggtatgggtggtccgacttataaaaaatttaaaacatctcgaatataataatgttaatatataaaatataaatataggtaatagatccgcttcttccgtatcttgtttagagtatactcttctgtcataactgggaaaggatattcagaagcttctttttttttttgcatgtttctaaaaatgagatgaaatatctacatctgttgttatgttttaagaatctacatctacatctacaatacaatagtagaattttagatgtatgagttgggtcaaaactgaaaattgaatgcctaatatggttctaatctgctaatcagtaggagtaattaattatcacctgccctagtgctctttgttggttccttcccttgcagctcgcgcagatcccagttggccaatgccctagatgcaggcgctgatcactgcacgtcgtcgtcggctgccgcagccgcaccagcactccggcgccctcttgcttctttgcttgtacgttgttggcccatcgtcacttgatccccaggaagtagggaagagaaggagcagccagcaacaaaccgccgcgctatgcacgcgtgatggcgccgctgctacaatcgcgcgacgagaaggagatggagtcgcggtagcgaagagggagcggaaacggcgtcgcttaattcgtttggaagcttcagcctcacgggatttttttttttcttttttacccaaaaaaacgtgttgggtcgctaatttttttgggtggtcagggaccacccggaccacccattagagccgccggtgggtgccgccatggtgactttgacaagatggtcgagcgatggcgccggatatggagaagaacgacgagaggggaggggccgagatgctgcataattttctctaaagacaaaattgccctttgataaaaacgtttaggctgttaattaaggacctcctaatctatgcctctcatccgttttaaaatatctgcaggtttttctatgaatagtaagaagcagtacacatctcgtgatggggcagtcaatatgtgcactaaattcaacttgcaggaatactggctaatatttaatgataaatcaattcacaattaaataaataataattatataaatttttcaaataatataaatggtcgaacggtcaaaaataaaatcaatgatgttggcgtgtttagttcgcgtgccaactttttttttaaagtatacggatacatatttgaattattaaatgtagactaataacaaaacaaattacagatttcacatgtaaacagcgagacaaattttttaagcctaattaattcgtcattagtaaatatttaatgtagcatcacattgtcaaatcatgacataattaggctcagaggattcatctcgcaatttacatgtaaagtgtacaattggtttttttcatccatatttaatgttttatgcatgtgtcgatgtgacggaatttttgaaattttgaagagaactaaacactgtcattatacattaaaattgggagggagggactaatacagtactacacattacgtcgctagccatctagaatccagggagctcgatccgcggtccgccgacccacgtactgcaatgacatcgccagctcacggcggcagcttccgcgtcctgcgaaccgctcatgtcgcgccgtcgtcgtcggccggtgccggctgcaacccactgccggaggccactcagccgctcaccttcctcgacgcgatatggctcatccgcccacccgtcgagcggggcttcttctaccgcctcggcgacggcggcggtgcgacgtgtgacgtcgacgtcgcgctgtccaggttggtcgactccctagcccgcgcgctccacgtcttctacccgctcgccggccgcctccgcctcacgcccggcaaggccaaccggtacgagctcttctaccagcccggcgatgccgtcgccttcaccgtcgccgagcacgacgtcgtcggtctcgatgagctggccacggacgttcgcagggaggtttccaagattgcgccgctcgtgccggagctcccggatggcggcgcggtgctggccgtgcaggccaccgtgctgctacccgcgtgccgcgccctcgcccccggcgtcaccgtgcaccacgccgcctgcgacggcgcgagctccacgcacttcctccacacctgggccgccatctgcgcaggcgccgcagcgacgccgccgccgcccgtcatcgaccgcacgtccatccgtgaacgtgaagacatccacgacgtcatgaccgctcgactgcacgaccacgtaaagactacgacgatcaactcgcccgacgtcgtcgacaacaagctccttgccactttcacgctgtcgagggaaaacctgcagagcatcaaggaaaggatcgccgacgtggcgacgcgccgcggcgtgccgcctccgtggtgcacgtccgtcgtcgcgacgttcgccgtcatatggcggtgccacgtccgggccgcactaggcgcgggctgcgacgtcgaagaagagcctcggaaccatggccgccgtgcccacctcctcttcgtcaccgatctccggtcacggatggaaccccgcgtccccgacaagtacctcggaaactgcgtcggcccgtgcttcgcgtcggcgcccagaacggacatcgctgctgccggcgcggatggcctattcgcggcctgctccgcgatcgccgccgccgtggacgaaggaacgagatatgatcccggctactgggacaggtacagggagcagagcttagaggtgagcaccagtggtgctccgccgctttcggtggctgggtcgccgaggttccgcgtgtacgacgtggactttgggttcgggaggccggcgaaggtggacgtcgtgtccgtggcaaagaccggggcgatgtcggtggcggcggcattgaggtgggcatcgctttgccgccggagcggatggagaggttccggaggtgcttcggcgaagacgtcgccgtcgcgtggccgtcgtcgtgatccagtgataagtggcattgaatatatgtcaatagcggggccgcctaatgggcgactggtcgcgcaggggcgtgggcgcgcgccccgcgccgcttctgctctactagactactagctactacgtgcagtacaactagtctactctgttgctgtatgatactactactgctatgtagtttgcactactccatccgtcccctaatacttacactatttgaccattcatcttaataaaaaaaagtttagatttattatttattttatttatgacttactttattttataatttttcgtctttttatatatatttgcacaaattttctgaataagacgagtggtcaaataatataaacaaaatgtcaaaatccttttatattaggagatgaaggtagtaatattcttatatatgtatacatatgcataaaatttaaatacttacctatatatactttgattataaaaaattatatacacgtatgcaaactttagaacgtgcgtatacaaactttgtatacatatgtacacaaatttgtatacatacatataaaaaagaaaaaaaagtttatatacgtacgtatataaagttttcatacaacatatacaaagtttgtatacttatatataaagtttgtatatgtatgtatacaaaatatatcaactttatatatgtaaatacacacagtttatgtacatacatatagaaaaaaaatacatgcatacaaacgtatacaaacttaaactttatatatgtacatattaaaatattaaaaaaaagccagaaaaacatatggcatatacaaactttgtatacgtacgtatacaaagtttatattcatgtatacaaactttgttgtatatgtaagtatagaaagtttgtaaacatatacattaaaaaccaaaaaactgagccagaaagaaaaccaaagaaaaaaaacgtgcatatatggtttgttggtttttaatgtatacatattatatatatattttatatatgtttacaaagtttgtatacgcatgtattaaaaaacggaagaaaaaaaagaaaaggaagaaaaaactgaaaagaaacggaaaaaacccaaaatgaaacgggaaaggaaaaaaaaaagaggagagcgaaagaaacggaaaaaaacaaaaaagaacgagagaacgcaccgtccccccccccccactccacgcgcgccacgtgtccggtcgcgcggaggggaccgcgcttgactagccgctaaatagtcacttcggtcaatagctggtcagcgctataccaattagtacatactatgagtgtaatttaaattcgaatctattagactgtaaaattcagttttcaattgtatcaactttattgtttatggtcgatatatttgaaatggattaatatcgtattgtgaccatttatgacgtgtttgttaaatatacgggactgtttatttgacattcgatagaaaacactcctgtaaatttggcaaatttttggcaaattttagactgttggattagcgttactcccaactctaaccccttactcttatcctgcaatcatcgcgtatcacacgagagggcacgagttaggtgaccagaaatccgccccaccttcttcaccaccactgcttggtcccttggctgcctcctcctcctcctccacctcccccttctccaagctaacggtggcgaggtcctcccaccctacctccttccccgactcccttgcctccttaccgccagattcaacaccacctaccattgtctcctaaccagaagcttcactttgcccttatcggcccatcactctcctccatccccgtggcttccatgctgccgccgacacctcactactcgcctgtgtccactttctaccattgggccaccatctcccacagccgtccgtcaatgcatcttgatttatgcacccaatgtggaaaagcaagaatttctctatatggtgggtcccattgtatgaatacggtttaactttacataaatagatccctctccctctctctcttatccctcctttcccatatccctctctctctctcgtacgccttttgcttttcatttggcaacaagggggttgtaactgacttgcaattatccatcttaaatttctttagaattattttctacttattttctttgagatataaatatcgcttcagtactctgatgcacttccattaccaagaaattgtgcaacaagccaagatcactcatcccatatatattcatcatgtcttttttaaaaatcttacatcagcttctcactattgccggtatatatcaagtcatcaacatatagtgagaaaattaaaatgttcatacatgtcctcttgatatatagggtaggctcacttttgctcttggcaaatcctttttgaataaagtacttgtcaatttgactgtaccatgctctaggagcttgctttaattcatataatgccttcttgattaattgattaatagggacttatggaaccttccagttccatctagcgttctcatcaaaaatcacatctctgctataatgattttctttttctctagattataaagctgatatcctttaataccatcagcatagcccacaaatatgcagcgatcacttctattatcaaatgttactctcttttgtgctgacacttgagcatacaaatgcaaccaaatactctctcatatgaccacaaatgacaggcttttaactataccaagcttcaaaaggtgtatagtttggtactgccttgtaggacttctatttaaaatactaggtgattccccgcgctttgctgcggaaattgctaagtaacttttaacattcttttaataatcaagctaaaagtaagaattatattacttattaacaataaataaaactggtttgtcaaataatgtttagagagaaaaaaatttagtagactctgtatgagattgtagatgaatatgatatcccacacttttattatatggatgaatatatgttaagtattataataactatatatatatatagtattgcgaaaaatagtgtgaaggaagatgattggatgttgatttgtagaattcaatgaattatacatgatgctgcatgattgcatattattgccagtggatgatgaggtggcatttttgcatgttgagctttaggattagtggattatgactttatagtaagatatgataaattgcagtgttaactgctttagcccagaaagatttaggcgtacctatgtcttggactatagagtttgccatgtcattaatcgtccgatttttttttgcaactccattttgttgagcactatagccagccgttaactgtcgtctttggatgcaagcattttcacaatatttctcaaattttattgagatatattctcctccttgatcgctgcataatactttaatttttcgattactctgaatttccaccatagacttgaattttttgaatgtattgagggccgctgatttttcttttagaaaatatacccagatcattcttgtataatcatcgataaatgtgataaaatatcaattttctccttgtgacattgttggcactttaccaactatatcagtgtgtactagttccaatggtgcatttgctctccaagctccactatgtggaaaggcagttctaatttgttttccaattacacaaccttcacatgggtcaaacttcagtgtaataaatagaaggtcttgtaccatacctttagtcttgagtagctttagtgctctgtaactaagatgacccatcctcttgtgccatagattagaaatatcaacttcacttctgagagccatttgagtaggatgattcatcttcaacaaaaaatttatgtttgtccccatatttattttgcaaccagacggttatttttacgatccaatattttgcaagaaaattcctcaaaataaaccgcatacctgtgttctagaagctgccaaatacttagcaaattttgcttaaaatcgggtaccggcaagacatcctttataaattttggacggactgctgtttggacagcaaccgtacctttcttttcactttgggatatagattcaatacccatgtgaatctttgcatgatatgatgaatctatttcttgaaataaatttggatcagcagccatgtggtttgtacaaccactgtcaataacccaaacattatccttttcttcttaagcagtacgacaagagaaaatcatttcttcatatttttccttttcttgggaaaaattagcccgattaatttctcgagttctgcaatattttgcaatatgaccctttcctttgcacttgttgcaggtcattttcttccaggacatatctgtaatatgactagattttgggaaatgtcacaccacaaatttgaactggatgtaactttttctattctttcttgattgtcttccttctgcatcatgttctacttggaaaatcctttttttttctgaaaacaaccacggtcttgcattggaaatccatttttctgaaaattcccgcaaaaccttaagttttgaggcctgaagctcaactttgattgaaatgcattttcaacgaagttcccttctcgttgaagctttctttcttcatgagattccaacgagctcattagttgctaagttgtgagagtcgacaagtctttcgactcctcaatagcagcaacaatgtactcgtattttttaggctgactgattaaaatttttatccatgaccttttgatccttaatatcctcaccatagaggcgcatctgattaacgatcttaataagtcttgagaaatagtcttttaccttttctgacgccttcatttgtaaattctgaaattgcattctcaaagtttgaagcttcactgcaagtaacttctgagatccttaaaactcctctttcaacttatcctatgcttccttggattttttggtgccaataatacgtggaaatagactttccacaactccttattggatcaagaacaaggctttggcgtccgtcattcgattctccgtcagagacttattatgttccgctataagagtgatgagggtgttaggtcccgatctttcaataggtattgataaacagtcgatttgggcagagtcgtgacacaactcgatccggcttctgaacgaacacgctactgagccccgcaatcgcagcaccacgtctcctctggttaccaactgtgccgaaacccagttgacctcgccgagaaagctaatccctacatgcaaaatcgaagaacacaagtaagaacaagatagattgcaacacaattgcatatgaatgattaagcactcaaatttggtgttctacaaaccgatctagcggcgaaactattcttggcaaaataatctaagcaaaacccgactctaaacgatgacggctactgattaagtatgattagggacgtcctagggttgccctagggcgcacaccctcatgggctaagcccacgacacaattacaaggcccaaaaacccaaatcagatttggactggatgagatatgtggtttgttttgcagattcccgacagctcagtattaattttgacgtgggaccaaaaccatctgaaagtagattccataagctttctaacaagtactcatgggccctgaaattccttctagatcagtggctaggtccatttgaagttgatgctatcaggaggcccgaatctgaatacaaaacatgtagaactttatctcttgtcttctatagaccaaaagtgacgtggtgatataaaagaagacttggagaaggtcttggtttggtcccccaatcaacttcttcaatcatccatgcattccttacgctcggtctcttttctttcgcccaagcaaatacctctgcaaacgaaaacacacaaaactcattgtgtagcaacgtttgttcaaatatataacaagtaaatctaatataaaacatatacacctttggttgattaatacataaggtaatcatggttatatccgagttagttgtgtcctcatcatcaaagagtactttccaatatcccataatccttgatagtagcagtgtccacatcttgatgcaccatatatcataactttctcttgtaaatacaggaaccatagaccgcgtcattgtggcgctcgaacttgaagccatacctatagcttcaatatacaatgccgatacgtcgagctacttcgtcacgccctactcgaacttgggcgctctaatttgttgttggtgtatatttgtaagcaagggaacagaggggagtgctggatgaagtggagctagccaagggaacagaggggagtactcgatgcagtggagcttgccttgaatatgtgggctgcttgttgtaacttgtttgcttgtattagggcgttcacagcgcgccacaaatttttgctattcctcatgtgccacgtagacgaagaacctgataagcttcatacaacagtgcaagtattgtgggagggctggcggccgccgcgtgaagccacgcaacgctaaggccacgagctccacaatgcagcgcccagccattctccatgcgccgtgctccctcacctgccgtggagaacgcgtgccctcttttggctccgcgaactcgcgcaggcaacgcactttggcgacgtgacgtcgaatctttcctggatgaaacatcagcaatctacacatacactagttgcctatatttataggctgaacaaccaaccaaacttgaagcttcatgaatatagccccttttcagatcccacctcaaaatttttcaccctgtcacatcgaacgtttgaacacctgcataaaatattaaatatagacaaaaaataactaattacacagactgcgactaatttgcgagacaaatcttttaagcctaattgctccatgatttgacaatgtggtggtacagtaaatatttgctaataacggtataattaggcttaataaattcgtctcgcggtttactgacggactctgtaattagttcttttattagtgcccgaacactccatgcgacacccaatagaatatccgatgtgacacgccaaaactttacaccctgaatctaaacaccccattagtagaaagtagtactaccgctggctgcctattgctactactacacatcggccgtgtttagttggtgtgccaaaatatttttttttatatacggatacacatttgaagtactaaacatagactagtaacaaaacaaattacagattccgcttgtaaactacgagatgaatttattaagcctgattaatctatcattagcaaatatttactgtagcatcacattgtcaaatcatggcgtaattaggctcaaaagatccgtctcgcaatttacatgcaaactgtgcaattgtttatttttccgacatttaatactctatatatgtgtccaaacatttgatgtgacggaatttttggaagtttaaagggaataaacactgccattgatgcatagaagtacactagtctagaaacttttacagagtagtagtagtactggtcttttgaccattggttctagagaagttgacaagaataagatgtctatagagaattcaggaaatggattaactacaacagcaggaacatatcgctgctgatggattaccataagatttaactttgagacacctgaaacattattccattatttttagacaacaaaaataagaaacaaattgtaaaaatatataattaccctctgtcatatctaaccctcacttggccttcccatgaaactcacatctcacactccttttgtcgtcgtcagtcaaacttgggcgcgcggcaaccgttgttctgctgcatgcaccccgcgccaaaagtgttggaattaattccagtcgcctgatgcaccaaaaatagcagctctccccagcaaatcaacgaccattacgtacgcgggaagcgggacacgtttgaaccgagctatcacacgagttatacgtgcgacaaccgggctatcacacgagttatacgtgcgcaccagcgcatggcacttggcaccacaagccgcgtatcactgccgtatcgtgtactcggatcgaccatgcaagctgcactgcatgacgatgagctccgcgcgcgcgcggccgcaaaattcacccaagctgcagcagcaaaagaccagttggcttctcctgaaacaatgcatggccatcgtcaccagtgacgctacaaccaaatcattctcgagctctcgaccaatagtaccaacttggcaaccactagctcaaacacactaatggtacactaatgttcttctagaaccggcggccccacccgcattgcaatctgcgagcatggccacgcagcatttataaccgtgaaaatttggtaagactgaaagtcttacgccccctgcgaaagacttcatcttctgtgcgacacgtgtcccgtggtaatttcaaagcagataactccctcaaaccctcctaacgatacaacctaacgtcctgacgtcgttagcagagaagacgaaccggcgcggcacggcgcggctgcagggagatggagtgttggcgacccgggcgcgccggtgattcctgatgaagtggtggcggcggcgaaagccccggctgcggcagcagcggccttgcggtagctagggcaggaacgtgaggctgaaactcccacgccagcgatgcgtgagggacggcgagtttgtggcgttgccgcggctgcgccggcggcatgagatgatacggccatgactcctgatagtggcatcttcagcatcatacatatagtgagctcgtatggtgattagataaattaattacagagctctgctattgaagctccggtaacaaacttgactattggcgattatataaattgggaattaagataacaagctccaacagtgaagcagcacagaatttcatcagattagaagatgtcttaatatccatatgcaaaaacccaaaataacaagacaacagaacttgaaaagttgattttgatactcgtgtctctgacaaagtggaaagattttgatgctcgtgtctctgacaaagtcaaaatgattctaacatcagtcataagatgtcgatgaattggggtcttgattttcaaactctaaacgccaagaagctgatgctgctgcagtagtttcatgatgagcttgaaataatagatttgtgaattctcctcgaattggcggaacgaacatcctcgaaatgtcaccaaatggcatcacaatatttgagtcaagtggttcctgaacctattcatattgtaggaaaacaagaaaatttttaaagtacgctcgcattatgatggagatttaattcttattgatcttacagttggctgcgaagctccagctatatttatgtttgatggctgtgtggtttcttctcctgcaatgttcataaggcaaaaattggtacttaatgaagtcgatgaaaatgaaaaaaaataaaagacaagcaagttaaaatagaatacctttgtttgttgttttctttcctctgtcaagcaaacttctagatcttttttgcaatggaccttttttgtgaggaggagctctaattgatatgcgctcttttgcaacttcttctgtgcactcaagaaaacattgtggagcttcattttcatctagattgaccttgcttagtaaattttctacttctatggtcagtttatcaaaaccatgatccaagtgttggaggacttcattggaaactccacattttagtgtaacagatatcatttttcggcaaagatatgtactttgtgatgctaagctgtcgctttggccttttctcttgcatgtaaagattcctctttttgcatattttgtccatctactcaatatatactgaggaggtaaaacaataatactgttgtggttgaagatccgtagtacatgcttgcataaaatacctacatgattcagaatatgttagaggtgaaatattaatcccaactagaatggggaatatgtcaggaaaatacacttaccaagacaggtatacttcctgcaagaacatgatatattcatatcaactgaattaaaggtgactcttgtttcgtccttactgtgatccacagttactaccttctgtattgtggcccacttctcacgcaaatcatacaagttctgtatccaagaattgtcttcaaggtggtaatcagatatcaacttttgccaattgaagttaaagtgtgccactgacctttcttcatacacacatcttttaaagtcatgaagaaaattaggattattggagattacatggcttagatgctttgcagcattttggtatatatgccataggcaaagacagtgacttgagtttaggaatacaatcataatcgcctttgccattgcagcacactgatctgtgaaaattgtttcaggttgcttccccgacattgccttcaaaaagtttctaaatagccaaacaaatgaatcagcactttcatcgaataataatgcagctccaaaaataatagtttgcctatgatgatttgctccaataataggagtaaatggcatttcagacttgtttgtttgaaatgttgtgtcaatggagagaacatccccaaaacaagcataatctgcaatggcctgaccatctgtccagaagaaattacaaattcgaccatcctctttgtccaactgcacagaataaaagaaagaagggtcttctgcttgtttgttatccaagtactccaataatgtttgtgcatcttgtgtttctaaatactttttgcgctctcgaccaataaagttattgcaatccatttgtaagaatggcacattttcatctccacctaaccaccgttgaaaaaaatcaaatatctcagctagcttaactcctgcttgttgcatcatgctaattatatgctcatcggcatttgacatacgccgttgtgatctaagcatgtgtgacttgtcaggacttacaaaagggtaattgtgtgccaattcgattttctgcagcttccaaataccttcctaggaaataaagaactgaacacgagccttgcaatctgtttttgtacaagcacgttatttctttggctggtgtgttggattactgttcttgtgaccttcattactgcaaaccatgtacttggatgataaagtgccatctgctctgtagttaacgtggcactttcgtacactaaatcccactcttctagcatatgaattgtagaaattgtatgcatcatcctcagattgaaaggtcatgccaaccttcggcacttgctcgcaaggagcattctgattggtagcctataggtacaatagaagcatatattaaattggattttttcttggatattagtttatagatgacttctacacggatatacgctaacaacctgcagtcactttattacaaaaagaatgccttacctttatatttgattgagtaacttgttcagatttctcacgatctgatctgaacactacattatgaccctcaagattgcaatttgagctttcacccatagcatgatgaccaacagagttgaacgtaaaaccggttcctaccaacagcaaatggaatcaaatcgaatgaaaaatcgagtttaagtcatcaatctatcggccatatggaagaatcaacaacagatggatagtaaaacaagcatcttctcactttggctggcttcgctgagtgtggggtttgattcacccacttgctgcacctcacccatgagcaccggttcatctcccacgccgcgttcgtccatctccccgcagccgcaccgcgtccgttcgtcttctccgctaacgacgtcaggacgttaggttgtatcgttaggagggtttgagggagttatctgctttgagattaccacgggacacgtattgcacaggagatgaagtctttcgcaggggagtcttaccaaattttctgtttcacggtataaatgctgcatggccatgctcgcaaattgcaatgcgggtggggccgccggttctagaagaacattagtgtgccattagtgtgtttgagctagtggttgccaagttggtattttgattcttcgaggagatgtctcctcgttatttacaatgtcactcgtatatacgactcctatatcctggtagaagtaggactccattccccagccacccgcgcggatcggtcgctaagccgccgagagacatggcgcccgcgacacaaatggcagctccaccaccacgcgctcgcggcggcagcttccgcgtcctgcgcaccgcccgcgtcgcgccgtcgtcgcccgacggtgtccccatgttggtcgagcgcgccgtcccgcttaccttcctggacgcgatctggctcccgaccccgcccgtcgaccgggtcttcttctatcgcctcggcgccgacgacgacggcgtcgacgccgtcctgtcccggctggctgactcgctgtcccgggcgctccacgtcgtctacccgctcgccggccgcctccgcctcacgccgggcaagaccaaccggtacgagctcttctaccagccaggcgacgccgtcgccttcaccttcgccgagcacgacgacggcgtcggtgtcgacgagctggccgcggacgacccgagggaggtcgccaagatcgccccgctcgtgccggagctcccggatggcggcgcggtgctggccgtgcaggctaccgtgctgccccccgcgcgccgcggcctcgccctcggcgtcaccgtgcaccacgccgcctgcgacggctcgagctccacgcacttcctccacacctgggccgccgcctgcgccggcgccgcggtgctgccgaagccgcccgtcatcgaccgcacgttcatccgcgaacgtgaagacctctatgactacatggtcagtcgaacggaggagtctgacaagttcaggtcgcccgacgtcgccgacagcaagctcctcgccactttcacgctgtcaggagagatccttcagagcatcaaggacagagtcgccggcgtggcggcgcggcgcggcaagtcgccgcctcctcggtgcacgtccgtcgttgcgacgttcgccatcgtatggcaatgccacatccgagccgcactaggcgacgtcgaagcagataataagcaccatggccgtgcccacttcatcttccccaccgatcaccgggcgcggatggaaccccgcgtccccgacaagtacctcggcaactgcgtcgggccatgcttcgcctcggcgcccaaggaggagatcgccgccgccgacgcggaggacggcctctacacgacctgcgccgcgatcgccgccgccgtggacgaaggaacgagatacgatccggactactggaagaggtgcatggaacacgttggagggatgagcgcgagcgacggtccgccgttagcggtggccgggtcgccgaggttccgcgtgtacgacgtggacttcgggttcgggaggccggcgaaggtggacgtcgtgtccgtggcgaagaccggggcgatctcggtggcggagggccgccgcggcggcattgaggtgggcgtcggtttgccgccggagcggatggagaggttccggaggtgcttcgctgatgccgtcgcgtggctatcgtcgccgtctcgtccagtgacacgtgacatggatcgatcagctccgggccactccccggcgtaggcggcggcggcaggcaggcaggcaggcaggcacgtgtcgcttggcttccactcgctgggcttccgtgggattcgatgggctggttccccgtacccttattttttttcttggaaaataccgtagcattgtaccgacagggtgtgttcgctaagttgccagcgtggaacagtctgcatggtatgcatggtaaacagaggtattagcgtgtgattaattaagtattatttttttaaaaaatagattaatttgatttttttaaacaactttcgtataaaaacttttttaaaaaacacaccgtttagcagtttgaaaaacgtgcgcacggaaaacgagaaagaggggttgggaaaggaggtgccgaacacacccttatccgtaccgcaatatctatccctatttaaaggacgtgacgatcgggcatccgatgggagaaggttaaaatcgggcgctgatgtcagcatgacgtcagcacccgatttacgtgtaaaactgctctaaactgaattttctcctaaattatttatccaaatcatgatctgattgcaccattaatttcattgcaattaaatgttcgaaacaagaccacacatggatatattccgacgaaaaaaaatcttattattgaattatttttaaatgttgtacgatgttccaccagatatatcggaaatgtttcattaagtagatcaaaaatgtttccctcgtttaaatcggatgttatttcacattatataaaaacaatatttcagcaaatagtgaaagaatgtttcagttcactgcaatattagatctatatatagtgaaacattatgagtacactaggtgaaacattttttcggtagaaaaaaataaaccaaattcccttaataggagtttctaaaatatgtgggttttttttaatggaatgtttcgttcactgcaacattagatatatacatagtgaaacattgtgagcacactaggtgaaacattttttatgaaaaaaaataaaacgaattcctttaatagggagtttctaaaatatgtgggtttttttcaatggtaggtgggagcagacaacgcggtgggaccagggcctgcatgcacgcacgtggggggaggggtg

SEQ ID NO: 27127 - DNA, 10405 bp, Oryza sativa
cccgcgccggtcgcccgatataatcattctcgctattttaaacatactccctccgtttcgaaatgtttgacaccgttgacattttaggacatgtttgaccgttcgtcttattcaaaaacttttgcaaaatatgtaaaattatatgtctccataaaaatatatttaacaatgaatcaaatgataaaaaaagaattaataattacttaaattttatgtgctaaaaagtcaatcgcgtcgtatatttcgaaacggagggagtaggatttttcccatcgtcacgacacaacccgatttcattcgttgtccatcgtgggtccgtctgcttttctgatttttccatttgtcgtttgattactccgcgtcaagcccgcatcttccgtatgttccacgtagcacgcgtacatcatgcaaggcccgcaaaccgcatgccatcaaacactcaaatcaaatatgaaacggagagagctacggattggtcgcccgatcggggctgggaaaatcgggcgctcacgtgagcatgatgtcagcgttcgatttacgtgcaaaactattttaaactgatttttctcttaaattacttatctaaattatgatccgattgcatcattaaattcgttgcaattaaatctttagaacaagaccacacattgatatattccgacaaaaaaaatttagcttattattgaattatttttaaatattatatgatgttccaacaggtatatcggaattgtttcactaagtagagcgaaaatgtttcactcgtttaaatcgggtgttgtttcaccttatataaaaacaatgtttcagcaaatagcaaaataatgtttcagttcactgcaacattagatctatacatagcgaaacattctaagtacactaggtgaaacatttttcggtggaacaaaaaataaactaaattctcttaataggggtttccaaaatatatggtttttttgttgttgcaatggagtatttcaattaaataagcgaccaagatttttcccacaaaatcaaaaggacaaaccccaaaatttttccgaaacaaatccaagtgcaaagagcatatgcagatgaaaaggtttcaaagggctcttagggtttccagttggcttgtactacggtcaaggtcggctctgataccaacttgtcacgcccagaaattcacgaaccagaatttctaagctgaatgtgcattaaacccctgtccaggaccagccagggtacacaaacgacaattgttgatatacagatccacgtcttacaaaaatataaaacattacaaatgcagcggaaaagataaaagtgagctaaacctgaagacttgactcctgcagcgaggcgactccattccacaggcatccttgacggcagcgacgaagccaacttcttcgagacatcttcaactgaaaaggacttcaactctagtgtgggggaaaagagagcaagactgagtactatccactgtactcagcaagtcataccggaagagaaggtatgatgcagggtataaccaaaggaggctagaggttcatttgcataaagctagcatttaaaagcagcagttgaaagcaataaaacagttgtagtaattaatcaatattaaccaatcactgtccaacgctacaccacgttgcaacaggcccaaccaaccacctgaactacaccaattcattagctaactagggtgagactaatcacggtgaatctggtcgaccgcccataaccgcgggcacggctattcgaatagttttactctgatcagaggtgtacaactgtatccacaacacacagccccacgacacgtttccgtgcgccgatatgccaccacgacataccggaaagaggccgtgataggacccttcacataaccccctctaaccgatcgcaccacaccttaggattcgccctcgtccccaacaggcaacgggcagcccccctttcgtgccgcgatgaatccggaagccgatcaaccggacaccccggccgacccaactccatcatgcccaccctcgcctgggtacgtcggctagaggaaagctacactacaagcctagccgttgcccacgctggcttgtggtaagtacaataagttcttctagggcatcccgcgaaccggtccttaatcgccatgggtacgactagaaaaaccatgcacccacagcccaccatgtagtgtattttaattaactaacaccattgcggtggcactaatccaaagctatgccaataatcaaagtccatgcattaatgtgatttcccttttgtgtactagtagaactaagcatggctaagcatctcctaaaccaacatctagtcattttagtacccaagttatcaatgtcataaggtaatcaatatatggctgagtagtaggacctatcccacatgatattgtaaaacaatgcaatatttaatagaaatgccggacatttgtaaattgggtacaatatgatcaattgtaatatatgacttgccttactctcgcactgatgagaccacagcaacgtctttgagaaaccgcggatcgacgaaacggccgaaatctacgcgtcaaacaaagcacgcaagcaaaacacactataagtctactaaaacaggaaacaaaactacttttaatggattctatacatttttcttgatttaccgagacttgaatggacttaaacggagctcggatgaattacttatgaattttagaagataaactgtgtttattactataaaagaaaattcttaatgagttttattgcacaataaaggatcccggatgaagtcagcagggggggtcggcgccgacatgcgggacccacccggcagtggctcaagggggaggaggtggcaccggctggtgggtgggccccaccgggcagtggctcaaggggggggagacacctggttggctcggctcggcttcaaaccggccggccggttaggcgatgcagcggcggcgagcggccaccgacggcggcgactagcggcgcgggagacggcggtggctggcgaggaggcggcggcacacggccgaagcggcggcgcggacaggaggcggtgacgcgcccaaaggcggcgacgcacacggggaagagggagtaaaagagggggagggagtcctcatcggggattcggccggcgtgggtgaagacgacggcggacggcggcggcaagcggcggacggcggggcacgcggaatggacgagacgggcctcgatctcgcgaggccaacagcggcaatggagcagcgcgtcataaactatcagtgtgtccgactaccccacatctagtacatgctttgaacttcaactctctttccctgaaactatcaagggtcgcatcattgtcgtcatcatcatcatcgtcatcgtcatcagcagagaaccgttctcctgattcatcatcttcgggtctgggcggaccgtactttataaggtgccgggttagctgacgcgctccacggaaggtattttttcgtctctgacgcttgggtatccttgcggcatcttcaggagtaaattctgaactagtgatgatcatggtccaaccattatccatcttccatattactgtcctgttcgctccagagttgggctgcaaagtaccatccttcttgtcggtaggctgacttggagcttggttacttcctgggcactgcttctcgtccttttcaagtgacctggcgaacaccttccatgggcagttccttacataatgaccttactcgccacagtcataacaggtagcacttacttctctttggtttgacggtggcttggctgaagttatcttcggggatctggacagcattttgacaggggtcttcggtgccgatactgggaactcctgactctgactctgattcaggttctgggctagcacctggacttgcatttgtggctggtggccttgccgcggctcctaacattgtcgttgcatctgctgcatctggtatatctcgtaccgacgtcgtatctgttgtaacaactcttccactgtttgagtctgattagccatgacttggggttgaagctgatcttcgtgaagttgacgtggaatgcccataggattgcactgagttgatccatgaaattgttgagatcttgacctgatgagattgtccctcatgctgaccaattgttgcgggcacaagagagagagggggagatgagaggggttactaaagataaggtactggacctcttgcctattgatatgttgttaatggacttttattgttcaagttgcttaagcaaacaacctagtatggtcgcatccccaccaatgatgcaaaccatacccctacacacaagcaaacaatcacacgatctagcagctaacgaaactactcttccgggaaggattgggttttaggtaaattctaggaaaacttcacttggccttcgtggaacgacgactctggactgatcttcttgctccttgctgcacgaagcctgagatgacctgacatgacttgacttccgaacagacatgaagctgacggtttgtccaccgggttttgcaactaaaagagttggagagaaagggaggagaatttcgaaaaaaccgtttcacaaagaaatgccgaagggcgagaggagacgttttgcaaatagggttatcagaaagcttgtccttagggtttgaccatttggctcaacctacagtcgagttggctctgataccactttgtcatgcccagaaatttagcccaaatttccagactattttgtgtattaaatcactgtccaggaccagccagggtatacaaaacgacaagtaaatatacagatccaaacataaataaagcgtaaaatacttacagaagaggcacttagtcctcacaccaaaagagaacgacagcagcggaaaaaggcgatcctagcggggcttcagctccactccacaggcaaaactcaactggggtctaagccttggtcttctgactccgtcttcagctcagaagcactacacttctgaaaagggggaataatagcaaggctgagtacaaccaccgtactcagcaagccacaccaatgatgcagacgtgcaaagggattcaagaatggcttgtggctatttgcataaaggcggttgtaaaacattttattgagcaaacagtaaaacaattgagtaatcaaggtaatattaaatctccactgatcaacgctacaccacgttgaacaggcccaaccaacccacctgaactacagtgcattgagtcgatttattaagtgtgagactaatcatggtgaatctggtcgatcgcccataaccgcgggcacggctattcgaatagttttactttggccagaggtgcacaactgtacccacaagacacaatccactggaatgtcaccatgcctgcgcagacacgtcaccatgtcgagtgattgtgacaagaccctccatataaccccctctgaccaagcacaccacacctcaggtttcacccccgcccccagcaggcagcgggcagtcccctctcgtcctaggcgaatcagaaagccgcataggccgtcgcagggcccatccgaactccatcacgctcacccttgcctggatgcgtcagccagcggaaagctatacttcaagtcaggcagttacccattcccgcttgtggcaagcgctgtatgtcttccagggtttcccacgaaccggtccttaattgccatgggtgcgaccagcaaaaccatgcacccacagcccaccattcagtcgtgttttagttggataattacgactatgaaacatggccggatgtctcgagcacgcagctcgtcatgataccaaaaggtctaatactgcaattatcccatcgactgagctagtggtaattaagcatggctaagcataaagttctagctaggtcatcatagtaacccaagctagtcgatttatcacccaaatttgacaaaggaccgtcacgtcccaaaacgactctaaaatacatcctctaaattatgccgagaataattaaaatccgtgtgaaagcctccaacaattaaaatgtgcaaagttaaaagtcaaataaggcttgggggatttttgtatatttcctaaaagcctaaaatacgtaaataaattttagtggaattttcagagcacaaataataattattaagaaataaacaaagttaaaatgattttataaaaagaaaaactctaaaaagtcccctctccctccctctccctcttgggctggctcgtcccatctccctccccctctctcctctttcccgcggcccatccggcctctccccgagcgcgcgccgctgacgggcgggcccgcccgccaccctcgctgacgggtggggcccacccgtcatccccttcctcccgccgctctcgccgcctcccccgcaccctagcgccgccgccgccgcggattccgccgcatcccgccgtccccgcgtgcaatcaataggggggaattattccccgcgatcccctctccctttccccccatttttccctctctctctcgcgttcaaacgggcggatttgcccccgcaaatctcgccggcgccattgatggagcccgagatcaccgcgccggtttccttcccctccggccactctctcccctttccaaccctatataaaccctccccgtgcctccctcacccgtttccgcccttgccgcaccgtctcctcgccggaatcgagctcgcgccgtcgctctctctctctgccatcgccgtcgagctccggtccgccgccgccgtcgccccggaccacctcccacctcggcgccgcctccttcggcttcgccgcatcctcgccgacctcgtccacccctctgtttcggtcgccgaccgccggaacgccgttgaccccgtcgacccgagccgcgccgccgccttcctccgctccggccgcctttttcgtcgtcgccgtcgacctagggtgagccgaggaccgccgcctcttttcccccttcccttcccctctctcggccgccgctccaccgtgcctatggccgccgccggcgaccataggggcgcgggcgccgcctcccgccggccgcgccgagtggccgccgcgtggggcccggctgtcagccgcccgcgtcctcgggtgtggctgacgcgtgggacccatggcaccgggcggtgcgagcccgggtgcgcccggtccaccgtggaccgtgaggctgccgcgtgggccccactcccgtggactcggtccgcgcgcccctccccctcggctgacgcaataaaccctttttaaattaaaatttaaatgaagaaattcgcaagtattcatttaaagagcatataaacttcaaatggccataacttggccatttgaactcggaattggaccattcaagtctctaatttttccttaagaagtcaagaacccatttttgtgctctgtttctgcttgttatatggagtttattagagtaaaagccttttcttttccgttggtcgtgtagacgctgcagcttcggaagatccgctcttcgtggaagttgaagccgacgtttgggaaagcgagcaaggcaagtcacatcatccttgaacatattgaatcccagtttataaaattattttgatttaaattaatgcattatcgctttatttaaattcccgcgttatcattgttttatttagccatgcctatttatctttgttatgaccttattattattgttattgatattattaccttgttcaccctagattaaacaaaaccccaactagtggacactctactcatggttccactagtatgaatttaggtagatgcttcgctggttaattaggcaacattaggtggttttacaactttagactttgggaattctcatatcatttggacactatggaatggttggcttatgttggaattggacacacacctccccctctattcaaaacccccaaaatggttttaggctgggctcgaagtgcgtggttgggttttgttagtcgtacctcgggtactataaggattaagctcgggcctctgttgcaaagcactaccgtacttctacatgtctagtgggtaaggcttagtttgtggctcagtctggttataaacaaaagtacacggatagagatggatgaagtcgggggtcgatggacatctctaggacaaatgaaggctacacgagctgcggcccggttgtcgagatgtcatggcacagggccggtgtcctgttgctaggggctcagtcctgcctacctgtcctgggggttccagccgtaggtggggttgggtcggtattcttgtctatggctaggatgggttggaaactatgtcacgtctttcgtccgtataccgtggtggtatgtggcacgtggttacacgtgaggaagatgtgtcttgtgggtaaagatgtacacctccgatcagagtataatctattcgaatagccgcactctcggttatgggcaagtcgagcaatgtacccaagttagagttttaattcttaaaacctgcctaacaactaaaatgtggaatggttggcctgggttggcttgggacgagctgggacccagggtcgggttgccagttcggtctgaatcatcgtaggccttgggttaaggcaggttcgtgtgggttcacggccttgtttaataatattgtatagctctaggatcgtatttacaaaatagctttgagcaactaagtgtcttttaatgctgtttactgcaaaccctaaccctttatattataactcccttttactcccttgcatttattctgcacttgtgggtatgtcttgttgagtacggtggttgtactcagtcttgctcaatttttcccaaacccagaagaggagcccctggatgatgaaggctttggtgtctagctcgtgcctgccgtcaagcgcctgtggtcgtcgccctagtcttccgctgtttcccgtttgtctttgagtgtgctgggccttcgccgcccatgtaataaattatctatttacgcttccacttgttaaactctgaactgtatcaacttttggtgtaccttgcctcctgggacaaggaataatgcacgcacgtaaggaacgcccgttgtgttattttcggtcgtgacaaggacagatatcaaataatatggcacaagcaagcatatacgtgaaccctattcccatgtaattagcaaaacgatgcatatttatttgcaaacggaaaacatttgtaaggtagggtcaaaatgctcaaggggaatgtgtgacttgccttgcttcttcaaacaatcttccgaactcttttcctcgcgaccgcagacttccgaaacgagggattctacatgctggtacgcaaaacgaggaaaaactcaaataaacaccaagaaaacagtacataaaaagtaaactaacatgtagagctcaattttagatgaattttgcaacttgaatggctcaatttggagtttggatgaattagatatgaattttagaagctttgagccatttaaatgaatttctagaattaatatcgaattattgcgcaattattatttatttttacaaagaaaaggggattgctgacatcagcaaggggtgaggcgcggaccgcgtccacaaaggggtgggccccacacgtcagcgacacaaggaggtaccggcccatcgtggaccgagtccatggcggcgaccggccacgcgggcacacaaggccggcggcggcggcgaccgggaacaaagcggcggcggcacacgggccgggcggccaccggcggcggcggcgcgacgcgcgcaagcacgggaggcggccggcgaaggggagaaggaggagggaggcggctcaccgagagccgcggcgacagagggagcggccggcgaagggaggcggcgacgctcctcgggtcgacaacacggaggggctcccggcaatggaaggtgtcgaccgagcggcggccgagaaagagcgtgacgcggcgagggaggcgatgcagccggcgcgtcgcggcggcagccggggcgatggcgaacggcgaccggaggaggaaaaaggtggccggtagggtggtgtggtggggaggtggttctggtggtggagggaaaaaagggatgggcggccgggcttgccctcgcggtggtggagctaacagaggcggcggtgtggtgtgaggtggccgggaatggcggcaattagcgatcggaggcggccaatggtggtgggagtgacggtggcggctagctggagggcgccgacgggcggcggagatcgggcgcgcggtgcggcggtgttttagaggcggagaggggaaaagaagtaggggccggggtgtggcgtggagcggcgacgacggtggtggcgacggcgcagcgcggcgacggcgagagcggcggctagaggcggccggagctcgccagcgacggcggggagagggagcgacgatggcagggtggtttttgggcatgggaaggctcgggagggagggaaaaatg

SEQ ID NO: 27128 - DNA, 14839 bp, Oryza sativa
aaatgggggaggaggaggtggggatcgagtccacgctctcgcggggcggggtggagtgcgggaggcgcggcgtcgtggggtgaaaccggcggccatggcggttgcagccggtcggatggaggtagggggagaagctgacgagtgggccccgcggtcccacttgtcgacgagaggagggggaggaggccgagggggcaaaagcagacttttgtgagggagtggggaaacgggccgacagcccaagagaggagaacgaggccggcctgggaaggaggggaaaggaggaaggaaggggattgggccaagcccaaacggagaaggggagggattaatttgtttttctttttatttaattgattaaatgaattttgtgacttttaaaattatttctcgagctccgaaaattcgcgggaaattttagagtgttttttttagggcacaaagaatattacaaaacattcccggccaatgatttttaaaataaattttaaattccctcaataattcacttgattaaattgctttaacttttatttaatttctagaaaatgcattatttaatgatatttaatcccgaacgaaaatcggggcgttacaaatatgatcaattgtaatgtatgacttgccttgctcttgcactgatcagaccacaccaacgtcttcgagaaaccgcggatcgacgaaacggccgaaatctacgcgacaaacaaagcatacaaggaaaacacactataagtctactgaaacaggaaacaaaaccatttttaatggattctatacatttttcttgatttactgagacttgaatggacttaaacggagctcggatgaattacttatgaattttagaaataaactgtttttattactataaaagaaaagccttaatgagttttattgcgcaataaaggatcccggatgacgtcagcaaagggggggcggcgccgacatgcgggaccagcccgacagtggctcaagggggaggaggtggcaccggctggtgggtgggccccaccgggcagtggctcaggggggggagacgcccggttggctcagctcagctcggcttcaaactggccggccggttaggcgatgcggctgcggcgagcggccaccgacggcggcgaccggcggcgcgggagacagcggtggcacactgccgaagcggcggcgcggacaggaggcggcgaagcgcccaaagacggcggcgcacacggggaagggggagtaaaagaggggggagggagtcctcaccagggattcgaccggcatgggtgaagacgacggcggacagcggcggcaagcggcggacggcggggcgcgcggaatggacgaaacgggcctcgatctcacgaggccaacggcggcaacggagcagatttatctaattttcttcatttatctagcagtagtgtgtacagtctatttttaggctatcgttttatttcagaaagcagagcattgcaataccagaaatgaggcttattccttttgtacatctagagcttctcatatgttgtaaaagagttgaactagctcagattataaatagtataatacaagttcttgatagattactaaccatcaatatccaaatcctttgtttgggcattcacaagcttccaccatccatggaatcctccaggtccaggttctgtagataaagatgaatacatgatagagacattgaaacttcatattccaattttacagaaagctagcaagtagggcaacaaacccatataggcattgtgcaatactggataaatagaaagacaaaaagctggaagagatcttgcaagcaatcaagcaaatagacatctttctctttcagaaaattaaatagacagatgataagaagagcacgagaaatttactgaccacaaaattatcactatagctgatttcatttagatttactgagctcactgttgctgccggtggagtgtcctccggagcacctcgccggttggccaccaagcaggtagccgtcgcccgccggtgcctccgtcggccgccgaaagaaggaactgcatagaagaggaaccaaagaatcaagaaccaaagaaaagaataagaaaatcaagaaccaaagaatccgttgcttgttgctatcatgtgaaccacactaccagtcttggggggagttggagacgtgaggaggactgaagaagcacacctagccaccgctgcctcaacccgtggtggatcacaccgcgaagtcgaagccgccactgccgccgcctccgcctccgccgggagccgctgccgccacctcgatccacggggaagctgcgccgccaccgctgccgcctctgccgggagccactgccgccggctcgatccgcggtggagccgcaccgcctcaggccgggagccctaaagccgccgacgccatgcgaacgcgagcaagcggagcgctcgaacaaggccgacccgaaaacccctaggatcaactgactcatggacccattgttacctaagaaaatatggaccggcccgaaaacctattggtgccacaaatttaggttcgggccacggacctaacgggtcgacccgccccacttgcaggctgaattaccgactcagagactatcgccaccggtcgccacgcgtggcatgacttacctccgcgcctcaactcccatatgacactacccagcctcagctgtgtcgtgtacggtgtgacaccggtatggctcccgtggcataagatggccatgcgtgcggaccgaggctcgcctcagcacatggtctccaccgcgggccgtcgaggagaatcttaacctaataggcgcacaacggcacaagcgacatcaattgagcgctcacgtgcgcgctgccgccgtcgtgcggtcatcaccgcccatatcactggagaagcaggtgttaggtgtcaccaggtatcagttttggctcatttgcaaccgacgcccgcggccgtctactcggactgcattagcttcatgggccgagcatgtggacaacagcttttctgaccgtataattttggaataagttcatctaggtcccttaattttacacagaatccgatttacgtccttgaaccccaaaaccagatacaactggtccctgaactgtcaaaaccggtgcaaatgaggtccctcggtggtttggaaggcggttttggctgacgtggcgtctacgtgactaggtctccatcccacgtggcattgacgtggcgcttacgtggcaactatatctcggaaaaataataaaaaacggtgggtccacatgtcagctaccaaaaaaaattaaattaaaaatggtgggacccacgtgggcccacatgtcagcgaaacaaaaaaaaataaatatggaggggcccaagtgggccccacatgtcattccctctcggctctccctcttcttccctccgccgaccccgacctctttttcgccatcctcggcggcgtcggccagttcggcgtcatcacccgcggccgcgcccgcatccctctctctccctgcgccccgacctcagaaaagtaagagagagcgagagccgctgaggtccatcgaggtcacctcgcccggcccgcgcccctgccacggcggccgccgccaccagtccaccaccgtcgcgcagccccacgcagaaccctgtcgcgctgttgcagctctgcgtcgaccgcaggtgcctcatcttcccgttcctccacaccgactacgtcccgggctccctccgccgcttcatcaccggcgccgcggactgcttcgtcggccttggcgtggacaaggaggccgagcggctgagcgacgaccacggcctccccgtggggaacaccgccgaccttcgccccctcgcggcgtagaggctgggccgcccggagttcagacaggcctacctagattagatttagttgctgttgcatttcgctcctgctgtctcgtaatgttaggctacctagattcagttgttgttgtatttttctcttgctctctcgtgatgttaggcaaggatttatgagatttaaggtgctatgggtttatgcttagtactgaagaaattgaagaatcggatgaaaaagaacgtgcagatcttctgatctagactatggttaatgaaatttccagtgctgatcctttatgcgtttttagtgctgttttaatatctgttttagatgatactgtttgcagatcgtgtcatcaactggaaatggctcgtttgctcaaattgttctgcggctccttgcacggcggtcggacgcggtcggaggagatgctcccactactcgccgcacgtggtcggaggagatgctcccagtaagaagagctggcgacctcctcctctgcctcctcctcctccggccaccttcgccgcccacggcctgctgtcgtcgccgctccgcctacccctccgctccgccctgccgctccacccgcggcctgccgccgcgccgcttagccagcatgcttcggccgccgccgtcgtcggaggcagcggggactgagacgacgacggttgtgagacggcgccgcggcgcgagaagcgcccgaagacgacgcgttaaggaagaaggggaatagccgagagggaatgacatgtggggcccacgtgggccccaccatatttttttttttgtcattgacatgtgggcccacgtgggtcccaccatttttaaattattttttgtgtgtagctgacacgtggacccatggttatttattatttttctgagatataattgccacgtaagcgccacgtcattgccacgtgggatggagacctagtcaaactagccacgtaggagccacgtcagccaaaaccgccttccaaaccgccgagggacctcatttatactggttttgacagttcgggaaccagttgtatctggttttgacgttcaaggacgaaaatcggattcggtgtaaaattaagggacctcagatgaacttattcctataatttttgtgcctgggttgggccgtaagaaaggctgcgcctatgatgaagttttgagccgcaagctaatcaatcatcaatgctataggtgaagaaaggaaaaagtatacttcgactctctaaactatcacccgagtatgatttatatcctccaaccacaaaccagatatatcaactccttcaactattaaaaccggtgtaaataatgtctgtcagtggttttagaggtggttttggctgacgtggcgcctacatgacattcttaaccgagtctttgtcctatgtggcacttacgtggtattagaataaaaataaaaataaaaaaatacgtgggacccatacgtcattaaaaaaaagtattgtgggacccacgtgtcatcctccctctcccttcctcctctcctctctatcccttatctctcgggagcggcggtgacggtgggagcgccggccgtggcctcgtgagtacactcggcggcacgacgaagttgctgatatggagcacgaagatgttgtacggcaccgcggcgaccaccctcttgagcgtggcgttcaccagcgcggagagcgcggcggaggtgaagacggcgccacccttggccgtcggggtgatggcaagaaacctggtgcggcggcacacgttcccggtggtctggaacagggttgtcgacacggtgggcctcccccgcggcagcgcggcgatcttcgcggcgtcgatgtagtcgagcacgacgtggacggagaggagctcgacgagcgccgcccgcggcagcctggcggctgcggcggaggagtcagtccacggcggagttgtccaccagcacggtcaccgtgttgcggctgttgatgtcgcggtcgacgtgcgtcttgctgatcaggtagctgaacacaggccgaactctgggaaccgcccgaggatctccgtcacgttgaacgcgccgcggcgtcatcgccggaagccgggaggacgaggccgaggagcaggagaaatgagagcctggccgccatgtgttcgcgtgaacaggaggcagatatgcggtggaatttttttttaatgacatatgggtcccacagttttttttatttttgttttttattctaatgcgccacgtaggacaaaagctcggtcaagaacgccacgtaggggttacgtcagccaaaaccaccgaaggacattgtttgcatcggttttgacagttagaggagttgatatatccggttgtgtggttgaaagatatgaatcatactcgggctattgtcgagagagtcaaagtatactttttccggtgaagaaatgcggatgtgctaagctaattaacgggccaaattaaattttctattattttcttggcctatttaaatattttatcaattacataatgagttgttgcacctttggatgatttaaaatttgggagaaaaacaagataaaaaattatcatgcatattatattatttcttgcttaacggaaccggatttattttgaccaatattgattataggcccccatcgattggcttattctgacgacatatttgcaaacgagaaatataatttataaataaaacttttatattagtgttcttagcgatctaaaagctaacgctaaaaaataaacttcgataagaaaacctcaaaatcaactccaaatttaaggttaaaaaatcaaaatttagctgagaaacataagaacaagagcatgtacaataacagactataagccaactataaacaaatatcaagaagataaaaagggagagataaaagtagcaagctatatatttgagctagctgcagcacagacttcaaatataatgtgtgtgtgacatgtgggaacatgtattaatactatagtatatgtttatagataactattgtatgaatttactattaaattggctacgaatgatttggagttaatagttgactatactattaaactcgctctaagcaaaatgatgaggctgatagatgtaaatctcttatgcttaattttcccgagtcatttctagccaaatagaaccaaccggaaatatggtttgaaatttctcagttatgtggaattattaatttcatgtcagtaataatgttatttattccgatttattattctccatgattatttcctttaccatcgtatgtctaattttggtattattaaggattttcattcatataattatggttttagtttcttcatctaattttgtccaatgctgaattggcgaggaggatagcgagctgagggctgctccatgattcagggcgaccgagctggcgccattgatgccgatgggaaggtgatgcgatgcgggagagagcgacacatatggacagtccgtactccgtaggccgggggagggactgggagggggaaaaggggccccttaggtgaaggaaggaagaagtgggagttgggctgagagaagagaaaaggcggcctagcctggcctaggaagaaacggcccaattgaatggtaaaatctgttattttccttggattttcagagttgggttatggacgaatttcaatggattttgaatatggatttgagttcaaatgtgatgtttggcctgatagagtgacagagaataaaaggaaggtttcaaaatgtatgtttgaacaattttgaattagaagttgatatttgaggagatttcgtgaggaagggaaagagatggatatttgattcaaacttgatattttaattcacataaattcaaggaactttgggagaggatatttgaattatattttgatatgggatgcagaacttgaatttgaataattgagagtggagaggaaaacggggaggatttcaaagggaagtttgattttaaaattgacatttgaatagagaaaaagaaaaatagaaaggatgaaatgacaggtgggggtttggggccaaaaatttgatccacatgcagagtgatatgcctgccaaaatcgtttttctacttgtgtatccgtgtatgtatattactagcaaaatgcccatgtgttgtaccgggtaataacttttaaaatgatttttcttttaaactactgatccaatcggcgatttgattgcaccactgtattcgttactgttaaatctttgtaataagatttttcatggttatatttctaataaaatttatagatggttcaaccactacaatttgatgtttcacgtataaaaacacgaatgtttcaacttgaattcaactttattaaacagtatatttttctgattttatgatttttattatgtattcagtcaatatgactaaatgtttcatatagtggttgtaggccatgcagtcaatattttttaatgctgcattttttaagatattttagaagtaacctgaaacatttattattaaaaaatgtttcatcgagtattgtgtgatgtttcagtagtgataacttaatgtttcatgcgtaatatataaatgcttcaattagaaaaatatatgtttcttactaggatataatcatatgagatattgttttaaagtttagttggaaggaatataatagtacaatcggattataaattagatacataatttaggaaaaaaggtgatttgaatcttgcaaaaagttgttcatacataatactgcataggcaggaaagtacgtatttctttatcttgctgagagatatctaaattcctaccagaaaaaaacaaaagaggaaaagataaactggctgcatggagggaagggtatttgattttgggaaaaaaactgggtgcccgatctgtagtcctctcccaatttttgttttgctagcgccacaatttggcactaccaaatttagtgtaaagaattttaactagtgtgggcaaaaataggtaacaaaccaaacattcttggtactattaaagatgccaaaattttggtacgacataaattagcttcaaaccaaacaagaactaatgatcccactaaaattggatgaaaaataataagtagaacttcaggcatcgctgggctcacatcggtactgctatgtgcactattgtccatttgtcctcctcattcggactccatcggtttgctgctctagggccagaacactgttcgtctcctctactccctaagaaaattaattaaaattctgagaatgattttaaacaaactctacggccatattcatttgttggattgggttttttttaatatataattacaaacggagtacgatggcgactgcgtcctgccgacaatgataaaactaaagcatgaaaaatctggaccgccaaacagctgtttcctaagccagcgggatttttcggacggctccatgattgcatcgatctagtcagcattcagccaacccaatttggattctccgtaatctgtgggtgttccaaatgagcccattatacagtaatcggataagcacgatagtattgctactgtgatacgtacttggattacttcttgtctcaggctgacaacgagatgtcgatcatgcattcgcacgcatgctgcgcccattcgagcaaatgcaaaacagcgctggatctgacaattgagcctaggcggctaatagcgttgtccggtgattaccagttttattttacgaacattggtgaccttccataatagacgcgttaacggaagaggctggacagcccgtcgacctgcgtgagagacttgtacagaaaagattttgtccagcctgtcgacctgcgtgagagacttttttccgtgtggttaaaatgttttttttccgtgcgaaggtcttacccatctgcacctagatgtctgagagatggccctgcctgagaggtggctccgccgatgacattaaggtgcatcatatcaatatggcatggagttattaatgattcaggaatgacgggctagtgagttttaaggcccgttagattaatctaagtttcatttgttgttgatgctaaaaacatatactggcctagaaaatctgtttagctccagtgcagttctaaagaattgctttcgggttctgagcgtaccaattagtttgatcctgcaaccaacaagaaactaggaaaagatgcaaagttaaatccataaacgacagccgatcagctggatcgctgatgacatatcattcaatatttagccgatgtaacgtgtatcagatcggcaatgcgagataaattatagaaatagttaggcccgcccgatcgtctgaagatatcaatgatatacaatctatgcttcggaatacatttataaccaagtgattgggatagatcgtacagcacaccgaggcggtataaatcacttatgtctaaaagtactttgaagtgtagattatatatattcatagcatagccgatagagcaaaccctaacatgtctcggctactactccgatactactttatactgagatatcgatataagggaaatatactgaacgaggatcaatataacaggacaacctaacagaccaatagcaggcttaatatatttcaaagaaacaagatcctaatataaatggcagatttagcatatcaagcaaacacaagaatgacaagataactaaaccaggtaagatcaattgaaactctggtactatctctactagcaaccataaaacaggctagatagtgcagttcaaaacattacttaacagattgaacctaaccgatgtagcattaagcatgaagagaaacacaaaatctaaacaagccgatggtggcctcatcaagatggtggatatgctgtgcagtctaattcggtcgccaatgtctaaccttgttagctgttttcgatgatagaggctagtcgataaagttaaacaatgggaccgatctagattacacagcgttgacggtcgttagtgatcagtttcgactgtcaatattaccaaaatagaggagaactaactttgcttgcaatgcatattcatgttagaataataatattccactaatattgggattactaaccttttgcagagaataaccataaagtggaggagaatcgacatcaaatcagacgataaatcaatcggataatgtcgagaatcagacttatgtataaatgggctcagaattgacacgatgaactgggccaaaattcacaagtttgcgcatgggagcaatagaggaggccacttgccgattttgggccaggctggcccagcccatggttcggccaaacccaccacggcgccattcgatccagggttctcctggacggctgggattgactccctatggcggttggagggtatttccgaccattccaaccgccacaaccgtcattctcaagctataaaaggagctctcatcctcacttcactcacactccaagcaaagctctctcatattctctcaagtttagtttagtgttcttaagctagtggagtaggaatagaatagaaattggagtccggaagccttcgaaagagttcaggtatggctctagtagcttccctttcctcttttgtaagttttgtacttttattagaatactcttctttatatatttatggtattgaaatactttctgagtatataaatgccaactttatagtatgtttatgttatactgattatactgctagcttatctaggagatgcataggtacgggtataatgtttgctattgcaattactctatatcatgacgatgatattagagtagtatctggtagtttagacctggtgtctagattacgggatatcattatttgtggttatatgctgcggatgagaggtgggctgctgatggtgacagctcagtatatatagtcctaagttaatttcctgggaagggtactcctccgtatttagccccgattgtatggtcatgacgggctgtcgtaagaaactcgacagttaggagtggcttctcgaagtactagcagggcatcggaaaaagggtattagctagttaatcatatagctagaatatatgtatactatatatatatatatatatatatatatatatatatatatatatatataagtataggaatatattctctttctattttctttccacttagcttagatattttagtatgagaatgagtagctccctgcttgtgtatcactctacccttgatttatcttaacccctgcttagactatgattagggcatcaccaatgtatatgtcaaagtgatccatataaatgaaacccacataaatagtttatccttatagcaatctccacaatatatatagatacaagatatcattaggagaagagagaggagtagagatagataatataatttattccatatgggtagtccatatgcatatgggtatcttttgctattttttctatatggactagttgcacaatgataataggtggctgatggaatattctattgcttatggactacttttacacaacattgtggatgcccttattacaagtaacatataaattattagtccggttctctctgctatgatctttccacgggattaaataaatacgatacccttggaatactctcgggtgaaatgctacaatggtatatccgtacgcttgcggatgaactctgtaaccataacataccatgagtatttctgcgccattgctgggaattatatttctagtaatgtcgttaagaaataccaacacacagcatatatgataactcggcgattcacataagcaggattagaatgtcatgaatatgcaaacactaatcccgagaatgcaaatcgccataacaagccttacctcttcgtcggagatcgaaaccgatgcagccggaagtattattgaactgatgttgtttgtttacaatgtctcgggccatatttatacccaaaatacataatatataatatgttcttgctggacacaactctatctctattacaacttaaaatacgaacaagtcccttaggacacatgatacgattgccttttctagactcaatccttgcgtggcaatgcctgtgtagtgccttgatcgatcccaacaatgattctagaaccatattcctgggatcggctgcatcagcttctccttgtctgactcaatgtcagccgatgcagacaacagttgatgtcgtttgtagccgatgcgtactctgcttttgagaagcaaactctctccaaatcctcttcgattctaacttcgaatccgatctatgatttgccaaatttggtcgttaacagttgtatctatccattttttaaccgtggatgcacaataaactaagcatatgtttggttagctgcatcacctttagcccgcttagttgcccaaccgagtatagaagccgggtttttcccatgcaaacttcttttccacagccttggattttcaaattgtggaaatgtttttgttggttccaaattttatttcttggatgttaaattgaaaaatttcaggattacacgcgtgaatctttgtttgcttgcccatgtctctatccatgttcgtatgtcttatatcttatataggaaagggatttgtgagagaatgattcccctcaggtgcccaatattccttggattttatttcttttatgccagtgccaacattcaaaattttcaaactaaaattgctaaattgaaaagtttttttttttgcaacgtctacttttccctctttcttgggctcaattctcctcccctttctctctttcctctccaaggtacgtagagagtgcttatgaatgagcaagtggggacatgtaatgccactttgcgatacaaatatatatgaaaatgtttctgaaaactaaacttaacatgtgaaactagttttgactgtggcattatggatttatttaggtggttcatagacactactacagattcgatttctccatgcggccataatcaattttcgcatgcgggtgggtggctcgcttgcgcccaggtgtctgcgaaaattggattcttgcatgcgggtagagcaatcgtgtgcaaaaatagcatgcggacgcttaagccatccgactactataaggaaaaaatcgcaaaaaaaaaccaaaaatcaaaaacctaccccgaaaccctaaccttagaatcctcccttcaccaccatcgccatcgtcatcatccttgtcctcctgtcgccgccgctgccgtcatcgtcgttgtctttgtcctcccgtcaccgtcactgtcgtcgtcgtctttgtcctcccatcaccgccgccggcgtcgttgttgttgtcctcgtcctctggtcgccgcctacagtggatgcgcgcgcgagggtggtgggatccatacgggtgggatagggggcgttggatccaaccctaccattgccaccaccgatggatccatgcgaatcaggtggagcggtggccagattcttgcaggagggagagggggtgccggatccaccctcctgtcaccaccgctagtgggagccctctcagccacactcgccgccgccgctctcacccgaacctgccgtcgcctgagcctaagagcgccatcctcgcacgagctcgctgccaccaccggaacgcaagcctgccacaggggtgccaagaagtgtggacaggaaagagtggggagaggaatgggagagttgaacagggagtgtgaggagtggacaggggaggggactatgggagagggatattttcgcatggcgttcttgaactgtgcatgggagattgatttttgcaggcggaagtagttatgatctgcctgcaacctaaaggagatctcgtctagaaaaaatcaattatgtagtagtcacaaaatggttattgttgaccctattttaaggactagtcaagaaaatagataggaaacgaatatgagtacgaccattttttcgtatgagattagacctagtgaatgaggtgattctagtgaggcagcacaccggtcatgtccagtacgttctgatcgctgtggtcctatgtgtttgaataaagagggtagagtgtggtgttaatgacaagtagaataaaatg

SEQ ID NO: 27129 - DNA, 10088 bp, Oryza sativa
gtaaaagtcgaatttgaacttgcatgtttgtgaagtgatatattacatattaacctatcttgtgattttttttggaattttttcataattatttaagtggcatgcaagaaacgggtgtacgttcacccgagagattagaatccatcctctagagtccacagcatcttcctcctcctctgtctctcttttctgccttccagatccagtgcaaggttgaaagtgactgattaaatcttagcaatccttttttctggtgacggcgacgacagaagaacatgcagagcggccaacaccaccggacaaccgcactactgttggaactaaatgggcaaggcggctagctcgacgcaacacactggaatctgccgccaaaaggtagggacgaggccggcctccgtatgatgagattcttccaggatccttccttttcccccgccattcttgccattaacggagggagggagaagtagactggattagatatattatcgagaggccaacaaggttggagacgaggtactctctctaatctctctttctccttcgctttaatcgtctggatcgatcgtgggttggtcatgccacgtcaaaatcgcaggagactctctgatgctgacaagtgacaaccatgagatggcagcgaaaatgcagttcatggccgccatcagagttgaccggccagccgcttgagatctcggctcgaattgaatagcacgttcttaatttgttggctgccccctgcagtgacccctaactgacgccactaacctgaatttcgtgatccgcgtgatgaattgcgggcgaaagattggttgacggtaaaagaaaacgaaagagatatgtagagaagagatttaattggtgcagggtgcagcaatctggccagctgcttccaagtaatcctcctgtcgtgcttgtgtgtatggtcggattcatggacggggcctgcagagccaactaactgaagatgatgatacagattcctgattccacttcactagaaaattcgcaatcctagcgtctccttttctgtccttaattcgtacgttacgtacgtctctagctggctccccagtgatctttattgttggtaatgcaacttcacatggatagccacttgaattgtttacaatatattgggaacaatggtttaggtttattagataacggatacaaaaactccttactaatagtagtgcatgtccgttactacttactaggccaggccggcctcagcatgaataatctcaactcaaacggacctaaacgacttttttcgatttcgtgtgaaagacgcacgtgcaccagggtttgcaatttcggttgccgccaaaatttctgaaatttcagtggttgctgaaaatttgaaaatttcctgatttctaggtttttctgactgaattgtttgaatttataacatattttgactaaatttgaacaagttttgaccaaatttacaaatatttgacaaacaaacgaaaatctcggggagatttgtgcttgccggtgagggccgaaattaccgaaaatttcaaaccatggcgtgcacacatcacactcacacacccatatgagtcccctaacacatacttaaggagataacccacgaagatattgcgacctatagtattgagtatatatagtaatttggaagtcatatatgctttactttgttcgaaattgcaacatgttctatatatttaagcactgttcacaagattttgtttaatttcctgctgattaattatttctttgactttccttctctgttttcctatttcatctgcaattctgcacttgacagttgtacacagcataaatactagtatactagagtagtgggatgtctgagactgtgagccatccttttggaccaaggctgagagcctcccgtactgcattgcatatgttcttttggctagttgtagtaataatgaagccccatattaaataagtcaaacgaaataagttgaaacctttttgcaaaaaagggaaatgaaattgaaaccattatacacacacaaggttcttgtaaaggaagaaacatgcattaattattgaattttctgatggcatgaaaaattaggatgatatttcctaaatgaatggatttaccttactgccgagggctgggttataccgcacccctgtggtaagcatggttaatacgcgctaacaactttttatattgataaacttttagaatagttcaaattattttaaaatttatttaaatttgatatggttattgcacggttaccattaccgtaccaagacggtaagcctggttaccacatattaatattatcaaccctgtttggtggtattttttttcctaaagatgaagatgaagattaagttttttacgcaaaacgaggtggtattaacgtatgatagattgagttttaattattacaaacttgaaaaatagattaatatgatattttagagcaaacttttatatagaaagttttcgcatgaaatgcaccgtttagcagtttgaaaagagttccacgaaaatcttaatcttcatccaactcttgttggagaaaagaatgggatcttaatttctagaagaatatataattttgagcaccacagaagaagaatttgccataagaaagtgcatttctcatttaattatgtaattacaaacacatctcttcacttggaaatacaccattctacctccttttggttaacattaacacggaccagaaacaatcaaaattagtagcatcggttggaattaatacaggcagtatacaagcaacaatagcataaacaacactctatgcaacctgtctcaaattcctcttttcactttttttttcaccacacgtgtgacaataataactaaatagtaattagttaattaattttggttgattaattgattaattaggatacaatcatctgtacttcatctcgaccacgcgtaataacgtacggtatgtgcatgcacgcgaggtgctcgatgaattagtaggtggtggcgaacggcttgtagaccttgaggtcggagaggattccggcgatggagccggcggcggaggcgacggtgatggcgaggcaggcgaggctgagcagctgcaggcacacccaccgcgtgctccacctcggtatcctcttctgcacgatgtacatctccaccgggaagtagacggtgagcggccagaaccccaccgcgccgaggaaccccaccacgtcgttgaagaacggcagcagcatcgacaccaccgtcgtcgccaccacgaacgccgacctccatgtcagcctgaacaggttcagcttgtagcaccttccgccgccgccgccgccgccggagagggagagcggcacgtcgatatccttggtgatgtaccatgatttcggccaccgctgctgcgcccacttctcgacgaaggcgaacagcggctggcagtagacctggtaggcgccgacgaggtggacgacgatggcggcgttggcaacgtcgaggagccagaagggctcgtagaagccgaacccggtgaggaggttgcccggcgcggcgtcgccgaacgccgcgtaccccgtgcagccgcagagcatgtagaagagcgtggtgacggcgacgctcaccacggtggcgcgccgcatcaccctcgactccgacggcggcggcgcccggatggtgtcctggatctcgatgaggatgagggagtaggagtaggcgaaggcgatgtcgccgaacgcctgcaggctccgccacaccttgtccatgggcgtcaccacgccgatgctgatcccggtgaggctccccttgacgccgccgttggccaccacctgcacgacgccgaggccgagcccgatggtggagtaggtgaacgacatgacggcggcgaggatggacagccacgagatctggtcgaagtccgggatctgcgagaagaagatctccgccacgccgaagatgatcatgtacggcgtgctcgagatgttgcacgggtcgccgtgcccctcgacgtggaagcagttcgcccgcttgatcgccctgttcatgccatgccaaccacacgcgacatgagctcaccacgaatcaccatcaatggagagttcgtgcggatcgatactcacagcatgctaatggaggcggcaatggtgtagccgatggcgacgccgacgatgttggcgtactgcaggaacccgcagacctggaccttgatgccacctgttcgaagaaatgccagcacagtgagcacgacgacatgggcgcgtacgaggccgtctctgacaatgatacgtactcaggttggcgttcacggcgtccatgtaggtgtagttgcgcttgccggtgctctcgtcgccggagcggtagcagtcggcgagcagcgcggaggtgtagtaggtgacgaacgagaagagcagcatgacggcggggccggccacccaacccagctgcgcgatcgcccaccccagcgacagcacgccggagccgatcaccgccgtgatgatgtgcgcgctcgccgtccacatcgtccctagacaacacatcaatgtcagcaacgacagccatggtccatggatgaagcttggctcgaggcgcgagctccgatccttaccggtgcgcttgaggcggccgtcgtcgtcgtacagcttggagccggccgtgtggccgagctcggcggcgaccacctccatggccgccgccgggtagcacagcttgctcgccaccacaccgttctcccccatctctgcactttccacaaacacctgatgagcagagagtgatcgatcgagtggcgccaagactttgcgttcaaagtcgtacgtgtttgttggtgggagagactgtgcgtgcgagtgagagatgcagagtggacgcggcaatttatagccgcgacgccgttgcgctcgctcacgcggccaagggttcgggtttgggggataattgtagaaggcaattcaaagggaatattaattatttgtgcagtggccctatggttttctagctagcatttgtcccttgctatctttaagaagaaatcgatgtaaagggttaataatgtgagggacttgaggggctgagtttgttgacgtatatgcctctggcatgtgtgcggaatatatgaccacttgtatgttcccgctttcgtataatatagacgtgtaagagcatgatagtacttgaatatggtggtagttctgacatgttttggcataaaacctagttgtgtgactagcacacacctctaacaaccttttttttttcttaaaataagttttaaattcaaagcacatccaagtatatctgaactaaatgtatttactcacaaaaggtaatgcaaccatgtgtatagttagtggttgtttgatgtcgtaatgactacaaacccttaggacggctcactagtagtggtagttagactcatctattgttgcaaggtcatatgtgaaaaaaatatataatttattataagctacttttatttattgaggggctagcatctatagcagttatccaaccataacctcttaaaacaaccactgtgtttttgacgtacatgttgcagttgtccataattaatgctataatatatgagatttttcgagtatagtcaatccaatataagtacctatatatggtccatgctgtacaaacatatttccaaaagcttttttaagactatttccgaaatcaagcaccaactaaggttttctcaagagagttgagtgtggaccacacacaaaacacaaacttcatggcgcaaaaacaaaacgtggtggaatataatagttgggcccaaagtaaatcgatcgcctccttccagggcccaaaggcacatgtctgcaacttattgctcctgacttagatctctattaagctagctagccggtacttgcatgcagtatacattggactcacggtggtcaatgactcaatgatgttatcagcgagcttacctacctatatttcacctgcatatgcccccacacatgatcatcaaatatcacggtgttacaatgcccactacatcaagacaggtaacttataggaatatatgcacttatcatagctagcaaagaaaagattgcagcagtacagtagtacacatatgttgctagcacactgtacagctagcttaattttgatcatgcatatatatgcatccatgcatatttacctttgcaaaagtctcctcttcttgatcccctaaccctcttccaattgaggaagagagaagtgaagatcaaagagagagaagaagcagggttacaaatagagatatagttggggttgaacttggtgtggtgtgtcatctatgtgcacaatggatgggtttttatagggagagggtggtgtactacatgcattataattagttgtacgacataatggtagtacttaattagtataccaattactgagagaactagctagggaggtccttgcatcctaaggtgtttttgtgccccatggttctcgaccaccctttagttttagagggaatatgttcggtgttccccatctctggcatgaaatttaataagttcagtgcccactagggatagagatcatatcaatgatcttgttctcttggctggatcattccccttgtatcaaaggaaaagggaagactttgtggagatggttttgcacattctggttatgtcaaaatggcccttaacggcaagtaaagaggttatttatgtgatagttttataagtgctgggagagacctaatataattgagcccaagtgtgtattatttaggccatccattttgcatcctagctgcatgttagtgaagggctcggttaattgagcccaatgcaaactcttcatgattgtgcatccccttccctttcatttttttctttagaaaaaaacatgactttgtaatataattttaatatcaaatagatagcttcaaaataatatatgatccgtatcatgcataagatcaacttactgtactgcaattgtttactcatgttcatagatacagaacatatatattgtcatgcatgactcgtgaatatgtagctttgcttcattcagatttttcttttgtcgtggagaaactgaaatgctactgatcccagaacaaatatataagttttccaaagccaaaatattcaagtattaatttggagtagtatatataatgcacgaattcattcaattctgaagttgattactagagagtaatgatcaatgcatctttgataactaattccggtggattatctatttcatgagatgaattaattagcctatgaaagcacagcaaaatagtaacttaacaacaattagtttgatactcacaaaaaaagcgatgacacaaaagcgttgccaaattaatgccttgcatggttcctcctttcgtaactagaatgccgacatcagcatagctaacgcacacctcaaatcataagctacttcactacactactactaaatatgttactaaaataacaaataatctagttcccctttatcgccttttgaaattcgaatatcaccctacttttgcttggctgagagattccactcgattcatatgatgaaaccctgttaatttgaccagcctaattaaacacattatgatcaggagagagaagaaaagcagtggcaagaacgcaacattccttctcgatatgagaatcttttgcagggattaagttgaacacaatattttttttttgtgtgtgtgtgcagctgcgggccgtgggatcacctagatacaattatcaaattaataacagccgagctagttgcacatatataagttacacacagtgatgatagatcactgagctagagctagtgtttagtatcactttatctcgagcacttaacggaaaggagaattaaatcaagagtaccctgcacacgtggatcaacgggtaacgctcgatgttgtcggcttaatttaattagatcctacgagccgccagctgctgctgtttaattcacttaattagaaatcaattaactagctggggtagtacaccgaagattctgaacttctgaccatttggaatatcaaagtcagctgtggtggctggctacgcatgcattcatagggcgacatgttatatgctacgagcagtaataaacttggaaagctgacgaggatatgtggatttttatttgtaaaaaggtcatcacaggggcccccatgcacgaggcacacaatgtacagccacctgggaaagctttggcaacagcaaccagagagagtatgatagctccggtagctgttcgtctgttcgatcccttacctaaattccccattacagcagacgagatgcactgatgcaggcccggttcagacaatcagaaattcagaatagtagctgttactatatgttataaaagtttgtgtgtgtgtagcggcacgacgactaaccttctcgatcgcttcagacatttatcatccaagacacgccagatgacgacacaggaatacacgatatttgttaacgagattcaatcaaaacctacatccccgaggctctgattataggcactcctccctaacaaatatagctcctagcagctacgagttcatggcctcgccgccatcatctccctatgtgtctacgctacattgtagtcgttatgcatggttatattatagttacagagcacctcctaccacctattataactctaagtctaactataattaaataggactagtatattcgacatgtattaatctaacactacgcatcagtagtggtaggagtacctttttgagagcgtgtggagggggaggagtcggccgcgcgcggggttccttatcaagcgtttgtggattctctgggatgagaatccgagaggattttgctgctatcagtgcgtgcgatcgatctgccactgcatgcagtgctgcactgcagcagctcatcttgccggcttttccagccacatcccccctgccgatcgatcagctccgctcctgctcagcctcgccgcgcacagtgtttctcgtacgtacgcgctcgctctcgccgtttgagagatcgcagaggccaaagcgtcggcatcatcgatcgcttccgctggccacgcgctcgctgcgcggctgcggcgggagtgcaccggacgatcgatcgtcgatcgatctgtgtacgtatatatcgggccctatttacgggatctgcactgtatcagcaaaattaggtatgtctggccggcctgatcacatcgtacggttcctttggtaggagaaaagggctgggctccatcatccgctagctggtggtctggtggatgtatggatcgatcaaccgtgcgtggtccacgacaccacgacgggaagtcaacaaaacgtaacgtagtcgagtggcgggcgctggcgcgcagtcaaagccgatgtccgatgaccgagcgcgacaaagcagcgggagcccggaggcgcttttctgtgtggaaaaagaacaccgaaggtccctcgacttacacaaaaccgttcacttaagtccttcagtggttttagccccggttttgtccgatgtggcggctgaatcagcgtaggatccacgtgggccccacatgtcagggtgtacagtcagcacctccctctttccccttctctccctgcctcctctctctctctctcacttttctctcgtagatcggtcgacaggtggggaggagaccgatgggggcatggggtgtggcgggagaggatttctggcgaccggcgacgccgcggcggcaggggtggtggtggcagcgaggcggagctgagcaggggagtagctctgctctcttctttcttttcttctctctgccatagtgaagtagcaacgggtagcagcgagcggggctgagcggcggccggcggaggcatcgtgcgagggcgcggcggctagcggagccgagcggcagagggcggaggcggcgtgcgagcgcgcggtggccgacagagcagagcggagaagaggagggaggcaccacgactgtacctccgggagccccgccatggcctcccgcagcgccacgctcctcctcttcttcctcgtgccctcatcttcttcctcgagccctcgtttccccttcaagggaatggcgtaggagtggacggcggcggcggggggggggggggggg

SEQ ID NO: 27130 - DNA, 41153 bp, Oryza sativa
  unsure (1)..(41153): unsure at all n locations
agccctcctcatcgcgccaccgtcgtcaggaaacgacggcctgcccctaatccactctgctcttctaatcggtcccaaacctgcgcccgcgacgcgtcgtacaccgccaccgccacccagagtcgtgtgccttggcgtccttgccgccgccgcccgggcctctccgacggcccgaccccgaggtcgcacgcgcggtgagccggtgacgctctcccttctcccgcatcgtcgccgccgccgctgtcgcatcgccggcccgccggatgtcctctcccacctcaccccgacgacctccccacccgcggggcatcctgcagaggggagaaaagtgagagagagagagagagagatgagaggaagggggagaagggtgaaagagagaggtgctgacggtacaccatgacatgtgggcccacgtgggttccacgctgactcagccaccacatcggacaaaatcggggtcaaaaccaccgaaggacctaaagtgaacgattttgtaagttgagggatgttctgtatctggttttgcggtttgaggttgattttgtaattcgatgacaagttgagggaccttcggtgtactttttcctttctgtgtagcactagcaccgcaaccacaacggcccaagacaaacctgtccgtgtaccacttctctgacggcccacgtacttactccaacctagatagaagtaaactacctaccggtggaagcaaaaggaaaaaaattcactttagatcacttttgtcgccgagtctcaaattcgtcactgaaccgaaataccagatatagcccatctcccaacttataataccatgttaactttagtctcttagcactataatgcccggttttagtttacgtggtgagtaggacccatgtgagccccacttgtcattggccgtgtgtgaattgagagatttgaatcagcaaaaatagcacatatgcctatctccacacgcacctaagtccttgcttcaccatgcctagcgtgccctagcatatcccctctgtcgtgcctccctcgacgagctctagatctgggttgccgccctcgagtactggccgccacccaacttgccagtgctagctccaaccggctatgccggccgctacccgtggtcgttgtgggtatccagatatacaccactctccttatctacatcgatgctccgcctgcctcatcgtcgaccaggggataggcccctcctcgtgccgcccatggtgcggccaccgccctcgctgactctgcccgttgaggcccctcctccaccctctgctctagacaaccgtcatcgaccgggccttgctcctactccctcctgtgcccgcaaccgccgcccttgggggccccagcgctgccaatgtgttgccacccttcgactgcttcccaggcgtcgtgctcctctgctggtagccttgtgttggtctttgctctctatgctccgtcctttctcttccctatgaacttgtgtatggttaccaagggtggaaggagagaaaataggtgccgatcagatttgagtaagttgttgtggggtgcagaggatgtgctatttttgctgctcggcctcgatgttcttcatcgtaaagaccccttggccgtcatgtgtggaccaactcgacgtgcgtgcgcacatcgacagctcgtccatcttcttactcttggcgtcgcggcgccacagacaacgacaattgctccaccatagcaaacgagaagcagcaggacgtgacggtactgcactccactgcctctctccggccacctccttgcagacatcactccagcacgtacatgggtcccactataattttattatttttaaccaatcactcactggtatataggtcccacagttttatctaactttgtcaatgcctcgtagctgccacattagctgaaactgttgttcaaaccatcttgggaccttatttgcactggttttgggagttgatgaacgcatcatatctggtattgcggttcagggacaaattttagaccccgacgacaaaccgagggacctcaagtgaacttactcggaagcaaaataggccactacgcgaccaatatgggccaaatcacagggaaatctgttgacgaaaaacacgaggcttgggagatctgcttaactccagtgcaggtccaaagctcgcctttgggtgtgttagcgtgccagttgatttgatcctgcaatcaacaagaaatagaaacaaagaaaccatggttaaatctataaatgatagccgatcggctaagtgccgatgacatatcatttatctttgagccgatgacatatcatttatctttgagccgatgtcatatgtgaatcgatcatcggttataaatagataataaggaactaaatctactcgatcggctgtagatattacgaatatatagttcttatatcgatatatacttaaatcaagtaattgggatagatcggtcgccatgacgagacagtataaatcacttagattgaaatatatattaataacggaactatatatgtttatatcatagccgatcaaatagatctagcgtgtatcggctaatactccgatactactctatatcaagatattaaaacaggtacaatgtattaaacaaaagtttaatatatttagattgcgacgatatcttgacacaaagggcagatttaacatgtcaatgaagtatatgaggcaaatatagttaaatcaaataagatcggctgaaactccgatgctaccctaatcggcaaccagaaggcaggctagagattgatattctaatcatgatttaatagatcaaactcaactgatgcagcattaagtatggaaagaagaacaatatctagacaatcaagccgctggaagtttcataaagtggtagatatcttacataatctaaatcaacgtcaaaatctaatctaatcggttgccctctactagcagatgttagccaattatagattagatagcgatattgccaaagattatgtgagatatatgataactcgacgaattacataaacaagattagagtatcataaatatggaagcactaatcccgagaacgcaagccgtcataacaagttttacctcttgttgaagatcgaaaccgatgcagctcagcccaaaagcaagaactcgtcaaaataaaactaaagcaaaagggtggcgatgcgccgaaattgtattgaacgtgtgtgtgtttaattacatagggctcggggtctatttatacccgagaattacaagatatgtccataccggacacgaccattatctctaagaaactctaagataccataagtctttgcggcagacttttgcccaaacatatctctaaggaaattatataaaatatcctaattaatagatacaattgtcttcttaggactctatccatgtgcggcaattatcttgaagcacctcaactcaacctgatgtcatacaccaagttgtactgtcggaatcggctccatcagcttacttagtccgactcagacctaaccgatcctaatcgtagccgatctggactccagccgattcttgctctgttatcggatcgatctccgcctccgactccacttcgatctaatctccttttccgatgccgatgttaccaaatttggttgttaacaaaattctagaggaaaaagtacaccgaaggtccctcaatttgtcatcgagttacaaaatcgtcccccaaccacaaaaccggatacaacgcatcccccaacttataaaaccagtgcaaactaagtcccttagtagttttgaccccgcggttttgactccggttttatcccacgtggcggctgagtccccacatgtcagggtgtccccgtcagcggctgctctctttcctctcttctctctctgttttctctcctcccttccttcctgtcgctctgtgctctccaacaagaggcggtgcgcgcgaccgcagggtggtgcagccggcgacgacggctcccgggtggcggcgcgcgggctcaaggcgacgcgagctcgccgccctccccgtccccctcgtgcgatcggcgatggcggcgcggctgcggccatcatcaccgggagtccgtcggagatggcgcgcggctgcggccggcgggggaggcgggagtccggcagcgaggcggcgacggcgacgacgcgacgacgaggaccctctcgcgccccctacccctccctccacctcctcctcccaaaaatccccatccggccatccccttcacaaccccaacccgacagcttcatatgctccatggtgcccggcaggccggcacccccacggactagacgcagtacagccgtggcggcctcctcttcaagctcagcgacagcaacatgcagtacgtcacctccagctccttcctgctgctcacctacgccaagtacctcgccttctccaagacgactgtctcctgcggcggcgccgcggtcacgcccacgcgcctccgcgccatcgcgcgtcggcaggtggactacctgctggggagcaacccgatgggatgttcgtcggcgctgccatcggagggcccaacatgcaggactagttccccgaccagtgcagtgaccacgagcactccgagccagccacctacatcaactcgccgctcgtcggagcgcttgcctacctcgcccactcctacggccagctcttctccggcctccccgccatcgcctacggcgtcctcaagcgcgccaacgacgttgtcgacgacctcctctcccagatcgacgccgccaaccgcgaccgcaacagggcgcaggagcagatggagcaccgcgccagcgccgtcggcggcgccgcgtcgttgcctcgtcgccgccggactcccacctcccccaccggcctcctccccacccgccggctgtgctgcctgtgagagaaaagaagaggagagaggaagagaggtggagcggggaggggaagaagagatggatatgtgggacccacgtgggtctcatgctgagtcagctgccacgtcggataaaactggagtgaaaatcgctgagggacttagtttgcactggttttgtaagttgagtgatgcgttatatccggttttatggttctgggatgattttgtaactcgatgacaagttcagggaccttgggtgtactttttccaatcctggaattggtagctcggcaaaccagcccaacgatgctgccgccgccgaagaatctgatgacttcgcctccggcccattttcggacacgtgtgctcccagattcgttcctccgtcgatgagtagaagtcgtccaagcgagcacgcgcgcgtgcggctctgtgctgcacctgcactgctgcttgctcaacgagtgaaaagaagcttcagagcgagttcgtccaaattaaagggcaagccgccgacaacgacgacgagagagagcaaacatttcttcacgaaaaaggattcacggcagcattcgtccttccgacttgtgctctggcggtttcactgattctctccgagattgatgcggcgaaactttcgtactacattacggatatgtcattgttatctggtagttactgatagttactacattacggccgtgtctagttcactctcaactatccaaaacttctaagtttctatcacatcacatctaaaatttttctacacacataaacttctaactttttttctaaactttcaactttcctccaacttcaactttttttcaggaactaaacacagtctacacgtaatagtagtaactaattagggccccctttgaatcaaaggatttatataggaatttcataggattcaaatcctataggaaattttcctatttgaccatttgattcaaaggattgaagcttttcaaatcctatgaaattcctatggaatggcacattgcatgtggattttagaggaaattcagcaagagctccaacctcttgaaaaatttcctttgagtctatctctctcatccgattcttgcgtttttcctgcgctccaatcaaacgaccattcctgtgtttttcctgtgttttgcaatcctttgttttacacttcaattcctgtcagaatcctgtgttttttctattcttctgttttttctaccctgcgattcaaagggacccttactagttcctgtgaactaattgtgtcaccttgagaacaagatgccaaatgaagtatcgtttctccgaatggatgcatagggtggtgaggcagagtttcttgaggtcgttgtgttgaacgtcgtgatcttcctttttggactttgcttggaccggaaccggaaggttgcctggctgcccatgtgggcttgttgagaactcgacgacttgtcaacttttgcattgctactgcatcctgcatgccgttgtattgtagcagtagcacagcagctgtctcatggcttcatcgtcgtctggattagcaactctctagctgatgtgttgtactaaggaaatgatgaggccagaagggtgcaagctggtgttcggtgctattgtgctaagctctttgtcctcttgatggcagatttgtctaaagggaataaagggaggatcaggatgccccgtttactgattgaatggacccaaagtagacagacacctcgctgttcagttcagaagcagattcgatttggacctgtttcttctcgcagtccagggacaatgcatgcgtcaatgctgatgataatgcatgtgcgccaacgagctcgtgagtaaaagtgcagtttctgagtaaactaattgccccttgccacattgcttgactaatatataaattctgtcgtgaactcgtgatatactatatatcaaccctgtccacacatgacatgggcgtgggcacatggcaaagaatgcttggctagtttacatatcacctattatctgttttcagtcctaaacattgcagggtgataaacctttttttctcctagaagacaaagctataaactaatccctgtctcgtggtttatgatacaccagtatcatctcttaaccacataacaattgactaaaaaaaagacggtctattacacatttgatagaaaatacctatcaaaatcttacaatcttggaaccatttgatcactttaagattcatgcaaacacacaaaccctaatcctttttccccttagtgctgcactctcgaaccccccgatgccctacatagagtctagactcctcgtcgccgccaccaccgtcccagcacgctgtcgcctgacctcgctggctagccgacgagatatccccgctctatcatctttatcatctccggcggatccccgccacaggatccatccccatcgggcagcaacttctaacccgttgctccgttttaccatcgccgctaataccaatccaccgccaactatcaccctcccgctacgctgcctcctacggtcatcactctaaacctggggatctcccccttcttcctcctccctccaaccccaaagcacgttcggtggcctaaaacctgcaagatttagggatgaatttttcatcaacagaaggttagcaatcgctaaaacatagtagtttgtgagtcgcagttggttgtaccatgcacgctttgtatcgggctctgctggcatgcaccatgggacggggatacgctattatgtctatacttctatagaacctcacacaaggtgaaaatggtaggaaatttcccgatcataccgcctacctttcagttgatttgtgccaaccatttaatttcgattgtatattgtccggaaatgttgaagttttattcgaaccgttttagtagtatacggtttactgactgcccatccgaataaaaagaaacataatatttatctgttatcgaaatattcaagagttttattctaatcgttttaatagtatacggtttaccgacagccgatccgaatataaagaagcataatctttatctgttatcgattattctattttaatgatgtattcaaaccagttatagctttgaatgttcactaatagtttcatgtgacgttaatttgtaatgtaaacatgactatgacttatttaccccttgatatatttttttggatgctctattttggtaattctattttagatattttttttcgatgtttcaatagtaccaatatcgttactattgaatctggatctaccgttcaatcacgtttccaaaaagaattagtttgagcttttatttgaaccgttttatccctataagtagcaatggtgctgtagattttccacaagagtgatggaagctagctgaaaaagaatactccgtatcgcttttatggcaaaagtcgtggagaggtaaggatgacgacgagaacgagctaggctgaaaagctacaagggccagaaataaataattaaataaaggcatacttgttgtagtgagatggggattataagattattcgggttatggtggatgagggagaagtatttgggaacatcccaacttgatgggcttgttcaatttgctatcatttttaactttatctttttttggtaaagtagaatggctatatttagtttgttgtcaaattttagtaaatacatatgaaatcttgccaaaatttagcaacattgacaaaattttgacaaccttagcttactaaaatttggcaatgtcaaaacttggtaaggttgaaaatggtagcaaagtaaacaagttcgatattacaaaagtcctaattgatttcttttacattgattattcaaacgaaatagcctcctagggcctcatcgtttggcatattcatatgcttatcagccaaatttgaattttcaacattaaatttggagctgaatttgaggttttttcatcgaagtttatttttcagcctttgcttttagatcgctaagagcacatatataaaagttttattcacaaattaatttttatttgtaaatatgccatattcagaaaatatgccaaacgatgaggctgctagtgatttaacgttacatatcaatctaagagtaggatggtacaaacagtaaacaaatggatagcttagagccaaaagacaggaacattagaatttagtactagaaatcaagcactaatccactctgacacgtcatcatgtatcttctaatctacgccacgtcattaaaaaaaaccttgacctcatatcagaaactttcttttcggccaccacgtgggcccacctctcgtcctcctcatttcgagcgaccttccggtggaccccgccggcggccatcggcgtcgcctacgtcgccgtcaagcctccccggcgaggtgggccccacctgtcatcctccccggagcgagacgaaaagctccgcgcaacgtataaattatttatcccgtacacgccaccttcatctatagccgccgcattttactactgcccaccaccaccacaccacccaccccctgcctagctattagctaagctgctctgctccaccactcgtcttccgcgcgcagcaactgttcgcggaaatgccgagcctggcgctgctcagggcggtcgccatggcgctgctgctgctgctcgcccgctcgatggagggggtggatggggcgggcgggggtgggaacgcgacgtgcccgctcgatctgagctacgtgacgacgttcccgtgggacgccgacctgtgcgccggcggggcggggaacatgacgaggtgctgcaatacgctgctgtccgtgctcgccatcggcctcgcggagcaggtccgcgccacgggccacttccgcatcccgtcggtgggggagtccgcggcctgcctcaaggactacggggcgaagctgtcggcggcgccgctctccctcccgggagcgtccctcgtgcagacctgcttcccttcgccggagcagttcgtctcctcgccgtccttctgcgccggcgtcaccaccgccgcggagtacagggcggtcgtcgggaacgactccgtggccgcgctggactccgcgtgcggcgacctctcctcgacgccgcactgcctccgctgcctcgacgcgggcatcgccgccacctcccgcctcaaagccgccgccaacatctccgccaacgccaccaccgacggcgccgcgacgacgcgcaactgcttctacctcaccgtcacgtacgccgccggcatctccaacgtcgccggccccaccaacccacctaccgccgcctgcaccctcggcctcgccctctccaaccctcccgccgcgccgcccaaatcccacgacacggtcatctacgccaccgccatccccgtcgcattcctcctgctcgcctcgctcctcgcgttcttggtctggaggaggcatgacaagaagaagaagaagaagaagatccacgagatctccaaggagggatcggcgaagcggcggtcgcatccgcggccgaacacgggctccatcctgtacgacattgccgagctctccaaggcgacggacgccttcgccgaccgcaacctcgtcggccgcggcgggttcggcgccgtctactgcggcgtgctcgcggacgggtccgtggtcgcggtgaagaagatgctcgacccggacgtggagggcggcgacgaggagttcaccaacgaggtggagatcatcagccacctccgccaccgcaacctggtgccgctccgcggctgctgcatcgtcgacgacgacgccgaggaagggaagcagaagttcctcgtctacgacttcatgcccaacggcgcgctcgaggacttcatcttccgggacggcaagcggccggcgctgacatgggcgcagcggcggagcataatcatggacgtggcgaaggggctggagtacctgcactacggcgtgaagccggcgatctaccacagggacatcaaggcgaccaacatcctgctcgacggcgacatgcgcgcgcgggtggcggacttcgggctggcgaggcggagccgggaggggcagtcccacctcacgacgcgcgtcgccggcacgcacggctacctggcgccggagtacgcgctgtacgggcagctgacggagaagagcgacgtgtacagcttcggcgtgctggtgctcgaggtgctgagcgcgcggcgcgtcctggacatgtcggcgccgtcgggccccgtgctgatcaccgactgggcgtgggcgcacgtcaaggccgggcaggcgagggaggtgctcgacggcgcgctgtcgactgcggacagcccccggggcggcgccatggagaggttcgtgctcgtcgggatcctgtgcgcgcacgtcatggtggcgctccggccgaccatcaccgaggcggtgaagatgctggagggggacatggacatcccggagctgccggaccggccgctgccgtacgggcacagcgccatgttcagcgaggccgggagcaacttcagcgcctcgccggcgttcagtggcccgttcattgacaatggcgacatgctcaggtgatgtaggaggaggtgatctttttcttggcgaattcaagaatcatacagcctactagataagaacaatagccgatatggatgtagtgctcttgcaaattctggtcaattgaactccagaatcatatgtttcgttatctcttgatttgcattgatttttttttcccatacaattcattccaagcgatgaaacagatggaattattatcagagttggctgctacttgtgaattttactgatccttgccaagataactagataatacaaactgactgttcaccatctggaaacaagaacagtggctaattaaacaagcagggagaagcacaaaagcaactgacattgagtcatttctgaattctgagtgctaatgctgggagaagcacaaaagcaactgacattgagtcatttctgaattctgagtgctaatgctgggaggagcacaaaacaactgacaccctctcatcagtgtgagttcattcagacaggcatgagagaaaccacagatacatctagcagcgcatgaggaaatgcaaagctagcaagcaggaggttcagccaaattggcagtgctcagcagcctacttctcctgctggaggttggggtggctgggctgcaccctgaaggtgaacggcatcgaggccgcgaagtccctgtcgtcgtggtggtagccgagctccagctcccttatgccgccgctcagctcgacctcctgctggtgctgaaaacacggggaggagctcagtgaactctcagctttcaggcttctttcagtaaagcttccctcactgaggtttgagctctgtgcagggaagtagtaatcagatctggcatttctgatcaattgctatatggatccagaatgcaggggtagtttgttcatagatgataacatctaatggagcagtcaattagatcactggtcaagattcaataggatgttttgtcatatatgaacaaactacacctgcattctgaatccatatagcaattgattagaaacaatagatctgactactactactaccgtgcacggagttcaattttcaatcgctatatgaattctgaatgcaggggtagttagtctagagatttgttgcgtagaatggttctgattgaatattgaccagtgatctaagtgaccgcattagaatgagcatggcactgaaaaatagctaaagtagtgataggcgcaactacgaagggtcacttattatcgaacctagttgaacagttagagcagttatatcagatggtatttgtcctcaatttcagatggtttttagaaatagaaatgagaacacaaggaatttttcaagtgaaagttcaatagaaaaacaagttactctgaaggaaattaccaccctaaaagccaacatcttgtgctcgtcctccagcatcttctcctgaagccgaacacagagacatgtgaggtgagtgatcagagcttgcaaaagatattgacttcatcatccacaaaagaagcacaagaatcatccagatatctagagctcatacattccttttatgcatcctccagtggtccatctgcaacatcatggaaacaaaggtgacatcagaaacaaaaactctctctgaaaaagaagagatgcggcacttgcaatctctgcatgccatgctgaagtaaacatcaagcttcaaagacagtaatcaccatcttgtcccgcagattggcctggccgttgttgagcgcctcctcgatcgcgatcagctccttgggctgcagggagttcagatcctcccctttcatatgcctgcaacatggaacaggcttgacaaatcaccaccatccctgatgtccccaacaagagcaaaatctaaagctgaaaacgctacaatgggtgatttatagttgtctctttaattaataggaagtgaaagaaataaagatgcatgatagtaataagttgggacactagcctgagctcgatctgcatgttgtcgttctccttcttgacacgatcgatctctgcgctgaggctctgaaacgttttccaagaatacatttttttaagcatttctattcgattttgtaggaataaaagtttggaaaaaaaataatccagaaaagcacgcaccttgtgcttctcatcccagagtatcttcccggagttggtctggtacttctccaagatccttgacagcctaaaacgccaaaaaaacaaatcaaattaaaggccaaacacaatgcaaagagaacatgcatatctcaggaaacactgaaattaagagcaagaaaagaagaaaagaaaaaaaaacaaggaagaggagagagagagacgggggaaacacggacgtggtcttgggcgtgcagtagtcggagagcttgccggcgctggagaagatgacgacgccgacctcggcgtcgcagagcacgccgatctcgcgggccttcttgagtatcccggcgcggcgcttcgagaacgtcacctgccggttcgtcgagttctcgatcctcttgatctcgatcttgccgcgccccatatccaactcctcctcctcctccactccaagaacacaaaccaagaaacaaatcttcacctcgctctcgaagaaacaagagggttggggagttgccgttcttccggtctttaaggtggggatggtggggggtgtggacgactggacgccatggttggagtggagtagtaaaggagggtgcagtggaggaggaggagggaggccgccatggaaggaatggaggtgaggggggctttcgcggtggggcagggctggagcgccggaaatggaaactgctctctctctctctctctctctctctctctcgcgtggtgcattgcgccattgcctggctacgtttcgaccgggtgcagtccgtgcagatcgatcgacgtaggggtagggctcggtgcttgagcttgagctgacctggtttgcgtgggactgagatggaaatgagaatgacacatggtgagcatccactagtggagaaattgtttttagtcccggttcgtaaccccttgtagtttcgggactacgaattcaggactaaagatccctatctttaggccctgtttgtttcagcttaagattattgtaatctagattattaaatcagattgctctaagctgaattataataagctaatataaaataagctacgagttgtttgtttctctggattattagaggcatctaaggatagtgggtctttagccactcaataatatggaaaaagcttccctagaggagattattggattatagtaatctgacttatatattataataatatagcataataatctacttgtttgtttcagcttactcctaataatccagattataataatcttaagctgaatcaaacagggccttagtcccgattcaaatactcgggactaaagatgggagaggcagtcctggttagtttttttattttcatttattgctacttactactcaatctctaatttattttctcccaaattatgtgggatgcatattcctaaatcaaaccccaaatcaaagtaacatcccaaatacacaaatcaatcatatacaccacagattatagatcccaaatcaaaccccaaatcaaataaacatcccaaatacacaaatcatatacatctcagattcatgcaatgaatcacagattctaaaaaagaaattatacatctcaattcatgcaatgaatcacaaattcttcatctcaacctatacatagatcacaaattcttaaaaaaaaagagaaaaaacgcaaagccgccagccggctcagccgctgccgcttccccggccgccacttcgccgtgccaccgctgaagcatctaggcccccggtgttaattttggtaattaatgacaagcattaattgtggactaaccgttgtctttgagctatatattttaagttaggtccacgtcatatgtgcgcatggatgattatcgatggattaaaattgacggcgcaaagcaaagggaaagaagacggtaaaactagcgctttaatttagaattgatcgaggtgtagggcgatcaaatttgccagtttaattttagtttcgccgtactattaagaggggtaatgacctagcaaagagatgattttaattgccacattaggtcattgcattttcatttgtgctctctttttcattacacacacattcacttgcaaattcactgggttcggcctgaccaggggcggtcagaccggccacatagtggcggtctgaccagcgtgccctggccggtcagaccggctacatagtgacggtctgaccggcggcactttcccggtcagaccggccccctggaggccgagatggtgctgctcgggatggccgatacagagccgacgaagccgtattcggtcagaccgaactgatggcggtctgaccgagccgaggccggtctgaccggccaccccatgccggtctgaccggccaggccgatggggccctctgacagggctacaacggctagttttctagccgttgcagagtagcacggtctgaccggccacatacctccggtcagaccgacagagcacagagttgggggatttcgcccccaacggctagttttggtgggtgggagtataaatactcccccaccagcagcaagggggctctcttggcacccaattcaattgcatacactccttgcacctctctcacactcacttgagctttgtgttcatccatctagtgtgttagagggttgtttagccaagagtcaagtccatttgcttccattgtagagctagtgtggcacttgatcatctccacaccgggtcattacttgttactcttggaggttgccgcctcctagacggcttgtggaggagttgctcggtgacctctccgagaagattgtggaggaggcccggcgccggtttgtgagtggtttggagttcaccaccttcagagtgaaggaagaactaccccgagtgatcgaggcttgggtagtcctctccgtgggccggctcccgccttgcccaccccttgatgaagggggcgtgcggtggcttcgtggttgagcggtggagttgggctcgcctcaacggggagtaggaaaccggcgagtttccgaacctcagtgaaaaatctcttgtctcattgtctcatttgattgtcgcctttacatttgtgcaatttacatttctagagacacacttgagatcatatcaccctaggattgcaaaacatcgacataggagcgtgatttactttcctagagatataattgagccactatcaccctaggtttgcaaaacataacttagttgcttagttagagttcaccctcaccaagcctagcaacttaggttagatttgattaggtgttatttagttttaaatcgcctattcaccccccctctagtcgacatctcgatcctacaaccgcgcggccctccgcgccgcagcgccggccgccaccgtccggcccaccctccccctcctgctgcgcacttcagccacacgcgaagggataaggaaagaaaagagataaggattagatatgaaaagagagagagaggagtttgtgtggatgggaaaagacgataagtaatagggattatatagtgcgttttgatctttagtcccggttagtaacaccaaccaggaccaaagatcatcgtgatctttagtcaggattaaagatccgaactttagttctccaaccgggactaaagatcctggagggccctgacaacacctcatagcatgtgaaccgggactaaagatcacgtagtcccgttctgtttataaaccgggactaaaaaccatctttagtcccgattttttattgcaaccgggactaatgtggtttttggtcgaccgggcaaagatggtttatccactagtgatcttttctcctctagtcgttctcttttgtgtggaaactattctgagctctcgagggaactgtttgagcaacatacaaacaacgagatgatgttccttcgagagtttaaaatccacactcctcttttgtgatcttcattcactcattcttgctcgagggaactgtttgagcaacatacaaacaacgagatgatgttccctcgagagtttaaaatccacactcctcttttgtgatcttcattcactccttctgcaaggagcaggaatgagcatgaggttgggcagattctgaaccattcaggatgcaaactatgagggcttcattgctcaaccatgtaaggcaccggtaaagccattcacaatgcaccgagatggcgagtggttccaactcgtcatgttggtgtggcaggctggtggctccagctagactaaacccgtgcctctgtgaggtttctagttccttgcagagggcgtgagtgtcccgatagggttgaggggtacttgtgttcaaggtacagctcgtgaggccgggcggtctcgttccccattctttctttcaaatggcggtgaccaaaataaagtggtgcgacaaatgtcattggggaagagaactagcacaacggagaaggagagaataggagtgtattgtctccagacatcacagagtctatcacacaatctacggccatatttgttgaggtcttcactcaatccgtcgttgtcggttacctaggaactagggttcccatagcagacaacgcgcacaaggcaaatgacatgtgtcagctcacccagctcgttacccgcgctggggaacagtttgggggcgacacgtggcccatctcagattgcaaaagacgttgccttcggggcaccccgagagaagatcccaaatcgtattcaggctgatcttgggtctcatactcttttccatttattcatgataggacgattatctaccccagggcaatgagtatggaagacaacgcctgtcactttagtcgtgttgaatctgacactagtgttggcaatggcatgcgggccctgtgtccaggttcaacacggctaaggagatgtggtcaggttctaccataccccatcgagacccatgccttttattgggcaatggcaggcggaccccatgtccagctaggcatggtgaatcctattcatcgtgtcgttgcgtggattaagtagggtgtgtggcaagttccgtgatgccccactcagagtagaccctactcaaagttgccttgaggcttcggtggattcgacacggtagcatgccgagctctcgcacatatatctcgcgaatagtaggccctgccaggtgtaccccccaggtcaacggagtaggtaagaagaggagttactgagaagacttatcatacttgatcttgatatgaaaaaagatatttcctcgaactttagtcatgtggtttcccccaaagaaggtataaggggaaaaccgagaccaaaggagagcggattggatggtggtgactaaggagagacttcaacacattatgtcaagctctcttaataaaccccaaaaagaaaggaagcagaactactccgagtagtcgataaacctgtaaaatccttcaagcgcaagaaatcaccaccataagagaagtagggtattacaccttcggatagcccaaatctgtatacttcgatcgtgttcgtttgtttgtttcttgcgctcttgaggggctcaagtcacctccttacacgtgactagctcctcaaccgaactcacagaagggggtcctaccagatccccattatcaaggttcacactccgacaaccgccccctccctcgtaatggatctaggcgtcaatgagctcatcggccctagccttgaggccgctgaacaaatccagcggtagagtgaatccgccttcgattttcgttggagatagagatgaggtcgcgagcgtcaggaagggatgcaagtgaggtgggcatgagcgctgggtttatcttatggaaatgtatctggaatctagaaagcagtcttaggaacatctttctttttattaacaaaaatatgtcaatcaacaggaaatcaatagatgcagtagcttagagcatctccaacagagtgaccatttttggctctccaaatgcctatttggccagcctaataaaagtttagagagtcaaatttgtcttctattccaacagactctcccgttccactctctattaaccaatggaccccacctgtcattctcctcctctttcttcttcctctctctccaatcctctgctcgtgccagcgggtcggctgcggcaacactgcggaggaggtggtgaaggcgtcgagccgccccgctgccgctccctccctccctccctcgccgcactaggagagcgatgacggcggcactgggcgggcagatcaggaagagagggagccgctgcggggaaaggtaggcgacgacgcggacggcggcggcggtcgcggctggcgacgacgcggatggcgacggaggtcgcggccgccgatggtgcgaacggcggcagaggtcgcggccgtcgactgcggtggaggtcgcggcgggcgacggcgcggacgacggcggcggtcacgtgtgaccacgtcggcgctgggggctatgcgagagagaacagccggcaaagagaagatgggaggagaatgtgtgtggggcccacaattgcccagcgatttttggctggctaaatttggctagtggagggagggttggagagactgttggagcgcgttttttttgttagagtggctaagattttgcttagagagtaatttggataggctgttggagatgctcttagtactgctactgtataatgcgcaacagttgtttgtgttggtgaactcagaccaaattccattgtaaaacatctgaaaaaacgtggctgttcggaggacatcacctgtgaaatccattatgactttacgaggtcttgctcttgcagtcatgtaactattcctccggtacaaaattatccgtaaaaggttgaaattcacagaaacttccttggcttggtaactaaaaaataaaaaagcgtacactaactacgttatcaaaataaatctaatttctgtagcatcaacgactccgtggcccaatggataaggcgctggtctacggaaccagagattctgggttcgatccccagcggagtcgaaatagcatattaattttgctatgtcttttgtttctgttttactacctggactcctggaggtttcacttccaacactgccacttgctcgaaatcaatcttttcccatttttttgtcactcacgttggtcacagttcaaaaggtattacctcttcatgcaaatgatgatgatttctcttttcccttgtctcttccaagcataggtcatcagaatcgctaattagcaatcagccacgtacatacaaagtttatacgtaacatataaagtttatgtatatggatataaattttatacatatactcaaaacgattatacgcgcatgtataaaaaaaatgatacatcaaaatatgtatgcgcataagatttatatacatatattttttatataaatatatatataaagtttgtacgtaattttgcccacgcaactccaccccactcccgcagcccatcccaacccaacaccagttcagagagtagcagtgcagcacagccaaaccaggccactcaagattgcaatctctgaaacccaaactggcatttcaggagggttttacaggtaaaagaaaaaattacaaccaggcaggtagtgcagtgaagtcgcagggctgagcagaaagcaaaggtgggttcgcacaacagagaccaactggaggaatggaagctcatgttccttcagctccaaactgggacctggcaatggagacaaatgccgactgactcagtctccgtcttggataatctcaatggccgtcgggtcatccgtttcgtagtcgtctgcgtcgatcggattgcaagctagtggcttgtcgatccatggcatgtaggccccctcgtggcacaggttctggaaacagttaaaacaatttaggctttaggaacaatttaataacttattattaatgccttcagcatagctatccttaattcccaaacgaagaacataataaggagtacatcaagaacatcattcttgttccctagagttatgttgtgagcattcattgattagtggccagatctttcaaagattagtaccctgtgaaatatctgaatcaaagaagtaacatgcacagaaggaagatcggacggactagttccctctatgtcaatgcggtgaaaaatgctagcgacaactgttccttgtttaatgtattttatagtgaaatcattttagtcattgcaccataaaaggaattactgtgatttatatcttcttcttttttcgaaacggaatcacagagacagacacctaatattttgacatagtttcagccattagtcaaatgaagaacattaaatctcaattccacttatagggtagtttagagatcacctccaaccagaagaagaattttcgcaggaggcaaagttttctctcatcagagtcagcagaatctatttgtatggctagatctgtatgagagaccaaacattagtgttgataaaagaaatcaagtactaagcagaatctgctaatctggcttatgtgaagcaccaagtaacttgcaaatatgcaattatacatcgtgccataaaaatcagacttcagcaattgttaccagggaaatgttattcacaaatgcatggatgccgtaaatttattttatattcaaaattgacatcatataatacaaccctcaatggtaagctactaataaaaaaaataagaattccttttccctgtgatatgtgcctatgtctcattttattgaggggttgcagtaatgaactagtcagaggtctagcctattgacttaacaaataaattccactgatcctttgcaactggcgaaagacaaaggccttgaaagttaatccgtaggatacaacaacaggctggagcacagatcaattatgtgatgctactagatcatataatgtacaacgagtgtcaaagcttgtcaacgccgctcaaatttaggacaaaatcaagcccttggactgttagacatgaggattacgaaattactgaccagaatttagtgattacctgggtagtgatcaagaaatgacaacccaactgcccttgtggcatagggcttggatgcatttcgcaagtgtctctgtctactcacaagcttccgatctgtagcttttctcaaaagctctttatattcatttaggtcatacggcttacttaaaacatcattaagtttttcatcaaatgtagagggaatgccacaactaagagcaagaggttctccttgttcatctccacatacctgggtccaaaaagcaaggtacataataaataaaacatcattaaagatattgccaagggaacttaagcagacaaatgactcacattcaaatcagaaagttcagtacaaggtggaagtccatgctcatctatgcagactagatcctgaccacccatgttctctaaagcaaggccatccatttcacgttcagatgcagaattattgatcttcccaagcccatctccatcagtattcatagcattctcttcacccatgttttcaaatgcagtcatcaaagaatctcttccatttgtggaagtggctattctcaattcatcatatccaaccggtgtctcctctgcttgcccatatacaatggtaacgcctggttctggctcaataaccatgagaccattcttgatcttcagaagtctcagaaatgtagcatatgactcatcgatttctgacgtctccatcgcaaatgatgtacctagtgaaaaacaatgccccgcatttgcactgccagccttgtctgatgttacacctggtccctcgctgttttgattacaatggcttctacgcaatgaactttttgtgatatttgtgccggatttggcattagcatatccattggatgcatgatcttgtgcatatcttagaaaaacaggcgagccatggtcccctctcggcgcatcaagtacatagccgttcccatcttccctcagatgttccaagaaaagcctgtaacttggatctatttctgggatactatcaacaggtagactaccaaacactttgttcttgctgcatgatgatctgctcaccatgtcctgggccttcatctggcaactcccctggaaatccaagaagtgtaaaaaaccacagctacatcaatccgaagagcaacaagcacggatacaacctactgagagctgcatcaagagtagtaccacggtgttgaaaaaagaaaagaagagaaaaaaatcgagaatttagagtatttaccatcaaattcgcgtgcctcaacttttttaccactcaattcgtatgccctctataatatgtcattaggagtgctaaactgctaatttgtctatttggtaccgttttctctgtttttcatgtatttctcatttcttaattttatttgtatatttttttactggtttgtggacatttctacccctgggcccacctgtcagatccaaaagagagaaatttctctctggatcgatcgatccctccaggcaagcgcccccgaccggcatcggcgccgtcgaccgcgaccaccccgctgcgcagcgtcactaccccaccaccaagcgccgccgcagatcgccaccgccgccagggtgagcaagctcgccgccccagcccccaggtcgacagcatatacatgtctattacgctcaggcgtaacaatttaccggtcaggcgtctacagtttacaataatttgctacaatatacatgtctgctacggaatcaggcgttgcaaatgagcaaaaatggctcaaccaattcctgctgcaaccatatgatcttcaaattgattttgggagcgattgaaaaactgaagaaaaagagaaacagcagctttgccaccatcttatctccttgtttctgctttgctactggggactgccctgctcatcgcctccatcttccagttcttgcctgtaaaaggaatcggaaagctacttactctttgcagaccatcggcagcgccccgcggtgtaggcggtggggccgtcgagctggggcggcgggggtggtggcgctcggcggtgggggcggtggggcgtcgagtcagccgcggcggcggcagctctcggcggttggggcggtgctcgggggcggcgagcttgcgcaccctggcggcggcggcgatctgcagcggcgcttggtggtgaggtaatggcgctcggcggcagggtggtcgcggtcgacggcgccgatgcctggagggatcgatcgatccagaggagtctctcactttggatctgacaggtgggcctaggggtagaaatgtccacaaaccagtaaaaaatatacaaatggaattaagaaacgagaaatacatgaaaaacagagaaagtggtatcaaatagataaattagcactcctaatgatatatattatagagggcatgcgaactgagtggtaaaaaagctgaggcacctgaatttgatagtaaatactctaaattctcgaaaaaatcggcacactgttgtagttaaccaattaaatgcacaataaaactagtccacaataagaactagtatcagcttgtaggcctcggccatgcacgcggcggaggttagccagatagatgatgatctcccgcattacctgaattgattaattgattacctccaccacatgacccctgcccctgttcttgatcccttttgctgcatgagcagcagcacagtcgaacaacctaatctctcgaagaggagagagagggggactggcaggaaatgggtgggggtttacagtgggagaggtttacagtgggagagagcggatgcggtggccgcaggcaaagaggaggaggaggagagacgatgtggcagcgaaggttggtgacccagcggacgacctgtttgaggagaggagaaagtagccaactcacgggtgtgcattaccaagtatccacctaggaaaatatatactgcaaaccacttatacagcaaaaacttaaaaactattgtttagatctaaaaacgagcctatgagattcgtccacatcaccatgagtaaaaattttactccttgttcacatcaccattactcataagtaataaatgtagtaaaatttttactcattgtaacgtggatgaatcttggctacaatattcttctccctcccctctctacagtagcttctctctctccctcgtctcccatcccctccttcccccagattccaacggttcaccgccggcgagggttggaggaggggtccggccacctccccctactagtgtagtgtggttaggtctgttattaggtcgttaggtgcttcctgtagttagggctagttggtgcttttgccggtgagtctccacggatgccagtgtggacggcggcggtgatggttggtggtggtggcggtgcgagatccgaagatcagtggacgaatcgacgggtggagatggctccttgtggtagtgttggttgcagcaccgtcttcgcccgggaggtcgccacccagctcctattggctgctgcggcggcttctcgaggccttcgttggctagcgctggcagcacatgtccatgtcgccctactatttcccggagcttgctactcgcggatgtcaagccgataggtcctagtgcgttcactggttgcagcgacgatttcttagacgtcgtggatttgttttcgcccggagctcgcagctcgtgatgcgcgatgacaacccgatgatggcttggtacatccaatggatgtggcggtggtttctctagtgcctgaacgggagcttccaatgccaaggttccattagtcaagattcacacgcttccccaaccacgtacgtcgatccaagaagacaacagttcgtttgccaccattcgagttcttcagtggttatgggaacctggatttgggctccatcttcccatgtgtttcctaacagcttgttccatgcagagtttgttgttcgggttgagcttactctccttagatttaacgacgaactccgtggacaactcttgctgagcatggggatgcttacaccaaaatttgtgactcagtagcatacctctattttgtgccgtcatcgtggaggcaaccgaaggggattgctggtttgtcaagcgttgtgcacgccaaaggaggcccaaggtcgcaatcgtcgcggcattgccgcacctccctgtcgatttgcaccttctccgttgtgtggtttcattaggaagtttgtggccttagtgcagtccccattctttagaaacggatggttttatgctttcagtttatctgtttggcaatgtagatttattcccgtgaactctatcgttttatattaatggttgtttaagtttaagaaaaatgtggacgaatcttaaatatctatttatcaattctcaatccaacgatagtttttagggtttcactagtttctaccatatatttttcctatctaccatccgtttcagttcagttgtctcaggtttatctttcttctcctctttaagaggccattttctattaacgaaattgctagaaaacacagcacagtttttctccccgaaaactattaaatttgtgagcattagataactttaagagtcgtgcaaatgaaaagaataaaataaaataacctatacacaatagaaaattgaaccaggacgtttctacctatgtcgctatgcccgtgctaacacaacggtgataatcgataatgcaaaaaccaaaaggtaatatttaagattcacgaataaaataacgatagagagatgtgtattgttctcatgaatattattatactgttaataaattcccaaagttggccatgaatagagttctacaatattttaacatttcaaaacacaaacaataactcatggtgtctaactttctataccacatatagatacaaatatcacctgcaagttctacaggtgttattttttcaatacatgtatcgcctagaaacattctgcaacttctgctcctcactggtcaccttcctccttatagagcacctcaagaagccatatgaacttctctatcgaacgcatattagtagaagcaccatattgaagacaatgtgttcgcctaccacgagacacacgctcataaagacatattcatcacttggcattagtaatttaactcccaaaatatttggcaaaatcccggtttctattaaggcaagaatatgtagcaaagcaaatatataggcttttacatggctccaattttgttcatgttaatgagttgaaaaaggtaaaatgaacatgaatactttgttaaatctgcagataaacttttcggatcatggaaatgcatttgtcaaatttcatatgttcagatcaaatttcattataccctacgaatacacaggacgcgtaaatcatcaatattgcacgctaccaacagctaggcaccacagaaagcagtccgaaaaaaccatagaatgcatgcgacatttcaggaaaattaagaacgatacgatgtggttcaggagaagggggatcggcgacaaggcagcggcttggacaggggaccagcggtgtggaaagatgtgttccaaacctgctgatgttcaaaattaagcacatactccctccgtcccaaaaaaagacaaaccctgggtttgtctgggtttgtctttttttgagacggagggagtaagtcagttcaccgaatccaacatgaaactggtcaatgactgatatagatttgttttttgaattaaaccagattgccactatggtgctttatctcaagtattcagctttttacaagcttaaatgccgaccctaaaatatagagatcattaataaaaaatgtggccccttcctaccctatgctcaggctatcagttaggtccatctcacagaacctcaatccctattgaccccatattagaaaaccctgaatctcaagtacaaccgttacatatatgacacattaagatgtagaagacactaatttttatatcagtttttaataaactgatttgacaaagctagccgggtccatttaccattttatcataccagataaactaacacacacacacacacacacgcatattctcttccatgaagttccaatatgcatgtttgttttgttccatttttctaccaaaattcattttgtagtgcattccctaagacccaacgatccccagtcatgcatgatacaaggttgcattaaaaaccctaaactcaatattttttttccaaaaccacaatatgaaaccatacatacatccaccatgcatgaccctgttgaataaaaacgaacactgcaaatatataattgcactaatggaaatgttcattggactttttgacgtcgaaggaacggtttgagtgtgacatacaggggcagcggtggatcttgaggcaatgggggcagtagcacattgatggaggacacagctacgtgtcggtgccaccgatcgaggcagggcgacggtggtccagcggcagagaatggtgtctccatggggcggcgatggagcttgtctccataaaattagatgttgccccgtcccataaaaatttcagcctgccatataaaagagagtcaagtataaactccatgtcatgtggcttgccatctaaaagggatttcagaaatcaaggatttggattgatggcataatcctatgcacaaagttagaaagatcactcttgaaaatttaaccacctttcttgaaacaaagattacacaggattggttcatatttcaaccattttaaaaagcgggattgaattagtacaccaatttcattaccccttctgacaacatatgagtgtaacaggggccatatatattgagataagttaagaaaatggatctaaaaaattttgcatgacaaaaaaaaatctaaaggcattttaaacaaactgagagatcagctcagagtcatctttgttcagatgcaaggaaggaataaaaagaaaattaaacaaaccaagagatcaagggccaaatagagccagcaccatctcttagtacaggaaatatatgatcaaaccccaaagtaaaaatgcaccatttaatttctaatttggatgaatggcaatcgagcccattgcattaagagaataggcaagcatgcataggtggtacggtggcaaacagcaaaaacggatcaataataatataattctcactcatattcttgtaaactatttaattctgatatataagataaaatgctgaaggaacataaagagaataaaatccagtatcaatagaaacttatgaaagtgcagtgtgacagtagaattcttctgtttgacctttttcaatgatgaatagtttcagcaaatttggttctattttaaatgaacaacaatagttaggaaacctattcatctagatcatagcattttataaacctatgcatctgaagatcaatttgtacaaagcatcttactctcttccatttaaaataaactactatcttccatgaaggcaaggtataagttacaacgctatgatggcaatacattttaacacaagcaaatttatctatggtgccatcatttttttagggtggcaacaaggtaccaagtacccagctggttagggcattctcaacccaatgactaggatggtgtccatagcattaaataagttgccacctaggacaaaaaatgatgtggcaagtgaataaatgaggaaagagaaggaaaccatgtcttgtatgagacatggtttctacacaacattcaagacatcatgtgagataagtagcattaaattgaagtatggaatagtggtatttgcattggaagagtagtgtctagtactagtttctgcatgatgtggagtttatggaaacaatgtctagtgttatgggttgggactgctcttatataattgtgctactccatgcaagaagacagagagattaatcaaagccactaaatattcagcataatactactaactaccaagatattccatcttataatattcagcatggtccaaatttagtagttagctacattgtcatcatatgctcttagggtatataattttacgtctatctgctcatgttcaaaattatttcctgaaaagtatataactaactgttgttacctttggttcatgtacgaaaacctaaaattgatgtatacatccaccatgatctgaatccatacttgcatccaccatacatgaccctacaaatgaacacaaattgaccatgcatgaccttgtgggatgaaaatataccctgcaaatttcccagtgaaagaaatgcgtctgtctaggaaaggttcacgaaaaaaacataataaatattgctactggcatttgaattttaaatccatgaacacaataaaggaaatttttttgacccaatgaggcattcaacaggcacccaaatgaaccggtacgtcctatcgctaaacataaaccaaatgaaccttatcctgtcctatccaacagccacccaaagttctgtataatcccaacagcattcacatagtctcctctatcatcaatataagtttgaagaaaacaggaaacatgtgtagactaatggcattttcatttggctgggcaatgaaaatcctaaatgatagagcagaactggacagtgaagcacgacttggtcatcaaacatcagtttcttatggtcgcaaggtctcaactaaactgcaagctcaacaaacataagaatcaatatcctctcagtttattttttgacatgtacaaacatatgaagataatcactttctttgccacacattcgcataataatttattttctcacaggtttatgcacgtacacacataatagccatgacactgtaataacgaaggaacaggatcgagcgatgattaccttgttcgcatcgcggtggagagggctaaggtggaggcgcaaaggagagcagatggcacgagggagtcggcggcggcgtcgcggtatagaagggggcgcgtgggcgagcagtcccggtggcggcgcgaggggccggggatcaacagcgcgtgacaacgatctgcattgtgtgggggctttggcggtgtcaatctggaggcgggaatcgacgacgatcgtcgtgaggggcgctggtggtgtcatctggaggcgggaatcgacgtgctggttggggcgtcggcgacatcgatatggaggcgggattcggtgacgattggcgtgagggtcaaggtggagagacgggaatcgccggtggcgtcgatgtgaaggcgtgatggggcatcaatggcatcgatctgaaggcgggagtcgacggcggctcgatggcgggacgtgggcggcgtcggcgcgattgcggcgcgtcggaatcgacggcggcatcggcggcggcgctgcggttggcgtggggagagagagagagagaggaggttgtgcgagagtggagggggagagggaaatgcgtgcgggagattagtgtgaggttgcggggagatacgtgggaggagctgagccattggattcgatgattctcggtcgttggatttgatgaatgagtacgtaggtgtaagagtgagttggtgaattatagggtagactagtaattggcccgtgctaacgctacggtagcatttagaaatgcaaaataaataattaaaagaatatatattttttgccaatcaagcattaaatgagacaagttaaaatttaaaaactgaatgacaaagcaagttattatattgttaatctttagccatgtgagtaaaatatcatgacctctatctttcgtaaaaatctaattggtaatgtacaacttcacaattaacacatagacataaaaaaagtccaaaccggatataatcatctaatgtttgatctatatatcgtttataatagtatgcattatctaatgtcggagtatttgatgtggtaaggtagtttatctcgtttacatgtccaaaccatccatcaccatctgctaaattcaagtttataatctatatctcatatgacttctttgatctggcatgaaaagaaaatgagaaaatgtttggaaatctaaattttactgagaaatagaactgaatttggcaattgggagaacacatagtaattcatgatgagtctgcttcatgaaatcaagctgaatactaaaagcactttattcaatcacccagatccaatcatttacttttcaatcaaccgccaaaaaggtcacatacaagtatacaattgcttcatatggcatgactacattattcatgaacgtcacgatacaaggaaaacgtctatcaccttgcggagcggatggccggtggggacaagggaggaagctgtcgatggtcttgacagcccacaccaaaaaggcaccgatggtgctgcataaatcaaaacattacatgttatctccacaatttacaataagtaataacatagctttcttagatacatatgctaaacttggaaacaacatagctgcataacatttttaaacttgtttgtacatgaaaaatgtcaatgcttgttctgtgcaattttcatattataccagtgcattttgaaatgcaagccatcacccaaaagactccatttcagtggcaaactgtcaatgactatacctcaatctatcacgtattaatctggtacttacatgacacacctaagaagacaaaattgaaggtgcgaagagatcagatcgtatacctcaaaatcaaaattttagtcctcaatttgccacgagcaggttatttactgaatttgcccacagccccacatagttcacactggatgcctgtttgaattagcatgctcagtcctagtccacttgtgctccttcatattcagttttatgtaaatttgtacacaccagtcagactcactttgaagcagccaaataaattaacatttcagctaatactgagaagtaaaatgaaaataaaaataacttcctatatgtggaatatggacaaaccctctattatctataactatacagattaaccatagagatgataagaatatgttctcctgatctataaaaaagatatcgtgattaactcataatcatataagatgactctggtgagtgatgtcatacatagaaaaacaaactcactctagggtgtcattcccctactttagaaaaaaatcattgtctccaaaaaaattgtgttagttaaatttatggtttttaacaaatcagcattgaacagtacaattaacagcaattggcatcggttgggcaaatagcaaaacggaaaaaacagcactgacaagttcaaattttatctccagctcttactcacaaaacatcaacggcctgcaacaagcagtcacataagctgaattagttcttgtttccctttctattttaaagttctttgttcaagggatttagtcacaacctcgaaaaatgctattttcatgctccatttgtttttattatatgatatgttggttggttcaaattgaactaacaataattccattactgttaattacaaagaagggagtatataagatataacagaaatgtcataacaaataattaattatcacagactcaatagtgaatctgcatatgtgataacactttgaggccaccaatagtgaatctgcatatgtgataacaatttgaggccaccaaagaatgtagaaccagatgcagactacaaactcgatttcaagtatcattgactgttagaaaccaccaatagtgaaatagaaccggatgcagactttattaattgaaattcagatgatatgaaacaaaaatattccagatgatgatatgagccatgcagacttatttatcctaagcagcaactaaggatacacaggcacagccaccagaaacaatttctattttgaaagctagatccacatatcttccttgaaatacccaatagaagagttggcttcattaggtgctaaaaattataaggtggcttgaaaagaaacacaatcaacagagatagattgaatttgttctctttgaagcaactgcaggcataaacaataatactctacaaagtttcattgggtctaaactactctttgcacgtcatatatatgcccaaaattttttagcaccatacaaggagttcataactcatgcctaaatctgacaaatttgtcaaacaacacaaagtcaaattataatgcagttgtctagaataatgggattaggtgatagcaagttgtctggaagcatatgggcccctatgctgcgtgcagaaagcatccgacccaacggtgcgatgcagaatgcggctgctcccatagtcattagtgtaacataatgatcaaaattagaattaatagcacaagcagcaactgtgaacattctgcccttacctaactgctcgcaaaaaggccatcttgcataaatgcagggagcttcctcagttgatccgacatcaaggcaagcaatggactcagcaccagcatatgtctagataaaatcattgcaggcacctgaaacagaacattaacttttcagcactaaattatataacctcaacatctcgatttttgcagcacatctgatagcagaaatttttgttgatgtcaatataatgaacatgctttgttgttcaaagggcataaaaaattttcagcgccaaatcctataagtgtttctgttgtcagcacgccgcttgacaggacaggacgccgccgccacgggagacgaccgccaggacaccgccgacgtgggggcatcagcacacaccgtcgcctgccgcctggggagggatgccgccggagatggggtccggctgatatgggcagcagcagcaagccgtgggagaaggggagagagacgaagaagacgaagaaaatcgtgggcgaaggagaatatcgctgcctccgcgtgcgacgggaagacgacggaggacgggctcgcccttaacgggcagtctcccgtcgatgtgggcggcacgacgagcggagggtggcgtagtggatggcagtgtggtggagagccgtagggtggcggcgaggacgacggcgcggtggagaggcagggagcgacggcgctcgcagaggagaccggtgcggtggagaggcgaggggcggcggcgcggtgtggggagattagggttgcgatttcgtgacgacgacaatttgtgagcgccggcagcaaatcgtgggcggcggcgcagaggagatcggcgaggcggcgctgatctggatgctggtgcaagcgcggcggtccgcggttctttcccgtcgatccgacggcggcgcaggtggagctgctgcggggtttgggattggggggcggcgcgacgcggggagagcgagggtgcggcgatgatggtgcgcggtgggagctgagggaggtatggttcgtcggatctgaagcggtggatgatttttgtccgttggatttgatgaatgaagcacgaaggatgtaaacatcagttggtgaattatagggtagatagattgtggtcttgtggagttgcactgtgaaacttgtgggtggctaatagtgttcttagtctaggtggcatggaaggaacactaaaggaaaaagtacaccgaaggtccctcaacttatcatcgagatacaaaatcgtccttgaaccacaaaaccggatacaatgtattcccaacttacaaaaccagtgcaaactagatcccttggcggttttgacccgattttgatcgacttagcagctgactcagcgtgggacccacgtagaccccacatgtcagtatgtccacgtcatcacccatctcttttccttcttctcttcgttccttctctctcttctctccctgcgacaatgacgggcgcagccttgcggcggcggcatgaccctgtggtgggccggcgagggataggcggcggcggcggtgctgctctgcgatggccggcgggcttgcacgccatcgacgctgtctctccctggtccccttttttttcttttattctttgctcggtttctctcccccgatgccgccgctttccatggcagcttgcgtggaggttcgtgcaggcgcggcctggcttatggcgcggcggctggatgtggccggatgcgaccggaggccaggacgacaccgcccgcagccatcaagcccctacccgccgcacatctctcccaccggtcgagctcgccgccgccgtctgcgccctgcatgtcgagctgctcatcgtcactgtctcaatgccgcgcgaacgacgactaccaggggctccgcggccgcgcgcacgatgatgatgtgggtctcctgctctaggaccgccgcggccgtgtggcgggtggtcctgacgagtaagaacatccgcgccggcgagcggccgctgttcccattccagtcgcccaagtacctgaccagcctgaccaggcggtggtggcacggcgcagcggtcggcgttccacactatctgccgcgtgcttcactacttgaagcgcttcctggtaatgaacccggagcagccggactcggctagaccggcggtggactacctcgacatggatgcgcagctgctggggaggttcccagagtgggaggggaacggtgtcgccgacgtgccattcgagatgtacgcgtacagggtgatggagagggacaagagcaacgcgtgtagggacaggagctctgactccggcagcgacgacaactcattgtgtggagatgacagcgtcagcggcgggtccagcacgacgacgacggtgacgaacgcgtcggcgtcggcgtcgagccggccaatacttgaccggagaggtagcacgaggtcgtcagcgccgcggcgcaaggtggccatcgccgccaccaaggcaggcaagtgtcgcagcggtattgttactcgtctaaagccttccaagattacagctagcgctccatgtccatgacgtgtgcatggccaccgcagaagtcgagatcgataggcactgtgaggccgccgtcgccacgcactcgaccgcctttgctccgcttcgccggccgccccgcactcgacgtcttgctccgttccgctggccgcagccgccgccttgcttccctgcccagagagccctagagagaagagtaagagagagatgaggaagggagagagaggaggatgacgtggatacgctgacatgtggggtccacgtgggtcccatgctgactcagtcgccatgtaggctaaaaccggggtcaaaaccgccgagggatattttatgaccggttttgattagttaagggatgcgggatatatggttttacggtttgaggacgattctgtatctcgatgacaagttgagagaccttgggtgtactttttccaacactaaattatggtgtcacactgggctgtcgtgtgggctagatttgggaaagcatatcgtatccaccaagaagaggaaacaaacggcggcgacggcgagatccgagctggagtaacagaaaggaaaaagaaaaaaaaatccacggccgtcacggcgcgtatcccgaagcggcgtatcccctcacctcacccgtcgcctcgtcgtcctcctcctacctcacctgccttccttgccactacccactactatccccacccgtgtcccgcgcgccacgccacgccacgcgcccacgcctcgcctcgcctcctccccccaccccccgaccaaccaccaccgcctgagccgccgccgccgccgcccgaggcgcgacggaattcccccccgttcaattggacgcgtcgcggtcgcgatccgccgatcgatcccgcagccactgctgccatgggcgagcccgtggtccccccgcgcgcccccgcggcccacgccgcggtcgcggcgccgaagccgccgggagatcggtgccggcggagggcgaggctagggcgccgccgcggccgccgcctgcagtgncggcgggtgcgggggcgggggcgagcgggggagggaggcgggtgttctccgtggagctacggcccggggagaccaccattgtgtcgtggaggaagatgctcaaggaggctgacctcggagctgccttgccgcccccgccgccggcggcggcggcacagccggcggtcgcccccctccctggaccatctggtgcggtagggtttcgtgctctcgttacatgtttttttgccgatttctgtcttccgtgcctattctgcgtgcaatttttcacctgatcaagcctgaaaaccgcgggggattttgtgtgggagttgggaggtctgattatgattcttcaattagctaaatacgattttcaattatctatcatggtgaggccaaatgcagagccgagcataagttcgcaacagagaaaccgagaagtgacagcaaaagttattgagatttaacttaaaggaaagcatccattagctgttgccgccgcgagcacctttgcaaattggagggtgaaaagaatatgctcctctgcttcttttctatagcatcaaaatatatcatttctcaatgccagattgcccctcaccatgtctgcggtcaccagctttaccttgatgttgggatttcccactaggtaactaggctgccccgatttagcatctgcgtgtcttctaacatctgcatttggtagtgtggtacatggatcagtttaatagtggaaattgcaacgtcaatcgctcattttttcagccttgatggataacagttactgtattatttattgatcaatggtgattatcatgtcattggggaagaaggtcaagttatgaagacttgtttctcaaaaacgataagatctcaagacttgctacttatgtgaccatatgtaagaactacaaatgccatgcaaactttgttaagcttttattctgttggtagaatcaatatagcaggtccgttttgatgacaaaccagaattatggaaggggtttacgcatacactagaagtatgtgcattgtcttgcaatgatgcaacaatgatatattaattcctcgaaattgtctggtaagatgattaatgtaaactggaatactatacaagcaagatgtgtcatttgtaggcaataattcctatattttgttggaacttgtatcagacattctgataggtggtggttgtgcttactcatttgcaggtggtcattacccttacccatttgttgaattaaatcagcctaacttgtggttgtcttcacatatgattgcacagatcaactagttttttttattgaaattgaaataatgtactgtatttgaaataatggccattccatcttttgaatcagacacatcctacagaaaatgactgcgcacaatcaaatcggttcaattcagttattgagaaaattgagcgcctttacatggtaagaaacatatggtgttactatcagagaggaaattcatttttactttccattatgcacacgaaaagtgcttacctctgtctacatccttttactatgccagggcaaaaatagtagtgatgaggaagacttggatgatgcgcctgatgatgatcagtatgacacagaagattcgtttattgatgatgatgaattggttagcttttcaatttaattgatataataatgctctaatgtattgttaataaaatgttctttttcattggctcatctgacctaaacagtgttaatactgacattgtagtgctttgagttaagcttgttactatttgttttgccatgcattctgcatatgtgctactatcctgttatatgtatcataaataacagccttgacttcttggctaccattccatatgccaaatttgaagaacagctgagaatggcatgctcttataatctttcttttttcattgagctatttttctagtgttaggaagaatgagggtttattatcttgaattcaatatggtacttcactcaagttgcaacaagaaaaactgctactttgtgcaaaaccagaatgatctatatggctggaagaacttaactaccgacactaatttatatgcaaaccaaatgtgagcttacatgcttcttgctgcatatatctagccttgtttagaacatctcaatgattctttttctgtatcattaccatttgacatgctgagaatgatagccagtgttctgatcactctgttgttttttatccacaggatgaatattttgaagttgacaattttgcaaccaagcacaatggttattttgtgaacaaaggaaaattggaacaaatgtaattttcctaaaaactctttaatttgcagctatggtgttgggcaagttatgcataaaataatcccaccaaatgattctagaaggcattgtgcggtgtcatgactagctattcagaatgatatcatgtgggatgttataacataataacagtaatctttgcatcagtgccaacatgcattacatatctgctgttataggatgacataaatcttgacatgcttccacccacttttgcagtgactttgattcagtacagactgttgaaccaaagaaacgaagacgaaaagactcatcaagttcttatattgagaataacaaggaattttctccaggctcttcctcatacatgggcacgcctttaagagactctaaaagaagcactctccaaacggggaagagtactagtaatggtcacaaatctggagctaatggaacatttgagtacccttattcagcataccgagacaaggatgctccaggacatcttggcctccaacagaaaataacttctaatggggcgaaccaagatttgtcaaagaacatgcaccacaaagagaaatataatgctggtcaattttctggtttgcatgcttccagtaacatctattcaacagaaacaatggtaagaatcaaggaaactggtattgtgacttgtgagcatggtgcaaaccatagttatcttttcatccccaaagtacatagcactaatttattcagcacaaaagcattacaacataagacatggaagtaaacagag

SEQ ID NO: 27131 - DNA, 9094 bp, Oryza sativa
acttccatgcatttcattttttttaaaaggatagtatcttttgttgcttttccaattctgggtcgtctattatctctgtctggaaatgatctttatttcttgaacattgaaaaaaaaatcataggatgttgtgatctaatcatccattgataaaggtagcctgtagattcattgagatatttaaacgagtgctagttaggtaacaagagatagacactctttttgtccagttctttatgcatcgttttcgtaggccttgggcaccagtacaaatattccactctttttatgtggtttcttgaactattcttatattctacaactaagtggattctagattcctgttggcatgctgaaatcttttttttttttttttttggaggggggggggtgttgcatctaaggatttgttcttgcctttgtttgtgttgacaggcatgggctttgttactctttagtaagcgtggtagaataaatatatgttgcatagtgatcctgtcaaatgaacatatattcaaaagacataccaagaggcaccggcaaaaagaatctccttgtgttgtatggtgacttggtgagttttaaagattttacttaccaaatgttttttggcacagagaaacatgaaagaaatggtgcaatcaggtttatgtgctaaacaagagaaggctgggaaattgcaacaagtgaaaatggaaatctatgaaatggtcaaagcacgtctagccaccaaacctaaggtgaaataattaccttgtcagtaaagtggtgtaatctgctttattttcagacacattgcgttttgttccagtcttcattcttatgaaaagctttggtagtaggaactcttatatctgtatgctttcagggtgctgaacataaggttgaatctatagatggctttcaggatcctgttactcatgatgacagaatggccttgagaggaaaatctgtcatggatgctgtattggaggacaggatctgcgacctgtatgatctgtatgttgaggtatagtcgtattatcatgtttacttcaatgataattgcaatgcatagccaattgcccaattgctgtgctgaaagaacgacatcagcaatagagacattttctctattttattttaccttttgtctatttttaagtgtatgttggtgaaaggatatttttttatttcccccttcaataaggaggccgctagagttggtttagaacaggagtgtcttggataaagtcttatcgttttgcttttttacttattttatatgtagtatcgcttggaagttcaaaaccatgtatttttacaaattgtgattatgcttactagcatgagtaatgcatgcttttcagggtatggatgaagataagggccctcagagtcgtaagttgtatctagaggtaccatcctgcctcttttaccacacctttttatttctgtgattgctaaaaaactcctctacatttatatgtgcctttagtctgattgagtgtttcaacttgaatcaatggattagaaaattccagccttccctttctgattcactacgcagtcacactccttagacagactgttgatcatgaactttattttccttaactcacttttatatttgtaaatttgtaatgccgacttgcttatgtatgttgggataaggggctaatttttgaccagcaaacgaattgcactggtatattgtgtcaaggatagcactttgttacttagtttaaagtgcctgtaagcaaagcaacataatttgagtttgtatgatcccttagcttgtttatatatccaactatccaagtttgctaaacagccttaagttccttaaatatttatttagctattcataattatcaaagtaaatgtataccctgttaatttctataatggatttgttttctttcagaaactttaaattttatcacccgagcatatgaatttggtattttggttgtgatcgttctctttgtgtaccgtactgtgctttcagtaaaagctgggtgaaagcctttcctctaaaattttttttgggtattttggtgatgttctgtttcaaagtgcattttttgtacaacttctccagttttcctagcgaatgtgattatacttgtccataacgctcatacaaattacaatatctttgtttctgcaccagcttgctaacttatggccacatggcgacatggataaagttggaattcgagatgccatttctagatctaaggagcgaaggaatttattatataggcagaggaaggtgaaagatcttctcttaaggcgtgaatgccattttagcttaaccatgtctttatttttaaccgtcataatcatatggagtgaaggaaaacaagtgtacaattcagtaatgtaaatttccaaattatcctattttatagtacctcattcaaaccaatcatgccattcaggtccgcaatgaccagaggatgaagaggagaaggctggctgctgctgccaagttgcgtgacagcgaccctgccgccccacaatctgcacagtccctgcaaaatatgacaagcacccataccatgtatcctgtggttaacaatggaaatagtcagagtagcagaagtgtcgacaaagttaatgaaatgagcgtcggtgcaggatcggatggcaacaggagttctaccagcatgaagaaacgaaaaatagactctgaagataggcaagttaacccaccgaaggctactgctgaacttcatcatcatggtattgaaatacagaagccggcaaagcgtgcagatgaggcaacaaaggtcagtaaccttccccagacgctgcttgccattccaagcagcgacagtcgccccagcagcagctaacgtcctgatcgtgctggcatagctttggagaacaaaataaatcatcggcaaaggtcgttgataaccaatatagtagaacacactagctaggtgattgctactgggatgctctcggagcctatttgttggcttctgagcaaccactaattcttgaagatcttgtttgatactaaaaataaggtgtatttataagaaccctctgtaacacaatgtctagccggtttcgtttttactgttgctgttatattctgcacttcactctgatagcctgcaacgtagataatttcatctttagattgccatttttcttcccctcttagactataaattgagaaaaacctagctctgtacaatctagatcgtcaatatatctcggaagcactttttaggtatggatatattcacagaataaagtgttgtgtgaatcattctgctgtcaaatctggtctcttgatttttctagaggcaagttatgcaatttatgtactacttccgttttttaatagacaccgttgactttttatcacatatttagacaatttatgtaattatattttctttttttagttgttttaaataagacgaatgatcaaacatgtgtttagaaaatcaacggcgtcgtctattaaaaaacgaagcgagtagtaacttttttgttagtgatatagcaatttttttccgttttataccccgtcctttctataaaaaacaactaagtacgaagtaccaattcgtagttggaatgtcctccatccgtctcatttttttatccaattttggtcgtttgtgttatttgaaattcttttatgattaatatttttattgttattagatgataaaacataaataatactttatgcgtggcttatgtttttattttttaaaaaaaaattaaataaaacggacgattaaagttggaaacagaaactcatggctgcgcttaaaatgagatagattgagtacgtaattcgcacggggcctttttcttggaataagttcatctgcggtcccttaactttacgtcgagttttgttgacgtcccttatctccaatattagaaatctccaccctaaactatacaaaaccgtacaatttcgatcccatggcagtatggatccttgatttcgctgatgtggcatcatagtcagaaaaaaagaaagtgcgtggggcccacatgtcgaagccctctcctcttttcttcccaagccggcgttggcacagcctctggcgctccctcggtgtagagcgccgcggccactggcgacttgcaatggagcatcagctttcggggaaattggggaggaggacagccatcgccgaagcgttcgtggccatacttcttctggggccattcccaacccaaccacaacgcggcaaagaggcagcctgtgggggaggcgaaggcatgagagggagggagaggaggccagcaagttcgggagggagggggaggcaattgttgagcccgtccgagctcacccagcctgcgtgcgccggaggtagacggcgaccaagaaaccatctcctcctttgccaattccccttctctcgctggtgatgccattcctagcatcgtcgaccacctgcggggcacagcggtggtggcggccgagaacgggggagctccctgtccatccactgtcttccactttgcctagctcgcgtcccgcctcgagccttcatagaggctgagacggacctcgacttcaggaggctcgttgatgaaggggaggaccacgatgaggacgtgctccagaagctcgtcccggacatccgctgtgatagctccccacgcccgtcatggcggtgcaagtgacagagttcttcggtcatcggtggaagctccggtggtggggacgttgcggttggggtggccgtgcaccacgccgcacctacagcagacagccgcggcttgtggcgattcttggagatgtggtctgccgccatgctcgcccccgctactaggcccgccgctgcgctcgcttgccgctgctccaccagctgttcgctctgcccgcagcccaccgccgctccgcccgccacccactgaccgctggcgtgctcgcctgccactggcctcccagtcccgccgactgcccgccggcttccctctttgaactctgaagaagagaagagatgaaagagaagaaaagagaagaaaaagagatgcgtggatcccactcttttcttatcacttatatgggtctcatatatattttttattttttattttgctgacttggatgccacgtcagcgaaaccagagatctatactgctatggacctaaattacacgattttgtataatttaggggtgaagatttatggacctagttagagattagggacctcaaagagactcgacgtagagtcgagggacagcttgtgaacttatttttttttttgctgcgcttggtgttctctcctctcgctaccatgttggcccacacatcacaagtcaacctcccttcctcggcccacttggcgagttgctccttcccgtgctccgccggccgtatagtcaaaaccaacgagtccccgacgccggcgagctccccggccgagcataagaggcggccatggcggcgggcaccgcatcgccaccgccggacgcggagcctcccgagtgcccggtgtgcctctcccccttcgacgccgcctccgccgcgccgcgggtcctcccgtgcggccactccctctgcggcccctgcatcgcctccctcccgccggcctccgcctccgcctccgcctccgccgcctcgctccgctgccctctctgctcccagtgcgtccctttctcccgcgctctcgggccctcctccctccccaaaaacctcgccctcatctccctcctcccctcgcccccaaacccctctcgttctcgcaccgccgccgcggcgccgccgcctcctcatgtcccgctccacgcggaccactcgcgtctcctctcccgcttccgccacgccgtcctcccggagtccgcttcgccgctccactcgcccgctcccgccgcgggcctcgccatcgggtccttcgcttccgacctcggcgccccgtggttctgcccgcgtggccaccccgtaagcctcctcccgatcgaaacccccgccgccgccgccaagcaggagtccccgttgtactaccggcccagccacgcggcgcgggtggccgccgcgatcgatgcgctgagcgccgcggcgagggatgaagtgatcgatttggtggccgtctcgtcgcggttggcgcggcgggtttgcagggtttacggcttctggatgggccccgaggcggctccgctgtggctgctctccgagcggcattcccgcggagtctcctgcttgttggaggagaggagccgacgagaggagacggtggctctgatcagaaatgtcggaatggaggtctgtgaagcgttcatgggattgcacggagaggggctggtactggggtgcatagggctaggatgcttctgcctcgatcgctttggacactgcctgctcgacctgaatcaggttttggccttgtgccacggggttcgggtaggggtttgctcatccaagtctaaggccttcatggctcctgaggtggcagaggtggtgcatgacaagttgcagataaaggatcatgatttcagtggcttgttagggcctagttcagatgcttggttgcttggttgtttattggtggcacttgtaactggggatgagcagcttgcagcaggatggagtactgaggggtcatacgatgattggaagaatgaagtgcttacgaaggttgatgcttcattggttggcacacatatggaaccatggtctgcaaccatagtgtcatgtttgaactatgatccagaaggccgtccagaaattgctgatgtctggaaatgtattaacggctcattgatgaattccgacattgaagctttgattcctaatgttgatcttgcagctcgaaagagttttatgtgtttgctccttggggagttgtcctcaatgtgctctaaccttggtgctgttgagtcagatgatacaatgcatctttctcaggatttggatgacaaacattcaactccagatgatgcaagcagtggtggtattataaacaacgaagaagttggtgcagctggaatggatgggccaaaatgtggactgtacaattcttcaactctgcttgctcaccgtgactgtattacgggattagccattggaggtataacatattggagtatttacaactttaattatttaaggcatatatagtgcaaaccagcaactaagttctacattgaaactattgatttggacaccattgctatctggatagttttaaaacgaaatattaatgtcatctacctagtgtttagatcctttgacaatttcatgttcaacattaatgtgtgttatgagatacatatgaacatgcaaaaaggagaagattttgaataactctgttttcgttttgtttcatttcattctagtttatcatttatcataggtttctcatgtcaaacttgtcaatgaaggtaacataaattataacttggaggtttttatgttaatttgatgttaagtaaatgttttgaaatcttgcaggtaaccgttagtttgcactagatttttgatttcattgttggcgtccttgctagagtatccgattctttcatctgtggtgttattctatggtcatgacacatcttattatgctagtggatatttttaatgttatgcacttaacaagaactgccactcaaggacttcccaataatagatcttcattgactgcaggaggctttttgtttagctcttcttacgacaagacaatcaatgtatggtcactgcaggtatcttctctcctcttctctttcttgtcagttctgttagtatcatttctatctcctctttagttttccgtggctcatttttctgacttctattggtccttgggttctttctacaggacttctctcataaacaaagtttgaagggccatgaacacaaaatcacagcaattgttgttgttgacaatgataatcagtcactttgtataagtggagacagtggtagtggaatatttgtctggtgtgttgatccttcactcagtaatgaaccattgaataagtggtatgaaagtaatgattggatttatcgaggtgttcactgtttggctgtttctggaactggttatctttacactggtagtagagacaaatctattaaggcttggtctctagaggtaaagatgctaatccaatttgctttattaattagcatacagggattataataatgttggtgtttggactaaaatttaacattagagtacagtttgccctggaagttgattccagaatgtttccctcctattatcttgataacaagtctgatttggtcattcatatggttaaggggttcatatccatttatcttaattttagcatgttatgtgaagttaattctctatccccctttttcaggattattcactacgctgcacaatgacaggtcacaaatcaactgtttcttgccttgcggttgcctgtggtattctttacagtggaagttgggatggttctattagatcatggtggctcactgatcacagcccgctgtctgtactggaagatggtacaccaggaagcattactcctgtgctgtcaatttcaacagaactcgattttgttgttgcatcatatgaaaatggctgtttgaaggtttccctatacctcaatcatgacttataatgtgaaatgtgtatattctggtcacgttgtgttataattttaattgcagtcaatgtggtttgtgcgtaagctaaatcatggcatttttatttttgtcaatcagatctggaaggatgatgtcctagtaaagtcagagaaacttcaaaacggtgctatatatgctgctaaattgaatgacaagtggctctatgctggtggatgggataaagttgtaaatattcaggtctgtttagttgctttgttcatatgaactataaaacataagcatgcattttctaaaacataagtgctctatatctaacatgtattgattaccttgcatttttcttgggttaattatgttaggagttattggaagatgattcagaggtggaaatcagagatgttgctacctttacttgtgattcaattataacttcaatactgtactgggatggaaggctgatagttggactttctaacagggagattaaggtatgtatacctctttttgtttgttgtctactttattagt

SEQ ID NO: 27132 - DNA, 26805 bp, Oryza sativa
atctagggagttaactttagtctctatatttaaataataattgagagtattaaatatagactacttacaaaactaattacataaatgaaagctaatttgcgagacaaaatttttaagcctaattaattcataattagagaatgtttactttagcatcacatacgctaatcatggattaattatgctcaatagatttgtcttgcgaattagtccaagattatagatgggttttattaatagtctacgtttaatatttataattagtgtccaaatatccaatgtgatagtgacttaaaagaagttttagtcccatctaaatagggtcttaagtaatacatatacacacgtaaaaccggcctgttcatcggagggcaatgccaaaacatagctgaaatgctgatcatagctcgctaacatgggacaagacaaacgggaaaaagaagaagccaaaaaggtcgcctctgctgctagttctactcatgttacttctaattgtgtgtactctatgtgtgctagggcccttgatttgaaataatcttaaaccatggccagagaatgtgcgcacgatcgatcacatgctaaagcagaaagcactgccttatctcaagattaaagctgcccaaataaacaacaaattaatcaaataaatgaaattcctagtagtactacaaaggtcaaaaaagggcacgatcgattagactgaattattgtggccgtgaaagcgaccaggggatcggagccaatgcatgcatccatccatgcacgcgtaggtaggtagcgatcggcgaaacgacgggaataatccggatcagagtgggattttcagcaattacctacttgttcctcaattcccttatctcatcggtacaggatgccatgatggccggactactgcttattgatttgcctctctgattaattgcttgtgtttactggaacagtgagtgcttttccactgtgggatgcgatgagattaggaggcatcactcgctgtctctgcagactgcagtggaacaattttgacagtagaaaaggtagtacagaacattgcaaccgtgcaagtcctggcagttaatttgcttaatctcgctactgttgctgcgcagtttggctgacgctgatcggtagatgctgcactgctgaaatggagagcgactccaattcatgaggaatttttgacgggtcaaagcactcaggctcttttgttcagaaagagtagtttttttcccagtcgatgcttatgctctctgcttcgcagcttcggtttctcatttggtacttgtttcgtagggttgatatcccagcccagcccatatccagagatgtcctggaaatttctaatcaattcccagcccatcctaggtctagacgcctagttaggaatgggctaattacggggctgtttagattgatgttattttaaaccataccattttttggtaaaattgatgaaaaaatgtctatgcttagtttgttaccaaatttagtaaatacataagaaatcatgctaaaattttgacaatattgtcatcttgcaataccaaaatttcaaaatttggtaagatttattttggctacaatctgtacgtgccctacagttccaatcacaattattatggcctaggatttggcccataaaaatatttttacatgcatgctcttaattttggaaaattctattttgcattccacgactctagtccaaggttaagacggcttattaagaaataaaattaatttattggtaaaatttttatatatgtacttttagtgacttaaaagccattgttgaaaatgaaactattgaaaatatctaaaaacattttaaaattaaatttgaaaattctaattttagctttggcttcggcttatttgaccaacggatgggcccctaatgatcttccctcaactataaaacatgatgtggaactccctcatctaccaatacggttcaatttacctctttcgcactggattcgtcctatgtggtgtgttgactgggtcaatccgagttaatttgatatttatgtctctcacgtggcattacgagcaaaaattaaaaacaaaatattcactgagtcatgtacacctacctctcaattcctctctccctactttccctctgacatcagctcttgggacgaagtggcgtcacgttgccaggtgaaggaacgaagaaagtcgggcttgagcccacggtgctttgggagatagatcgatgaggaatttttttcatttatatatttttttattaaaatatttacaaaaataattttttgttttgaaaatttacaaatctaatcccctgccgtcctttgggatcgcccttccaaagggcgacaagggacctaaatgcaaattttccagcacaacttttagctctatgattttacaatttaaaattatattatataaagtcagatgaaataaaactttatatcaaaattgtagagctcaaggagatctacaactttgtagttaacaactttttcatttaagatgttttagatatccaaatattcgttacaaaatataaaacatatttcaaaaaatctcagatctacatttcaaacgatattggatggagataaactttatataaaagttgtagatcttaatgagatttataactttgtagtttatcacttttccatttaaaatcatagagtatcgaataagcattattagtttttaagcaattaaaaccagtgaaaagggtttgaacacaaataaaaattttgcatttaggtcccttgccgctctttggaagggcgatttttaaaaatcgcccacccaaagagcggcaggcaattagatttgtaaatttttgaaacaaaaaattatttttgtaaatattttaataaaaattgtataaataaaaaaaaattcgatcgatgaggcgcctgaggacggcctactagaggtccccatgagcagtgctgaccttgccctcaatcttgcaatcgatggcctcgagctgcacctgcaacatgcggaaggtgtgggcaagagagatttcaatgtcggtgaacaaagggttgtagcctgcatgcgggcatggtcgactggcaccggtagggcagggtgcatccaatgccaagcaaggttggtcctcctatcgatgggaagagatgaaagagggttgacgacaaagagatcatttacatatgggtctcactataatttttattttcattcttgactgtaatggcacgtaagtgccacatccgattttttttaaagaaaaaatttcccgctgatggaaattgtcgtgtgagcatcatgtaggatgaaaccacagtcaaaattactcatgatggcaaactgcaccaacattgattattgagggaagcgttgtattgaggaaggaaattagactcgggctatagtagagggacacagtataaactttatatgtttattatcccctgaatttaacagaaccacattttggcccattatttgtttattcccagattgaataagtttgaaattcgtccctaaaccgaaataccatatatataacaggttgaatccaacacgaacagcgggccgtgcatgatgtcagagtagctggagaaggagagggagatgtttcggctagcggtgggcggtggagagaacggtgctgacatgatagagtaagaagggttggttgctgacatgtgggtcccactcactacatcacccaaaactagccactatatcatcaagggaccaaagttgacatggtgttatgagttgagaggtaggttatacccggtatttcggtttaggtttcagacacagcaataaattgagggacctaaactgaacttattccttcccagattaatacaacccatcaacgcatattacgatccttttctggctatgcacgcagaatgcatacatgagttattatatttgggcgtccatttatttggtacggaggaagactgataaattagcacagcccatttcagagatgaccaggaaacaggaataagttcgtccgaggttcctttaacttgtcaactgatccgattttcatctcaaccggaaaaccacatacaacaggtctctcaactgtcaaccagttcaatataggtcccaaggcagtttgaacggtggtttcagctgacataacgcctacgtggctaaggctgtgtttagttcccttcaaacttccaaaaattccgtcacatgaagtgtttgaacatatgcattgagcattaaatgtagataaaaaaaataattgtaaaatttgcatgtaaattgcgagacaaatcttttgagcctaattacaccatgatttgacaatgtaatgctacagtaaatatttactaatgacagattaattaggcttaataaatttgtctcgcagtttacaggcggaatctgtaatttgttttgttattagtttgtgtttaatactttaaatgtgtgtccgtataataaaaaaatttggcgcacgaacaaaacacggcctaattttactcggtgctcattatatgaacttattcggttattccccaggaatatcaactaaatttccagcccatttcgggtctcgttactcgttaggcatgggctaaatccaggtttatttccattggtaggccgtgatttggctcatgccaattaggaataagttcatctgagatcccttaacttgtcaacgaatccgattttcgttcctcaaccgaaaaaccagacacaacgggtcttattaaaaccggtgcagattaggtcacttggcggttttgagggcggttttcgttgatgtggcgcctacgtggctaatttgactcggtcttcatctgacgtggtattgacgtggcacttacgtggcaattcgatctaagaaaaacaatataccccgtgggacccacgtgtcagtttaacacgcattaataaaaaatgtgggggccgtgtgggccccacgtgtcactctatcactcttcttctcctctctgggactccgagcaagccggccgacgggtcacgccacgcacgacggcgtcgagcccgggggcggaccagggcgaggggacaagctcaacctcggcgacggccacgcggtcgaccctggccgggaaggaccccgtcacggcatcaccgagtgccgcggcgtcgagctccatcccgcgtgccgacgaacggcggcgcgaaggcgtccctaacgcggtcagtgtcactgaggcccaggttggtgctgatgcagccggcccgcaactcggcgagggagaccgcctgcgcgatgtacgtgtccagggactccctcgccgccggcgggatgtccgggaagtcggcggcgttgttcttggggcggtgctggacgaagtaggtggcctcccagtcctgatgagaccatcaaagttccatctatctctatcgatgcttctacatgtttgcataatagctcatctaggagtattgttcaggttggatctttcttttgtaccgtgcaacaacaaaagaaaggagaaggcctagctgcgagcagtacttttataggttaattaaggtaagtgttattagcggcatcgttaccattaatcacataattagattactttttatttgtttgtttgggcctgctcgagtaggactttggtcctgtattgcctgcgtgcaacataaaagcccaatgtggcctgtaatgagagttagtttttgcttttggtgaagtcgtctagggtttattcctgtggaactggaggatggcgatcccatcctgttgatttgccgctgccgccgtgaggtgtggagggagcacacgtccaggatacttctccagggagtgttgcttggagtcaggattggttccatcttctctgatcgtgtgtgttgccacacgggtggagttgcagatcgttgatccgtatcagtgctttaaaactactatctggtattgctgtttgttttgagagacaaaatcaattcactgcgacgctcatatacatactgccggttaatatcgttcttactgctttggtctgctcatttgtttaagttggaaaaataatctggttgggttattcagttgttggtaccgtgaaagagagggaaaatcagggcattcaccgccgggtgctcatcaagtcccagtcgacctgatcggcgagggcgtcgtagtcgtcgtccttgttcagctggaggttcttggcgaggtcggaggcgtagaacttgttctcgagatgctcgtcgtagtggcgagccccttgagatcaatcaccggaatctccatctctcccaaggctagctagctacttctacttgtacgtgtacaactgcctagtagtactgtactactgctgatgatgagccaacttatatgcaacaagaagatgatttgcttccgatgagcgagtggcatgcagctgggcagcgagaggcgaggaggccggcagcgagcgcacgcgaagagggaggaggtggggaggccgacgcgagcacacggggagagggaggcggcggcgcgggagcaggccggggcaccgagtccaccgagtccaccgccgctatgtagccccttctcccatgtcgcccgcgctgccgcgtcgccccttctcccgcatcgccgcgtcacctgtcgatggccgccggccaccggactgcattctctcccctctcctctctctcagacgcgacggagagggagcggcgcatggcggcactggcgggagaggataccgtcgaggtcgaagggccgcccggaggacggtggaaacgggggcaggggccacgatggtgagggcacgccggcctcgggccaccacgcctctgccggcgctgtgccgccgacgtcgccgtcgcaccccggcacggcgggagatgaagcgagggaagatggggagaggagagggggagagagatgaagagagggagatgggtgagaatgacatgtggggtctacgtgggcccctactattttttttattaatgcgtgcgaaactgacatgtgggtcctacggggtttattcttttagatcgaattgtcacgtaagcgccacgtcaatgccacgttaaaatgaagaccgagtcaaattagccacgtaggcgccacgtcagctaaaatcgccctcaaaaccgctgagggacctaatctgcaccagttttaatagttgagggactcgttgcgtctggatttttggttgagggacgaaaatcggattcgttgaaaagttaaagggaactctgatgaacttattcctgccaaaattactgcacacacatgaacttgcaaactagaaccaagatgggctggacaaaaagctcccagcgattaacacgcgcgattcggcccattatttatttattcctaaattaacacagtccacgcggtctcccgtctcccagacaaaaaaaaaaaaaacacacagatcacactattcggctacttgtcgtcttctgacccgaccggcttggcgacgagccggagagggatccgccgccgcacggtgaatcccgggtcgtcggacatgtcgagctccccgggcggcgggatctcccagtcgaagaggcggaccaggctggccagcgcgagctcgacggtggcgagcgcgaactgcatcccggggcacacgcgccgcccggcgccgaacgggacgagctggaagtggccgcccctcaggtccatcgcctccgcctcgccgccccccggcaagaacctctccgggcggaactcctccggcgagctccaggcgcccgcgtcgcggtggatggcccacgcgttgacgaacacgcgggtgcccccggcgacgtggtaccccagcacggtggcgtcgtcgtcggtgtcccgcgcgcactcgcgcgggacgagcagtggcaccggcgggtggagccggagcgtctccttcaccacggccttgaggtagggcgtggcggcggtggtcgcgccgccgccgcggcgcacctcgtcctgcagcttccgcatcgccgccgggttcttgacgagctccgacatggcccactccagcgtgatgaacgacgtgtccgtccccgccgcgaacatgtcctgcaagagcgacttgatgatgtccctcgtgagcttgaagctcccatcatggcgttggctctcctcctgcagcgcgagcagcacgtcgacgaagtcctcctccctgtgctcttcgccgccgccatcgtctccgccgcgtagcctcgcctcgtgctccgcgatcacctcctcgagcagctcgtcccaccgccggaggttcctgcacgccctcgcggcgaacccggagaggaacgcgtcggcccacgccagcgccgggaagtagtcgccgacgcagaacccgccgagcagcgtcgcgttctcctcgatgagctcccggaacagctcgctcctcccttcgtcctcccgggagagcctcccggacaccgcccggcagatcacggcgttggtgaacgcgtacagcgccttgctcacgtccaccgccgccgcggccgcctcggtcctgatggcgttgacgaggagcgcgacctcctgctccctcatggggccgtagcggtgggagcgggcggcgctgaggacgtgctcggagcagaggcggcgggcgtggcgccagtgctcgccgtagggcgcgaagacgaggtccttgaacccgtaggtgaggatctccgccgtgcggaagtagggccgcgtcgcgaacacgtggtcgtgctcgcgcatgaccgcggcggcggcggccggcgacgaggccacgagcgcggtgacatggccgaggcggaggcgcagcaggtgaggcgcgccggtggccgcggcgagcgcgcgcagggcgcggtgaggcagcgcgcccacctggtgcaggttgccgatgacgggcagtccccgaggagccggagcgagacgccgccgcgcgttcccgccggagcggagcacgccgccggtgaggtagaggaagccgaggaggaggaaggggaggaggaggagcacgggtgagagctcgatctccatggctgtcgctgcagatcttgcagagcgcgcactcgtttctttgattttttccgaacttaaactcaacatcgacgtgatgacagtagggccctgtttatttcacaaatataactttttcactatgtcatattaaatgtttgtacatatgtacagtgttaaatatagaaaaaaaattaattacacagattgcgtgtaattgcaagacgaatcttttaatcctaattgcgttatgatttgataatatggtgacatagtaaacatttgctaacgatggattaaataggattaataaattcgtcacgtagttttctggcggaatctgtttgttttgttattagtttatgtttaacactttaaatgtgtgtccgtatatctgatgtgacacgtcaaaaattttcgtttgcgaactaaacatggctctaagtgcccactcctcgtgcccaaaatatataaaggatttttacgagatgtgatacattttaaaactacgaacctgaatatatcacattattagtattaggatgtcacctccaactaaaatccaaaagttttgtcattgccgtcattttcttagtactagtagtaggtgtttgccttatcttatggagtactcctccgtatttatttggcttttggagattttgcgcagaggatttgacatgtactccgtatgtagtcgactccgtatgtagtcgtcattaggtcactgactcactggagatcgaccagttggctctccatctgttctgtaggcggctatgcgcctatgcctcataatttttgtggtcgtataatatgcagttgtatttgagttattcataagattttgtaaataaaatgttgtgtatctttacgcatccgtaagaccgcgtctcatttgatttagatattaagtatattattgctactccttctattttatattataagttatttttcttttttcctagtcaatctgtttttaagtttgatcaagcttacataatattccctccttccaaaagtttatgtcctattccattgtttggtcttttcaaaagtctaagttctatttgtagtcactatgtgccatattaatttttttatcagaacctaagaaatcattttagcacttattggttgcatgttcactagttttatcacatgaatgaattaactacaccttagttttggtaaaaagaaatataacttagacttttggaaggagtgagtaatatagtactagtattttactatttttaacataaaacaaacatattatcaaaatatactcaacattaaatttaatgaaaataatttaatattttagatattgctaaatttttctataaattagatcaaacttaactagaaaaaaagtcaagccacttataatataaaatagagggagtacttaaaaaaattatctacttgattatagagtaaattaaatatttttaaaaaataaatattacaaatagtttaaaataaatagtctaatgaatgcaatggaagaaaatattcaaaatattcatggaacgaacaatctatttcaataatgagaagagttggagttaagtgttcaattggtctcgtataattatgtgtataaatattagatttgaggataattaactaccgttttaattttatattaacaaattttattgcctttcgacagaatccaccacttgagttgcaaggaacacgtatgatggaaatgaattctaatatcacgaggagatgtcttcttattcttgtatgtcttccaaacagttataattgctttaaaaaattaacaatataaattaatgtgtgatatattattttaacatgcaagtttaaatttgatcttcacaagttctaaaaaaaacatattaaactcacaattatttttttaacttgtaaagttaaacttaaacttgtatatttacgtagtaatgtaccacatattaatttagattttttatgtttttataattatgtagatgatacgaaagaaacgtctcctcgaacgattaaaaggtttcatggttctgaaagagaaaacaaaagaagcagccagtaaagcgtagctgacttaagaaataaagtatacttctgctatattatcgtgttaagcaagacctgtaaacaaatttagtgtcagcatcaccttttaaggtctgtgacctgagtttttttcattttagcttcagaaggattaaagaatgatttggggcagactttatagggattgtttaaatcccaccccaaaactttacaccctatcacatcgaatatttagacatatgcatggtgtattaaaagacaaaccctgatttccgtatccaacgtttgaccgtccgtcttatttgataaaattatgaaaaaaattaaaaagataagtcatgtataaagtattaatcatgttttatcatctaacaacaatgaaaatactaattataaaaaaatttcatataagacagacagtcaaacgttggcacgggaacacacggtttgccttttttgggatggagggagtatagtctaaaagaataactaattatttagattgcgactactctgcgagacgaatcttttaaatctaatttgacaacgtggtgctaaagtaaaacatttgctaataatgaattaattaggcttaataaattcatctcgtgatttactgatggatattataattagtttttttagtacataaatacctctatatgacaccctcgtataataattaaggtgacacgctcaaattttacacccaatcaacaaacccataccggagggctggagccatggctgtcgactgtcgtcactcatgacgctgagtgcaggttcgtttcttcgatttttctggagctcagaggtgatggcagcaggtggcaagccattgccgtcgagtacatatattttccttagcttatctctttgtcctttggagtttttgcacagaggattgacaagtagatagtcgtccatgtcacttgagatcgggttgttgacttccaatagttttgtcggggcagtaccggctacaatcagtggtacacagagaacaaaatgcgcaggagtcgtgtcacatgttacagctgatcaggagtatgttgtttgcgcaggaataattattttccgttgctttcaaaaaaaaattcatggcttatgagctgtagagccatgctgatggcgtcattacgcagaagacaagcatcgctttattttatcgacaaatatactctattttttattctagagagattttagctttaagtgatgaatactagtagttacttcatccgtcccagaatataaagagttttagacttaaacacggttattaagaaaacagctagaagtgaataatggatggttgtgattggatgggtagtggaagtaggtgagaaaagtaaatggtggagggttgtgattagttgggaagagaatattggtggagaaattgttatatttcgagacaaatccttatagttaaaagttgttatattttgggacggatagactaataatagtaactctatcttaatatatagcaatatagtatcaaatgggatatatttttgtaatagaaacctgaaccgaacttatctatcaatattagtagtaacgagatatacctcatttgatattaggttgtttcatttttggtccatgagatggatgtttgatgggaaaagttttttatctactggggtagacagctgcacaccacacgataagtgattcgtgcgtacacccgaccacttcccggtatttcccaacttgcccgtattttgcccatttgttagcggaccatggaaatactttcatgcttgaggtcacgactatagtatttacatggcatgaagatcattgataccagggtatatgcgagattgagataaaaaagatagagacaatgatttttatacaggtttgggccccttcacaggaaggtaacgaccctactcctattggccgtagtctgtgtttttctttattcatctgaatcacactaagtacaatatttgagataacctatctagatgtcgttgacttggcggcatggatcaccaacacatagtcaacgacagggtagttttactcctcgagtacgaactcgtcgagattagagatggcgctagatctctcttgttggcctccgcaggcaccagattgagtctgtttaggcttatcactgatatcaatgtctggtggcgtgtgttggtgtctattctgacttgtgtgtgtgttccctctctccccctatgggtcttgtatttatacctatagatgttcccttgtacaagtagtattaagaagaccaatatagatacaatccgagtagtccttgtcgttttcatatagaactctactcgtacttccttatccggaactccttctatatatgaggtacgattccgtataagatttggtatatggtgggccccgctgagcttagccgattactattgggtacgtggtatccataaccatgacaaatacgactttatacgcggatcctacctcgtacaatcgcactggcgttcacgggggcatacttctccctcctcttctcctcactgacgcctctttccctatcacatcgccctccgtagtgcatcttcccatcctagactatgcatatcccttctttctataaagttaaggccaaaagctcaaacctcgtgcttccacgtcatcatcaaatagtgaaccgttggatgaatatattagattgcttctcagacgttggatggaatgcagcatagagcccaacccattagtcaccgggtgagtctcttcgcctcctcagtgccaaatatagcccacatgaacacattggcctatgtccacacacatatacatgtatccagcccgtcactccgtataaaagagctttatgctgaacgctctttcagttgacatgtgttacctaaattatctacaaatttttgatagggctgctaaaaagaatttctccaagaaagctatttgtttcttcttgatattatacttcttatctaacaaattgatgttaaccaagtcccacagcaacacgtggggcatcctctcgttgtatatactcttcccatccgttaggaatgctggcgttatagttggccaaatgggccgcccggcacagcacggcccaggccccgccgtgcctgggccgaggctagtcgggctagcacagcccgaccgacacgctgggccgtgccgtgccagcccatgtgctgcacacatggcccaggcacgacccaatacgactcgggccgtgccgggctggcccgaaggtacaacagtccattgtgcttgtccatagaataagtatatttttcatccctcaactctgtgggctgagttcatatggctagaaataagtctattttgtatttctcttctcattgggccttatcttatatggttatttaagtctatttttcatccctgtactttgtgtttgtccacagaataagtatatttttcatccctcaactctgtgggctgtgttcatatggctggaaataagtctattttgtatttctcttctctttgggccttaccttatatggttatttaagtctatttttcatccctatactttttttcttcaatcgtgccgtgccgggccagcccaccgtgccgaaggtgcagcccaggcatggcccgactgtcgggccaggccggcacgggcacgaccccagtcgggccgtgcttgggcctggccaaaacggcgtgtcttggcctggtccacgggcctcgggccatatggccatctatagctggcgtgctcttcgccaaccaggaacgaaggaaccacaacagcgcacaaacagtccaacgattggttagtgacgatttacccatttcaacattttgctcctctctttcaatatttttctcctttctagaagggttttttgttttaaagtggcatagtccagacaaatccgtttacctgaaatccatgtgtaacctcatctctcccactttttatctgtagccaattgagttagggaagaggagggtttcgtgggacgaacgttcacggcctagaactaccaggagcaagacgtgggtgccccccttgaagctgacgaagaggattgcgattcggtggttgatatcgcgctcgacaggggcgccttggaggccctagtgagagaagtaaaccatggtgttgatgaagatgaagatggagccaccagggttgctacaatgacaagctcagttaggcatgcagtcaagataatcacgaagtttgacgactacaaaagagacggcggctcgacgacgccgtgtgcgtattttgcgcttaggtccttgccgtcccccgcaatgcaatttgcgcccgacgaaaaaagcatttggctgggttttttttgcatctgggtctagatgcaaaaaaacaagccaaatgctttttttttcagctctattgataacagttaaagaattatttattggtaaaacttgttaataatgttttaaaaaatgtattgaggtcggttgttttgcaatttcatattttaagtaagagtttatggtgtaacttattcgacgtattagtgtatgaaattgatataggcctatcatagtttcggtcgtagaaacattatatacaattaaacaaggagaattatgtcatgtatagaaatagtagtagaatttgaacatgatacatctggttccattgcagttacatatataagattagattcaaactaggagggaggtagtgcaagagttgaacacaacgatgatgtagtaataggacaaggaagcatgacattacaaatttcaataaggtaagttgtccgataatagctaacccctacatgaggatccctctcctctctcaaactgcgctttagtaaccctgtattcctctgatagttcaagctgcaccacacggctaggtggagttagaacccttctggtgtctatccattctctgtattgacatctccttggtggttcctgtgaaaaacgaatagatgtgaagcgaacaaagttagtaaatgttgggagaaaataaggattcatgataatcaaaatattcttactatgaaatcgtcgtctagaatatttggacaaacaaaaaaaccttcgacccaaagtcgtaggcttcatggaacgaagaacctgacaatgatcatcgcatctacatcttggacgggcttcccatggagggagtgccgtagttagcacccgccagtcgcactgttgttcacgacgttgtcgttcgtaagccgcttttctctccaagtattgctcagtactttcggatgcgaaataccaacgtccttattgtaaacaagtggttaggtcgagaacgggattttctgtatcgacccactcgatgtatccgtaagccgtagcgtgggtctgacgaatagagtagtatgataaagaataaaacaattgcccatataaaatgaataagcatatgcagataataaaataccttacggtcatagttagggcacctaaaaaagtgtcttcctcgaatgtcaggattcatcgaagccattagttgccatcggtcaccgcaaaggcaaagaggccgttggcaccaaggtggtagcaggtatgcacaaggatcgctatgccaattcggatcctcaacgccccagcatctagccattgccaaaagctggtgggttttgtaatgaaaccagtgagaaagagagtattgaatctgaccgagttatgaaagattgtgaggcatcgctcgttatggcaacttataaaatcacagtgataaccttgacatgtctacatcgcaggccatggtgggtcagcctgattggcgccgaaagtaagattggacgtatgcgggccatggtgggtcagccattccgcagtcgtatcgcacgcgaataaaggaggctgcatcggtgtggcagaaagtactcatgcatgcaccgaaaggtatcatgctttcgtaaaaagtaacagcgaagtttagggatgcaaaacccgaatagcaacaacgtattcattctacaagcatacagtactagcatgtaaagtaaataaacaaagagaagtctgctctactggccctgccccgcgccgcgaccacgcttggtcctccgggcctgtgctcacacgtggtcctgggagtacgtgaagcgatccagtggcacaacacgggtagcacgagtatttggcggcggagtggagggcaactggtcctgcgtctacaccgactggtccgatgacgtcctctatcgagtgctggaagtcgaagtcgctgatgtcgaagtgcaaggtggaagcccacccgtactccgacgatgtcccggcatggtccagtggtggaccctgactcgacgtgccggctgcctgtgatgaagtcccggcatcctactagaattgcgcagagtgcgaggccgacacagttgcctgagacgctgaccttgcagcctgggagaagtgggcggcctgtgtcgtaccgaactgggcgaaacctatacatcgacaacaagacccttgtaagctaacacataaattgcatgtaaattgattgtcgatatagtgttgtttttttagtacctgtgggggcacaataggaggcatactcgtggaaggcggggtggtgaacggtgcacgaaaccctgaagcaatcggattaatcggttcacatatatgtgtggggcatgtaaaaataaaccttaaatatacttacctccgtggggagggggagttagcctaggaacgtgtgcagctggacgaggaccagtcggtcggggtggccgctgtggtgctgcgtctgcctgagcaacgtcgacaggacgacaggtggacgctcggagaaccgagcacaccgagtccagtattcgcgtgcacgtcgtcaggtgctcgtctacaagtactgcaatctccttggtgttacaataaattctaacagatctatcctaatcggcccgtaacggacgtttcctgggccatggtatagttgaaatatatgtttgttggacatttctgtcaacgaaataactagatcattctttcatgtaataaatgcccaaaatgtaatatcttgttatgtatgctaatgtaatggtactcaacaacatttaaaactacaaagactacagatctacgtagttacgtatatctaacaatacgcagttctacagtagtacaactaaaaccctagataatataatacatttattcaaacaaagttttaaaaaatacacactagttaattaaataatcacatatatgatctatgaatattacctgaaatcagagtctcaaatcggcagggcttcgccttttcttctcttctcctccccctctctttttttttctcagagtagaggtgaggagaactgaggagggtgtgcagggcggcaagccttttataggctaggaggcctgccaccctagcagagggcggcaaggggccgcctgcaaaatggcaggccccgggctggcttttttgcatggaggcccctagccgcccaggcagtgggcggcaagggtgttaggtgcaaaaaaaaaactcatctttttgtatagggcggccaagtcagcttgccgcggcggcagggtctatttttgtaattttttccgacgatagattatttctgtaaatattttaaaaaaataaaaatgaaaaaaattctctggacataatccgtggttatcaggctgtgggccatcgggccggtgctcttgagggccgaaacctcgccggcccagcgcgcggcaccaatcgcccgatgcgcagccgcacctgcccgcgtcgtacggtgtactgcccatctccgccatagcgtcgtacgtactacacgcgacggtcgcgtatatacatgtacgtcgtactcccccgaacgccaagagctaacccatagagagcaacatcgacataaactatcatcagctagctgcgacagcgagctagtagaagccatggacatgggcggcaatggcatggcgatgccgccgccgccggcgccggtgaagaaggcgcggtacatgcacatgaccttcttctggggcaagaacacggaggtgctcttcaccctgtggccgggcgccaggggcggcatgtacgcgctcgcgatcctcttcatgttcgcgctggccgtgctcctcgagttccgcggctaccgcgtgctggaggcgcgcctcgcccggcggcgcgcgccgcgggcggccgcggcgctgcgcacggccgtccacgccgtgcgcgtcggcgtcgcatacctcatcatgctcgcgctcatgtcgttcaacggcggggtgttcctcgcgatcgtggcggggcacgccgccggcttcctggcgttccgcgccggcctgtgcggcggcgggccggcgccgccgctggaggaggaccgcaagaacgaccccgtgtgctgctagtatggcttaagctgtctcgctcgtcatggtgttcacgtggccttttcgcttaatttgttgatgttttgtgtgtgtgcatataggtttcaggtgattgaaatctttgaaatttgggtcggatgatcgagtttgtttggttgttttgtttttctctcgtaaggtctacagatgtgacatgaaagttaatttcttgatgtcatcttggcttggaatctattactagtggtgtctgtcaaactgtaattgtatagcatatgtcactcatttgattgatgctgcctcccggctttagtttcaattgtctcagattggttattatagtgtacctgcaaaactgttcttcaatccaaactcgacttgtttgcatctggattcaagcattcctatgatacatgttcaatatagagtgctttctaggtagtgctactatttccttttctcgtttggaagattttcacatttatatggctgctctgaaattcacaactgttctatacaaagagttgagctggtcaaaattaaaatcttaaaacaaaacacacgagattgaaccgattagcatactccagaatttcaaaactgtttgatcaccgaataccctcttccgagtttcgtcgataatagcgactgcggtttgctattaatgtgagtatttctatttaaagagtaggatccacactcggttaccaacgaaaccgggcggaattcttgaaatttgttaaaacttgaattatagttttcattttaaaaatttgaccatttaccgagcggtttcttgattcgtactggtcgaataagactgataaccatgataatgaatagttaccgtcccacttgttaacccagccccgttgaaggtggtcctttattaacctttgtcggagctcactgtcaagtgtcaactttctgatgttttcttacattatccacggctgtattctacgataatgcactactaaacaacccaaataatgattttaccgtgcccactgaaagcagaattaatctatttcatggtgagtgcgtctctgaactcctggctatggattgtaaccctaattctgtgagttaataaagcttcctggttttcccaaaaaaaaaagaattaatctatttcatcatataattgtactactcaattgggctaaacacctcggtcacacgtcatgcgtgacaattttaaatcacccccatccattttgcagattggcaactaattggtaagttgtgcttcattgcttcagacttaaaatctgcccacttgtaaattcttaaatactgtgttgataatggaagcctccatagggaaagtttattttttctttcccatggtacaaaggattttcccccattgacatgctgcatccgacacgttgaatccacttctatcttctgcttctcgctctcttgcaattaggggtgaaaatggtacggaaatttccgagatttctaatttttgagatttccatatgttgtttctagtttgcactgatcgtttcagtcggtgtcggtaaccgtcggtcggaaatcgaaatggtaataacttttagaaatggtagcgaaaatgggatggatacaaccgttttgccggtaaccgtatttgtacgataacctccatcaaaattatgaaaaaattccgaaaattccctagcgggtcagccagcccaacccatcggaagcccatgagaggaggaaaccaggtaggtttgcagcccattataaaggggaagtgattagggaaaagcgttgttaaccctaagacgtgccatatggactttgttgaactttggtctcctcaacttattgatattgaaatattattgaactttgtttgtattattcgtcaaatttattatcatatcattaataatcatataacggtgttatgtggagtgtaatgatggaagactgaagttataaagtcctcttcatgcatagttaaatatgtgctatgccacactccgctcattctgacatgaacttttgacttctgaccaatatcggtggattccgttccgactacccgtttccgatattaccgatatcattactgtttcggatcccattttcgagaaaaaaactgaaaatgaaaatggcatacgtttttccgaccgttttcatcccttctcgcgaataccttccatagcttgtctaggtgggcgtgccttttcatgggcttcacgctctcaacgtggcttagctatatccagctggaaaatgtcaaagatttccttagttctaggcaaaccaaaaattcccggcttcaccgctgcgtcacgcggtcacggtatggcctgtttttacccatgcaatgcaatgttcaaacaaagaaaattactaattggcttcaagataaggccaacgaagcgtgcttttatttgtgatctcttatcagatgaacctctgatgtatacgggggttgagtgacttgtcttgtgaacgggatgttcttccaatttgagccatctcaaaaagaggcaaggtcagagagctgatcggctccacgcctcgacccgacgaccaatatctcaaaacatcgaggattgcaaggggcaacaatgactacagacagcatgcgctctttcaacctcttcttgtattatgagtgagctatttgcctattgtatttgaaagaatacaacagttccagaccaatgacctctatggctcacagcgatttacagttcagaacttgggattcttggccatcctggttatctcacccgaagatatgtataataactgatgtaatgacccccaaaattttgtacggatgtctgaaaaaattacagggggggccgagccgttacctttggatcctacagtcaacctatggagtgtgtatccaatgaaagaatggagattcttcccttcccacattgaggagctagcgttgctgctggagtataaaccttgaagcacggttgcaagcattagcaggttataatgtcgcacgaaacgattccgtggccctcggtgacctgagtggaatgccatcagcagcagatctgagaggaattccttcagcagcataaccatcctcctcggcgtgtttaggtagtcggataggtaaatttggtgggagacctgcgatggcaatgaataagaatttaccaatgggtgctatttcaagtcaacacaagatgggacgaaaggcagtcataccatccaccatatcctttgtcttgtgaagaagaaatgtcccagaaaggattgtaacaaaaccgcacatctccgtgacaatttgtgttggatcttgacgatcccagtcctgcatgcaatcagggttgcatcaacagatagttcagaagcattgtcaatggaacacaataaggggttgactgaaccatgatgcgccattctgatgatacagtttgccgatagaatttatagcattatcatgattcagaaattcattgtagtatgaaaggcctttcaatgttaatgttatgtttacatgtatactgacaggcctacatgtcctattcagattagagaacatttttagatatatgggccccatataagaggagtttgaacatcaatcaggatatttaagtgtaattgaatatcaaacagctacagtatcacattaaggcggcagttgatgcagcaaggaaacatgatgggtagtcatctaggaagatggaacaaaaagttcaatggccatggtcaaaaactgaatgccaaaggtcccaacatgtttttgaaaatagtccagaaggataagtcaagagttaatttgatatgccaaactgcgctatcgatacacaatgtataaaagattgatttccattcaagcagcaaattcattaaaaagaattaagtatacttctggtatattgacatattgccatattaaacaaaatcagtacaatagtttatagtgtcgccatcaccttttaagaaggcagctacatggtgtttgtattaaaattatgtcaacaaataaattaagcccaaaacctgttaccttgaacattatcacactggccaaaatggtcaaggatgtaaacatcgtataatatatgggcgaaaccactgcagtgttgaaagtgtcaagggcctgcaaaagtaaacagtcaaattcaaagtcgtatagagtagaagacaaatgtacaagacttccatatagaaaaacaaaatcagtctattcatcgtttatttttttctcttggcatgcccaaaattatcctacaacatagatattgatcataccttgttcagatagttcatctgtgttactatgcatgcaactacaaaaagtaagaacacccacatctgtggataaacaagctggttcatccctgaaaatgtcagcttcaatgctatcccaagagctttgacactcatgacctgccagagaaagaagtttacagaatgaattcatttacaccgtaaaccgactaagaaggatattgtgaaaacgtatcaagaattattaatgacatgcataccgataaggatcccacgagagaacagacaccaatatacaccatgatatgggtctgaccatattgtgggacaaaatggaatatgagcacaaaagctgctgcaagcacaatggctgcatatagtagaaatgctggaacataaaggtttaaatattagtacttgaaaaaccaatgtctaaatgagtcactattttctaatatttgttatattattatcttgtgtacatggtaggattatacctggttcagtagctagatcccatacttctgccacagactcaatttgacgctctggaggggcatgaagcacaatacttgtcgaacccacaacacaaagaatacacccgagtataccaaatatgtgtagcttctctctcagaataatgtgtgcaagaacagcactgtaagaagggatgccgatattatcagatttacaggaatatacacagaagaagatttacaggaatatgcacagaagaagattttaccataccacttcagtcatacaattctagtcttacctgataattatgctaagtgcaccaagtggagtgaccaagatagcaggagcaaaagcataagctgcgaagttggcgatttctccaacaatcactgacaaaaagcatagtacatcaattagcactatcaccacagatggaagaactttgtcaaccagtatattcatgcatgaagaaaccacttacttgctgtcattcctgcccaccacaatggttcaagcaagtaagagtagccaccaacacctgtagcaagtcaacaacataagcataattactgaaaaagctgaaacccatttggccagagggtagcaaaattccctatatggtacttccgtgactaaccaacatatcatgggagaccaattacacaacgcggattgatcatccatggaagtttaaagcacaaaaaggcaacaaatagagcaacagcaatcacatagtagttttttttttctgcttgcaaccatttctgcaatcataggctcctcctaccgtcaaagattttcatattctacagccttccatgtttgtgtaagcttgttcaaactgctaattttgacgcagaaaccatagataacgaatcgcaatgcagtcacattataaacaagaggggatattgcacatcgtgatatcaccactgcgccatgaactataacaattgctactattgtactattactctattaatcatcttgctggaacatcatcatcaactgagctagtcctacaagaacaactatttcttagtacccaaacaactacaggcttaaccgacagcccgatctccaatgcgcgtgcagcaccaaactccctaacaccacttggccaccgacaacacgatcaagatccaaatctcgcggggctcagatctacgctacagagctagcaccgcggcagcagcagcagcagcagcagaggagagcgtgggcatccctgcgattcgcttgggttgcgagctgagaaggggttaagcggaaggcggaggtggaggtgggtgagagtcacgtcacgcacctgcgcggacgccggaggcgccggccttcttgaggcccttcttcttgacgatgaagctggcgccgatgaagaggctggaggagagcgccagcaggaggcccttgacgttgtccgccgacatcccctccacccatctccccagcctcgccccgcccatgccgccgccgccgccgcccgtacgcctcccctactgcgccctcctcctccgccgcctcctccgccgccgtccactccggccgcgcatgcgagatctgcaaggcggagaggccgccccgtctcctccctcagcttgctctctgctggtggcctcgcctttctcgacccgtagcctgtagcactagcactagcacgcagtccactcctttgagagagagagaggcgcgcgcgcgccgacgacgacgacggcgacgtcgtcgggaaggtggcaagtactagtagtagtaaaccggaggaggacgaccgaatcgccgtgcgcgcgcgcgctctctcgcgtgtgcgggtccgcgtgcgcggtgcgccgctagaacgtgagagatcagatcagtcagtcagatcacggtggcgcgcggtgttttcgcggtgattttggaggtttttctgggtgtcgccatgccggtcggtggggggaggggagccgcgcggggccgcggctgcaacgtgagagatcagtcacacagatcacggtggcgcgcgcggggttctcacggtgattttggaggtttttcgcgtacgcggtaggtggggtgccggtcggtggagccgcgcggccgcgcgagcgggcgggcacggtaggcaggaggatcgtccccttcttttttacaggtggggtgtgcgtgtagcgtgcgagcgtgacgcgacgcgcgagcttgcttttggtaagaccaatgtgtgggttagaggataaccgcgcaccacagggataggtagttttggtgtgactactatactttctttagtggaatctttggtgtatcggatgttttgctgtgtggggttctgtttgatccgagtgtttctagtagcgttatggttttgctttctattagtgggacgctgatgatcctttgttatgtgtgactggacgaggattcaggccatatttgtttaggcttataagccaacttataaattaaaaaatctaaatctaaacaaacaagcagctttttcgtttggtttttttaagccataagccactctaacactattaagccaaaagctaggttagagaagcttttttggcttatgtgagacagatgcataactccaccattaaacttagaacattaaatccaccggcttataaatcatataagccaataagctgacttaaaagtctaagccaataagtctaagcccaaacaaagagggcctcagtttggttgtagcagtggcttgtggagatagaaatttgcttttgttccagcacttcaataccatatcggcatatcatatacttcctccgttttttaatagatgacaccgttgactttttctcacgtgtttgaccattcgtcttatt

SEQ ID NO: 27133 - DNA, 8041 bp, Oryza sativa
aagacgaatggtcaaacatgtgagaaaaagtcaacatcgtcatctattaaaaaacggaggtagtactcgcctacagtggttagctttcagttctttccaccatgagatccactatagagaacatgaaaatgacacttctttcccgttgcattcttagagcaggtacaatagcaggctataagccagctataaccacatatcgagaagaaaagagaagagagagaagaaagcgggctacagatttgtagccggctgcaacacggacttcaatacgttataagtgtatgagaggtaggaccgggtattaatgatatagtatatttttatagataactattgtatgaatgggatattagattggctatagatgatttggagccaacagttggctatactattgaacttgctccccattactagctctaatttacctatagccaatctaatagccaattcatacaataattgcttactatactattaatatatggtctcacatatcatacacacattgcgtcttggagttcgtgctgcacctggccataaatctgtagccgctgctcttttatctcatcttttatctcgttaaaatatgtttatagctggctaatagcccgctattgtatctgctattaggggtcatttagattgcttcctcactttttgtgagaatgcggtgctaaagttgtgacgtgccatggttttttctggcactaaaacaggtggaaattaaataagaacaggtgatgtggtatggagttatgatgcatgactttacctactaaggtttaaatgatttccctattcactttcaaatcaagcgacatcaacaatttgccacttatgtcgagtatgtttagggcagggtgtgcacttatatgttttttaataaaaaaaattacttggaaacattgcgacaaacttttaaagcttgacgagttagaactgtggcttataaataaactatgaaggtatccacgcttatacgcgggcactttattaatgttgtttaaaatttgtattacgaatggttatatgtggttgacttttttttaaaagtatccgttaacactattatatctatcttcatcaataatttgtttaggatcttaatccgtggattgggggcgtgtgcagcagcattaccgggcatcatgggagggagcgacactactccgcccgttaagggaagtggaggcaaaggcagcggtggcggggaaggccggcggccacgctgctgccttgtcgcctgggcgccatcgtcgtcttcttcgcactaggaggagctgaggacgcgggcgtggttgtcgaggctagaactgagctgacgagacaagaagagtgttggtcggttttttccgagctcttcgtcaggggatcctatcgtgggcattaccagggagccgtcaccgtccagatttgcatcactccttgtttagcttctcaacctccaccacaccgcccgagggaaccacctagtcgccgcatgccatcccatgggcttcctctctgtgctcacgcgacaagctttttcgatgagaaaaaattcctctctaattaatttattatcatagtatgagcctctcctaccatttctcgtcaaaaaattaaaaagctttggtgatgaggttagcatggatccacaagctccgtgtggcgcagatctagcagcggcttgacatggatcaagccataacgctaagctcctttgtggctataggggaaatatgtaattgatgggggcggcgggcgtggagtgtgaacaacctcgacaatggtggcctctcctcaatccggtgttttcgggcgttgatctaatggggtggcgactcaagtaggagatcggggtgatatggtccccaacaacgagctcaatggagcactatttttttctccatgggtaccgacgggtgggcccactgtttttctcatgatgcatgccactgccatgttagccaatcttgtccaaaaccacccaaagagtgttgattgggggggggggggggtaattcgtccggtttgaaaagttagagatattaaatgtctggttttgtagtttaagcggggtaaattgtattatcgtaatagttcaagtgtaattccgacattttccgctatagaatgcacactaaggttgtgttttttcccctttttcccaactcacttccctcgttttccgcgtgcacgcttttcaaactgctaaacgacacattttttgtaaaaaaaaatttatatggaagttgctttaaaaaatcatattaatcctttttcaagttttttaggctaatacttaattaatctcactaaattgcgtgcttcgttttccgtgtcacaagcaaccttgcctcccgaatacagcctaatcattctcctgatacatcttaaggcccgtttagttccccaaaattttttcccaaaaatatcacatcgaatctttggacacatgcatgaagcattaaatatagataaaaagaaaaactaattacacagttatgggggaaatcgcaagatgaatcttttaagcctaattagtccgtgattagccataagtgctacagtatccccacatgtgctaatgacggcttaattagtctcaaaagattcgtctcgcggtttccaggcgagttctgaaattagttttttcattcgtgtccgaaaacctcttccgacatccggtcaaacgttcgatgtggcacccaaaaatttccttttccccaactaaacacacccttattaccaatgtatcccaaaagaaagtttaattgcatagttagttaaggttacaaagtcatgcagtatggtaggggcaatattttagaagcaccatacgtcatgctaatgtgagattattcttgaccgcttcaacttgattaaactgtttttgcatgaatatctctacataataaccatatgaaattcatgactttacctcgattttgtcaggagcacgtcaacggtggactggtgaccaactggacacacttatatatgaatctatacaaatgatagtactccctccgtctaaaaaaaaagacaaaccctggtttccgtgcccaatgtttgaccgtccgtcttatttaaaaaaattatgaaaaaaattaaaaagacaagtcacgcataaaatattaatcatgttttatcatctaacaacaatgaaaatacgaattataaaaaaattttatataagacggacagtcaaagtttgacatgaaaacccagaatttatcttctttttttggacggagggagtatgtgttattggaagcacgtgaggtatgaaaaaaacagcttgcgtttgttcgagattggcgtcactccttggagcctgatgcagcttctgacgatccactggaatccagattctgatttgtggtttttctattagcgatgaacttcacgtgctatttggaaactttactttggatgccatttggacattggcatcctcttctgagaccacagaaagtactgtacatggtttctcacttcagatctgatctagtgtcagcttacatataactcatcacctgaggagccgacagagctgaaagctgagtctgtgttttagttcagcgcaaagtttgaattttaaattggagatgatatgacagaaaaattgtgtgagtatgatagattgatgcgatgaaaaattactgaagtttagatccaaactttagatctaaacacagcctgaattgtgttccatctaagaaatcgagttgtgttgattgttttagtagagatttgcacgtttgattgcattgcagcttaagtgtgttcaggtgtgctaggatctaaaattctaaggaggctgtgattttgtcgttgttgatgatggacaaatttgaaactgtgggcgacaagttgaatgatgaactacagaacataggagctatgtattttttaagactaaatttcataaaaacactagatattaagttagactaaatttcataaaaccactagatattatgacttaagttatgcaaaatcacatgggttttgaaacctgacgcatacccaattatgatcctatagttttataaaaccacgccattaatcaacttggctttctttactagcaaaataaaaaaaatgtggttaacttgttatagaatagatcgatgaatccatatatttgagatatgattttagaacatatcatataattgcttaacagtatggttttgtgaaattctagagcgcaataatccaagagttatatatcacatgtcaaaacccgtgtggtgttgtgcaagttggattatgataccttgttacatgaaatttactctaaaaaataaagggaaaaagattgcctattgtattcccccaagtaacttatgtgcttcttggaaaaaacgatttgtatgttcagacaaaatcacagaagttctgagcatatacacccaagctacattttttaactgatagtgataacagggcataaatacaccttttacaatgtacagattacatggtacataaataatatgctactctgcaaaattactaacttaactaatatgtacacgatctgaaaatggctacaaaattccctgctgtcctccctgataacagggctcccagcagatcatttggcataatcaattgtagctggtcaggaaatattacctgagcgttatctcggaatcacctcaaagcattgataaataatccttcatgccacaaccacgcaaaacctttcgttcttgcatattaagcgaacattactcagaaatacaatggtattgactggtataatgatgcggtattgctgattcttaccattgattcccgagatcatttgttccgcccaaagtacaagctatcagaagcaaaaggggaagacctatttaactatcaagctccacaaccattgattggaattcttacattttcataacctttcagcgtatcttgggtaaaagattccaatgcttcaaatattggacctagacctgctttcagatctgttgcacttgactcttggatttgattcacggcttcctcatgcctagatctttgttcatccaatctcttatgcaatgcgtccaaagctacaatgcggctatcaactgctctgttattttcggcaacaggcaacaccgtcttatcagcttcatgatgtccagccaagccatgttccttttgaaaagatttgagcctctttgcataatctctagataaatagtcagctttcagcttctgttgctgctcttcgtcctgccgctcccgtaacatgtgcacattaacagcgaaagcctccattgcacctatgacagtaccttctggtatccttttcatgctttgacaccaatcattagctgtgatgaacacagctggagctccaagcctaccaggagaaaacggtgcgatcccatcaggtgtttcctccttttcctcaggaagccatttgactaaccagccattgagagtttcaatataagccttttgtgacaggatccaattgctgaaacaggaacaccagttcaaaagttccatttctagttcgagtgtaatcttggagttcctttctggcccattcttagggataagaacatgagatttagtttcgagtatggcatgaaattgcttccgatggcattcaagaatgaatttccacattctcacaagcctacatcagaacgacaacagtttacagtctgttcacagataaatcagctttgtgacaagtattggaagccgtgcagaggaaataaattgttatgaaggcaatatctatctcccaagaatataagctcagacacaaacagcaacaaagaaagacacatgagaggctacatttgctagcaagacaaatgtgctttccaaaagacaactggacttcctaaactaaagatatcctagcattaactaattttattagtgtgatagctattttgcttaaaaaaagtttaatgatatgatatacattatattgactagctaatttcaggacatgtttcaatggatcaaatgactatgaaaccattgcagcatgcagtagtgatattgcaacataaagaatgcaagataaactaaagaaaaaaaataagtacttaaaaaaaattctctgcaagaaaacaagggtaggcgggtgtaatgacacagtgactatttgatggttgatccctttgaagaatcacttgagtagaaaagtgtagaaatatacttttcatacccttgaataagtttaacaagatgtggatgtagctcatcgtctcgtagtatgtgaatcctcctagaaataactttggctgatctaattgtaatgttgattctggtgagcagtgtactaattgaggcccgtgtagaatcaattttatatggttctgcaccattgtcgtccaactctttcaggcgcttccattgtttgtcatatgtgatcctcaatttttcttcctcctgacaattaatttaaacaaactgtcaatgcgatgctcatgaaaaatgcaagtcacgagcaagtgtcactctatcattcagcagcaatttcttttttaatgagtaattcagcagcaaaataaattcaacaccacaataggacccttttaattatatcaagataagcagtgcattttgagaaaacaattttgacagatgaagaatattacataaaagtataggagaccattatcagccttgtgatttgtatgttttgagagtaacaagaatttatcaagacatttcttataactaaagtaccataccataatttccttatgaagcctcttctcccacacgtacaacctatccattactgaagaaagagtattaaactcaatatcactggcactaccaattctttgactcgaattatgatttcttccagatgcacttaatgctgtctgctccaaattctccacagggggctcagatacagaagaaaacaacaaggcaaaggcccccatcaaccgcgaaaataccactgcatcaagtataagtgacaaagtgtttaactgagtaagaactgtctctggagaaaatgtgaaaggaaggtgggcaagaaatcgtgtcaacagatcaatacaatcagaagaaagcacatacgctacacaagatctctttaatgtagtactatttgtcagtgctaacttattagttataagtggacttgatcttgcattggagtctgatgctgctagtattcagaattttcttgcagtgcaatatgtgcatagcaatcaaatgaaatgaaaagaaaagcatatactcacatctcacaattcttctccgaggccggtaccgcatacttccgacctcaaggatcctagcaacatcgtctccacaggcgaccacagagttgaactgctcctttatctcattcacaacatctgcaacatcccttgtgccgaagttcttcggcagcacatcttcagccactaccatggacgagtgctcctctgaggccaccttcttcaccatccttggatcatctccagccggcgccgcagttgctgctcctgctccggcattgccatcggcatgatcacattcacagctgcacacactctcctctccagaatcaagaaccgaagcactccccacactctcgatctcgcactccttgtgctccatcgacgccgtcttcgccttggcattcactgcatcggcattgtcaatccgggtggacgcggtgctctccaccgccttcctcgccttgatcgactccctcatcgactcctgctcggtctcctcctccagctccggtatcccctccctttccctcacctcgctcgagttggggctactcgtgaacgatccattggcatccttgtactgcggaagctgctggttgtagtcgtaggagtcaaacgggttgaagaagtcccagggcgagacctccggcattggcatcggcggcggcggcgccggtgccgccgccgccgccgcctcccgggcacgatcctcggccagccgttccccatccgggggcaccggaatgccgtacattgggttgctgtacccgtagtcgtacccgttgtaggagacattggcggcgaagttgccgtagccgtacggttcttggtacaccgtg

SEQ ID NO: 27134 - DNA, 11845 bp, Oryza sativa
gtggtgctgctccgcgaaccgcgcgagcgcgtccgccacgcgcgggagcgcgcggaagtaggcggcgtgcgcagccgccagcgccgcgcgccgctccgccgccgcgcgcagcaggtcccgccgctccgggcagagcgcggccaccggcgacgcgtccgccgcgtccagccgcgagctcctgcaccccatccccggacaccaccctacgccctcgccgtcgacggcattgtcactcactccccgactggacgagagaaaaaaaaaatgggcgggagcgcggagcacgcaacgggacgaacaccaaagggtggcgacttggcgtggcaaaaacggcgcgcggcgcgcgacgccgaggcgaggcgagaggagcgtggcggggcgcggcgcgagcgtgacacgggcacgtggaggcgctgcgagagcgtaccactccacggtttagtactactactattattgaagcgaagcagcaaaccacactacacaaacccacactggcgctggatgcagtggcagtgggcattgcattgcacatcacgagcaatcaccggcacgatgtctcggggacagcagaggatgggccattgaatttgcacgtactgtacttcatgctcggtaatttttgggtgctgtaactggatcgtttgcgtttttaccagcttatggcgtattggtatgtgctggctagattcaccaaatcattttggttgaggttgctgtcactccactgtttgacgtatcgtaaaaaccgtatagttaccgtgagacatatgatggttttaaaaactgtgaagattattgttcgtgataaccacacggtttctgtaaatcctggcgctggcaggatgtcacttgcatcgcagcatcatgtacagtaggcgtaaaatatggggactgtagcaaatctggggcagtaatcagtaaatcacacctctgaatgctcataaattcattcgcttatcaagtctttgagtgccttttctgggactcctgccgcggcgatatttgagcagcagtagctgctgtaaaattctgggtgctctggttgaagttgaacacggcgctctgctcactgttccagatagtactagcgctccgtcaccactgatactactacactgaatgcaattatcggaatcatgatgcagtagtactgatgagccacagatcaaagataaccctgcaccggatgtgatccatatcgtctaattaatcttcagatttcgcatttaaaaccctcctcatcctgtagaagttcgtaacagcaagttttagagtggaggcacctctaatttaaatgataacatctaatttttaataattaaaaggtaacaagtactcctcccattgtcccgatttgttgtcttatatatagagttatagggccggttcactttgatgccaaaaaaaacttaccaaattggcattgccaaaattttggcatagttaccaaaattttggtaacttgccaaaattttagcaggatttcttatatagttatcaaaatttgacagcaaactaaatgtagccactttttgtaactttaccaaaatttggtaaggttggaaattgcatcaaagtgaacaggcccatagtccgtcatagtcccatctactctcttcatcctaaaaaaaccagtttgaatctggacatacactgtgtccatattatagatcaggattagattttttttggacggagcaggtatgttggttttattttttgaacggagggagtataacatattaaatctaatacacaaacttttatattagttcactcttacacatcttttattttgtagagactgccccttatataaggacagactcattttttttccttaacttccctcctctattatcatctaattttatgtgataaatttagagacaacatatagaggtttataggtttatagtacttgctctaataaccccctggtgatcgtcagagattgtctctcctcactctacacactcacgcgcacggagattgcaacagcacatcgaatcgcccattagattaatcgaatggatcacatggctgcagcctaattaaagaggatcggagcgcatcgaggactgaatgctcccatccacggtgcactactgtttctagattctgacggcaccggattactgtagctttgctcgtagtatactagtactagcaagaaacggcagaaatgcttccgatgcctcacagactttttcctcttcttcttcctgctgctaatcccaaaggagacgcacatgccagccacgccgatcactcatggctctcctacccctcggccccctgctctgctactccgaaaaagggcagagaaaaacaacacatggcacaccagaggggagggatcgggataacgtttccaaatcgataattcgatgcgagcttgcgatctgtagggggaaaaaagaaaagaaaagaaaaacctcccagctgatgcgtgtgggattcagatctgaagaatggcgacagcaagaagaaacctggccctgacagtctgactgcagatgagtgagagcagtataatagcagtctataagcccgctataaatatattttaataagataatagagaagagagaagagtagcgggctacagatatgtagtcagctgcagcacggactccaaaacatgatgtgcgtatgacaggtgggaccagatattaatagtatagcaagcaactattgtatgaattggctattagattggttatagatgaattagagttagtagtaggctgtactgttagaacttgctctgatgaccatcagctaaaagctcggtttggaaacgtgtgttttggtttaccactgttgctagtaggcctcttacataattaataactgtgctgtttagagcacaaagttacgggggttagggataagattaaggagcccgagacatacagaacggagagtagtagtggcagcagtgcagcactctcctacccgtagctatactatagaaaaatggcttggaaaacaacggaggcatgtgacctgagacgaaagcgaggactttttgtcttcaccaccgtgatgtgcagcccatctctctcgtctcctcggagcacgtttgtttatgagtcgttctcgcaaagacgagagagctccgtacgtaccagtggcttgccatgctgctgctgcagctgcatgccacagtgaccaactcgccatgggcgacgacgacaagggcgcaccaatttccgaggcttggggggtgggggcgagtggcaaaaggctgtggcgcgacgatgagatcccaaggacagggacaggtcaaagctggctttgacggatcgggccggtacgtggtgacactgacagtgtgagggggtggggggccccacgtcaagtgccattatttgtggtttttttgtactcgtacgatacgatcgcgctcggtccttcgctgtcgcgtcacgttcgtactgtaggagtacgtactacgccgtgtgcctgggcgacgtttgctgccgatccatgtaccggccggagtactgcgggcaacaggcgctgtttgcgtcgtgcgtttcgggtactactagtagtagtagtacgttaaaattggtaggagtacacgtacgaacagtgcaggcacggggctggacactgtctgtcacgtagtactacgtgcgcagacgcagaaagaaacggagagtgcgggtgcacggaacgcgtaggtaggcgcggggaatcgataacggtggccatggccggccatggcaacgggggtggatgctttcgcagcagcggaggctgatgcgacgacgtacgcgcgccgtatgtgcagcctcgggccacaggttgcctgcgcgttgtgcgactgtgcgccccgtggtttttcccgtcgccgctgtgcagcagcccgtgcatacccaagttcctgaactctcggaaacaaaaaattttcaaatactaaaactttcaaattacaaatcataaaaatctcaatcctaaaatcaaaaattttcatctaaatattcaaatgctcttctcctttagcctcaatcgttgttgcttcatctctcgagacaccaccgcatggccgcatatcccgcatagctagggttgaggagctatggctaggagagagaagaggcatcgcacggctagagaggaagatggggagggaaggagaccaaccggaacagagatggtgatgaggatgatgacaaggacaacaacggtgacacggtgatgtagtgggtcgatggataatgatggagacgttctcgctctaccaacgccaagaaagagggagcgaatagagaactaaaagaagaggaatcagtcaacttattcttttcattgggctaggcgtgggcccaatgcaatgcaatggtattaagatgaatacccaaaaatatttgataaaataaaatatgtttatatagtatgtgatgtatatgtgtatgaaaaaacaaaaggataccatatatattcaacaaagagagaccatatatctattatctatttctattatacctactgtttaaaaaataagaggtgtatccatcgtacgtaaaaaaaacgggcgaaaaaaccaaaagaaaaagaaaaaaaaggcgaaaataagatgtttcctttgtccgttaaaataaaaaaagtagcgaaaaaaacccaaaataaaaaaagttcgatccccctgtaattttcgttcgtttttttccctttttcccgttttattttcttttcgcgtttcttatttttttcagcgtttttccctttttttttcttttccttttttcgttttattttctttttgccgttttttcccttactttttttctttgactgtttttccggttcctttcttttatcgcttttttttgcggtttttccatcgggccaaactctaccgccgccgccacgttgatttgcctccctatatatttcatcctccaattcattgcaaaaaaaaaaccaattccccgctactctcacatcattttccccttgaattcctctttcaattcggctttaattcaccggattgaatctccatttaatcctcgtcattttttatcccgagttttacagattgcttcgattttgattaaaaaaacagaaaaaggaggttgagtggatcaaaatccctcaacaatttttggagatggagaaacattcgaccaaatttgatggagaggatcggctccgttattgtacgggcactagactatgcaagaacaattttggagatggagtaagattcgaccggatttgatggagaggatcggctccgtcatcgtacggacacgggactatgcgagctcgagcggattaccggatatgggaggagctcgagcggattaccggatttgatggcaggatcggcttcgtaatggtacaggcatgagactgtttgagctaggcctacagctccactcgtgggctgagccgaagagaggtagatcgagcagagagaggtagcggactgtgctaggactggagctgaaaaggaaggaaggaataagcatctggtctaaaaccaagaaagtatcgggtccaaaactaagggagaataatgtataggataaaaaacgtttttacctgttgcaacgcacgggtattttttctagttcaaaatataatacataagtagcttttaactgtatttttttactccatcacactttaaatacacaacctgctttgtgcagatcgttcagaaaaaagaaaaacacgacctaacgatcctagggctgccccttgccccctgctcccagcaatatgggtcttatgggccgaaccgtgcgtcggcaacgaagctagcgcgtctgtgtgaaataggaataagttcatccgaggtcccttaacttgtcaacgaatccgattttcgtccttcaaccggaaaaccagatacaacgggtccctcaactatcaaaaccagtgcagatgagatccctcggtggttttgagggtggttttggctgacgtggcgcctacgtggcaaatttgacttggtcttcatctgatatggcattgacgtggcgcatacgtgtcaatttgatccggaaaaaataataaacttcgtgggacccacatgtcagtctcatacataaatcaataaaagaatggtggggcccacgtgggccccacaagtccctctcggctcttgtttctcttcctcttcgctctccctcgtcctcgcggggagcggcggcaggagcatgccggcggatggagcggaggggcattggggagccggcaccaggccgcggaccggtggaggttgccggaggaggaagagggcatatgaggaggtccgccggcgagcgcaacagctacactccgtcagccgttccgcccgcgatgccaaaccggacggtgccgcccctcctcgctcggtacccacacacactgcctccctcctcgcccggccgcctccgccgacgtcctcgatggtcacatccgggtcgaagccgcgcgtcgcctctcttcgctgggccgtcgagcaccgcttccctcctcgctgggcccccgagcaccgcctccctcctcgccgggccaccgcgcgtcgcctccctcgccaggccgccgcgcgtcgcctctcctcgcccggcccccgcgcgccgcctccctccttgtcgggccgccgcgcgccgcctccctcctcgcccggccgccgagtgccgcctccctcctcgtcaggctgccgcgtgtcgcctccctcgcccggccgccgcgcaccgcctctcctcgccgggccgccgagcgccgcctccctcctcgccgggacgccgagcgccgcctccttcctcacccggccgccgcgcgcggcctctcctcgccgggccaccgagcgccgcctccctcctcgccgagccgccgcgcgccgcctccctcctcgtgagccgccgcgcgtcgcctccctcgcccggccgccgcgcgccgccatccctcacccggacactgcccggccgccgcgagctgccatccctcacccagacactgcccgccgcctcggggatgggagaagggggagagaggaggaagaagaggggctctagttgaagagagggagatggctgagaactgacatgtggggcccaggtgggccccaccattttttattaatttatgtgtgactgacatgtgggtcccacgaagtttattatttttccggatcaaattgccacgtattcgccacatcagatgaagaccaagttaaatttgccacgtaggcgccacgtcagccaaaaccaccctcaaaaccaccgagggatctcatctgcactggttttgatagtttaggaccccgttgcatctggttttttggttgaaggatgaaaatcggatttgttgacaagttaagggacctcagatgaaattattcctgtgaaatatgattcccgcatacgagtacgagatacgatctcatcctttggtaaatgatcttcttgtgagatgtttaagatcatcagatttttttttgtttccttagatcaaagagaagatcacgatcacggcgggcagtgacaacaaacgactaggcccacgttagcccatctggcacagcacagcccatacgacgaccacacatcaaaaggaaaaagtacaccgaaggtccctcaatttgtcatcgagttacaaaatcgtcctccaaccgcaaaaccagatatccgacgtcccttaactaatcaaaaccggttacaataggtcttccagtgattttgacccggttttatcctacatggcggctgaatcagcatgagacccacgtgggacccatatatcagcctgccacgtcatctctctctcccatcttcctcctcctctcactctcttactcttctcttctcttctcatgttctctgggcaagccggggaggaggccgccagggtgaggccgctggggaggagcacgtggggagagcgaaggaggagcttggagagggctggctgtctcctcgtccgacgcgaggcgccgcggtggcggcaagcgatggagggcggtgggcggcaggagtggagctgggcggcggcggcggctggcgggagagggcggccgccatggcctgccgcagaggtggcccgccacccacggatgaagccgagtcgtggctcctcagggtggcgacgtctcgcgctgtcgcgcaaggtcggcggtaaaatagctatattcagtaatgcttgctcatcatacgattctactgaatatggtttcaaattgaacagcatgaaggcagcaaatctcctatgcttcaaccccttgtcgttgctgaatcttgttatttcaccatgctactcattagctaaatagctagttcctgtgagctgttgtttgtcaaggttggcatggtgcacagtagctactagctagttctagacgattttaatttcttgacggggaatattacaggtggtgtttgaatttcatgaagataaagataaagtgtttcacgtaaaacgaggtggtaataacgtgtgattaattgagttttaattgttacaaacttaaaaaatatattaatataatattttagagcaactttcatatagaaagttttcgcgcgaaacataccgtttagcagtttaaaaagcgtgccacgagtattcaaaatttcatccaactattatggttgtgtttagttcagcgcaatggattttggttgaaattggagatgatgtgactgaaaagttatgtgtgtatgacaggttgatgtgatggaaaatgactgaagtttggatccaaactttagatctaaacacagcctatatgatgaagaagccgagaacagatcagattatagtagcagtatggaacagtagttgtgagatatccaccttcccttcctccttttgactgaagtagcaagggactatcagattatgttaaaaagtgtgtcacgagtatctaaaatttcatccaattattattggagaaacgaacacagcctatgatgaagaagccgataacagatcgaattatagtagcagtatggaacagtagttatgagatatccaccttcccttcctccttttgactgaagttcaagggactatcagattatgttaagatgaaactacttactccctccgtaaaaaaaaagagacaaaccctggtttccgtgtccaacgtttgacagtctgtcttatttgaaaaaattatgaaaaaaataaaaagacaagtcacgcataaaatattaatcatgttttatcatctaacaacaataaaaatatgaattataaaaaaatttcatataagacggacagtcaaagttgggcatggaaacccagagtttgcctttttttgggacggagggagtacatatatgtttttttttttgaaaatgtagttaaaactacctgcttcctcttttttagttgacactgttgatttttgacttgcgtttaacaatttgtcttatccttttctttaaatgcataagatataaatcataattaaaatatttttagtaataaaataacttacatcaaaatatgataattatgcaaaaatattaataagataaatagtcaaatgtgtatccaacatcaatattatcgtggtatatgtatatcataagtacgttgtctgttcacgtgatactctaccagactatcacagagacgtataacagataacatgcaaggaaaattaataatcgtgctacaggctacagtatatactgagcactgaacagtgagcatgccttcatatattatcaggacgatatacatcgttatcagaaaagatggccatgccaactgtttctgaataaatctccgttatccattcaaaaggggcaactgaaaactccagcgagttgatattaatattgcgaatatacagtgaatcgcgcacgtgcagttagctagaagatggagcaatgagtcgatgtccacttgccataaattaaaacatctctcttcgtcacatatatgaaccataaaccaaccggcgaacaattcaaaccatcaagttctgctttgtacttctgttagtttttgttgggtcaaaaggctttcttctgcaaaaaggaaaaacgaaagaaacgtatatactacaaattcctgatcttgttgtcatggtgatgtggactagaaaaaaaaataataacaggataggctcgaatgatcgaggagtgaaatgaagatgtcaaactcaaacgatgagatcgatcgcttcatcatcaggccgtataaaaattggacactcggcctggcgttacgttgaatttatgccagcattggcagcttcaagttgaagcgatatacagtgcttaatttcacaagcaaatgatggccaatgaatgtcgctgtgacgagttaattccggcaaataattatagagatttcgttaggtacttctacagcgagtactaatttgagttcgatcgccacagcattgggaagaagagaaagcaactgcagctgcaaagagagaaataattaatagccgtacttcttaagcttcattcagctggcattcaagcatgacacgtgaagtacttgttcatccacggaaaattttgttcatgtgaggagagaatttcgggagaaggcgtttggaaaatgttgcttgcataatttgacaaagactttcttccggagaccctttttttttattacgacatgtttgcttccttgtatcatgcctccattctcttcagaccgtgtggtctcttgagatggtttcctctcctactgccaatttcgcacgcgaaagaacaaagtacaatctccgtttgaaaaggtaaaaagcaattacaaagaacaaatggaaattcccatttgaaaaggtaaaaggaaaaaggaacaaatcaaagtctctatatgaaaggtaattaggtaaaccatgtttctgttggaacttgaaaacggaattcgcaatttcgatctaattaggcatgttcactgtaagataggaatactagtaaccacaactcactttatcctaaaataaaatataagacataactaccactaacataaaaccaaaaaatgattgctatcactttatcatttagataatcttaataaataatatgtatttaccttattttttcacgaaagagatattgagggtggaggattttttttaaaaaaaaatgttatggaaggaggaattgttacttaattgcatgtatatgtgcgtgacttacattataaaacattgaaaaagatagttgcattgtatagtttgaaatggaagggtacttattaaattttattatccttaaaggaatattccctcattggattcttcttccttcgtcatctttcgtcctaattaggttgttatattttgataggaatgaagtaccttctattttattaatttcaaattttaggcaacgaaatctgaacgaagttgtgtgacccaaactgtcgacgtttgatgtcgcgattccggtatttgcatagtatggggatcgttggtactaggatatatgcgagattgtagtaaaaaagatggggacgaggatttttatacaggttcgggcctctgaattgtcaggtaataaccatacttctattggctgaagccagtcgttgctcttattcaccatgatcacaccagtataatatttggggtagcctatctaactgttgtcgacttggcggtctgaagtgctgactcgcagtcgacaacagggtagcattcctcctcgaatccgcatccggcgaaattaaagacagcgctatgtctctcctgacagtatccgtagacatcttaggggactagccatgcttatctctgaagtcgatatccggcgtcttgtcttggcgcatgttagcttgtatgttgatcttgtgttttgatctattgttgcgtcccccctctcctcctagggggcattgtatttatacccatagatgt

SEQ ID NO: 27135 - DNA, 6342 bp, Oryza sativa
cgggcgactgtttaagcgccggctctacttgcactctaaggtaagtttgagcaattccagtaattcattgccatgcactgccacttatgttaggagagagagtgcatggcactaggaggaaaatgattgtttaaagaataatgcttttattactatggtatgactgcagattggagtaagcaccgagctgtactactagacttgctctaagagcaggtacaatagcaggctataagccagctataaatatattttaaagagataaaggaagagagagaagagtagcggactataaatctgtagtcagttgtagcacggactccaaaacgtaatgtgtgtatgacagatgggattagatattaatattatagtaagcaactattgtatgaattagctattacatcgggtataaataatttggagctagtagtgggctgtactattaacttgctgccatcagacaatctgggaggatatctgcaagcagcgatttggtgatctctgcaaggcaccggagaccgcgtaccattggccatcagacaatcaggcgagtacttgttcatgtggagcatggagatccacaggattatatatttcaacatgtttgtttttgccgttttgcgtccatttcatcatggtcataagctcatggacggccatggctgctatttagttacccgatattgcttgtggccaacgaggaatgcatatttgaaaaggccacaatttctaacgcgataaaaaaaaaacctcctcaattacttacttactctactgatgctatgtaaggctttgttcagactaactgtatgactatatttttgataaattcagacctcatttgtgttagtgtgtataaatacttccatgcagtcttcatcttgaaaggtactacccgatcgagctgtgtctagcctgtgggcacaccccccaaggcaatctttttttaaggcccactgcaagttgtgaagcgatagatagcaacaccaaatataaacacgagcaattttcagatatttatgagcagtttttgggatcgattcaattgcatgccggaaacgtgtgctttgagaagagcttcccgcggaaaggcgccaaaatcgcccattcctcctgtgcggataagggcgttggccgttagtgcaggacactcatatatatgaggatcctccttacgagctaccactagaacggatacccttatcttaattaggcagtaagccccatctcaatcgggcacagcgtccgtcacagactagaagtcactgatgtgaagaattatctcaatcgggcaaacggccgtcgcgaatgaatatatctcaatcgggacctaagtaaaacccgtcacagatagctttgacccagacgaccagtcaaactatagcccgtcacagatgacctatctctatcgggtcacaactagcgcccgtcacagatgactactaacctttatcgggcctaaactagagcccgtcacagatgatactcatctcaatcgggcctaaactatagcccgtcacagatgactgatgacctcaatcgggcctaaaatagagcccgtcatagatgactactgacctcaatcgggcctaaactagagcccatcacagatgactgatgacctcaatcgggcctaaaatagagcccgtcacagatgactactgacctcaatcgggcctaaactagagcccgtcacagatgactactgatctcaatcgggcctaaactagagcccgtcacagatgacctcatttcaatcgggcatttagttatggcccatcacagatgactataatacacaaaaaaaaataaattttgttttttggctagcctcagacctttgctagccatgcccgctgcaaaaatgacagaaacaaacacagatatccaatatccctagctccccagcatcacccattcatatacatatgcattcacatacagagacatcaacatatttcacacaaccacacattcacagccatctcatatttcacatccattcacatatttcacatccattcaaatatttatcatgtttcacctgcaaaaccgagttaattggatcaaatatttatttagcaagtcttaacataaacatatgaaatatatacataaataaaaacatcacagttacatcatcacagttgcataataagtgttcatcattgcctaaacataaaagttcaacattgttcatcattttagtttaagcctaaacattcctttggggttaattatttcgcggaggatgaagctggctatctcctcgcgaacctcctcaaagctggtaggcagagacttggttattgtgccctacattgtcataattccagattagttgatcgatcatatataagtactaaaatgtagttagtctatcacaattgagaccaccgacctcaaactcaaccaaagtcttcaccttttctctatacagaaggcgcatgttgtggcacacatggaatccacactggtcacctatttgttgcttcactgggaagtcttttttgtggatgagggtgtcatgtcctgtcttcctgaggcctcctctttacacgtattgggcccacgcttcatctattgctagttgaattggggtccaatcatatgcgttcttatcaattctggagttcaggtagtgacatgtactccacttaggtgttatgaccagaaggatccaatgggcactgcggcattaatatagtgaaagttaattaagtactcaagaaatgtgtcatgctgttgtgtatatttagttaacacacttactattgattataggcgcacataatgtactccttgtctcggcgggaccacaaggtgtcgtagatgtagttgaccattccttgacggtcattctggagatttgtgacagtgaccacttgtggatcaaggaaggcaaattccggtgcatgcttctgacaccattgccaacttaacctacacacatgataaacgatcttgtaagcaagttaaaccgattgttattaccagattgagttgggcgacaatacatacaaggagtagcacttaaggaggcttgtgtccaccgctcggagcctgtagaggtcgaaaagatccttgaagtcgaccacgatataatttgttggaccgaggaatggcttttcatcgtgctctccaaggatatcggtagctttacttagcttcctggcgttagatttctccatgtagtataagtgaaggtccttgcaagcggtgcccattgcggcaagcacgtcatctccaaccaatggcatgcctagttggaactcctgtggagcgacatatttcttcttgacctctttgcccttagtctcttcctggcccttgcccagatctagcttccttggagctagaagcgaggcctgcacctctcctccccttcctctcccctttgcttcgggtttaacgagagtaattctctgaggggaagagtgtgccttcctgctcttcttcatcggtggggttcatgaatcgccttgctgtcggcctccgttcggtcctccccaaaatccgtgtcgtactgcaactacacatcgtaagattgtgcatgacgatcttgagcaggaggggctgaaggagcagaggcgggtctctttggtggacaaccgcctggtgcagtggttggcctcgctgtaaccctaatctcaatgagatccttgggccattggatgaaggtaccacgggcatttcctagtgagaggacctcgtcgttcggtggatacttcagagggaacagcttgtattcgggcttcaccgagtcgacttgaacttttgcacagtcggccctgagttgcgctccatgcactcttgtctctggggtcggcttgtacgcaagtccctcggttgctggaaccgtgaaggtcggcatcaccctaactgtgagggtgcagctcgttggttcctgcgatagattaatcaatttttttagaatattatatatcatatggattcgttaagtctttcatgtattgagtaagttcacggttaccgttatgtggtcgacggcgctgtcgaccgatgttggattttccgccaactcagttgatgcgcaactgctgcgtttttgggtgggacttcctaactcttcgtgcgcagcagcagcggcggcctgggggttctgttgctcttctcggatctcttgcctaatcttggccctcatcgactcgagcttttcgtcgaattcagatgtcagctcagctcttatcgacgcccggatcttggcttcaaggtgtgcatctttctccgccttgttggaagtctgcttcttgtactgccacgcgtagtctggaaatccatacttccagggaacagaagacccaacgccccgtgtccgtccacggtgttccttgttgcccaacgctttcatgaggaggtcgtcctcgcgtctttgagagcaggcctcttgcgaggtttgttgctcggcaaccaactccttctacattacaatttagtggggttaaataaacagcacgatgggaaacaatgcgaacatgtagtttgactagacacttactatagcttcgtatactcgttgatattctgcatttggcatgaagattgtgccatcatcattcttctggtacctggccctggcccagttcctagcccgagggtgtgggatatcaccaaagacgagcggtgtgcacgattcctccgcttcttcatcctcacgctgccattcctcttccttaccggcatatccgaaggtgccaagccggtgcggatgctggttcctggtctggagcaagcgatatgcctcgcttctagctctggactcggaggtcgacttcttcgcatggaattcctcccagacctgttccgtgatcgaaggaaatttctctcttggatctggattcgccgggttgtagacaaactcgccgactagcttagtcttgaagttcttccaagcattgcccataaccttgaaagcagcccgcctgagacggtcctcatgctccgcaggataatcaaagctctccttgaacgttagccaagcaatgtccttctctgcggccggcacgagcttgatgtcatcttgcagaatactgaatttctgcctccctatgaccccgcagatagacctaaatcggctcaatattttccttggagatgtcaacaaccctacggcatccaccgctgttatgcggaaccgttccttagggattttgttccctgtcctaggagtacgtgcccttgaggacccactagttgtcgttgacattggttcgccttgctgagacaccatctacttttttttctaaataacaaaaatgcacaattgaatgctacaatctattacaatgaatttaatgtcacttagaaaaataactgaaacatataaataaactgaattgcgcatctcacagtaataaaacgaaccacatttcatctatttactaaattcattaatgcaccatgtataaataaatgaaattgcacatctcacagtaataaaattaaccacatttcacaatagtttcattgatgcaccacatttcatctcaacataaataaaccacatttcatcccaacataaaaaaaccacatttcatcccaacataattcataaatgcaccacatttcatctatcactacaatcatctatcacaaaattcataaatgcaccacatttcatcccaacatcgacatgtctcactcatagttcaatcacatatcatccacatccacatttcaatgacatgtcattcacagttagcagagggcggcgcgatggaggactcacctgaggatggccggtggggctcggtggcggcggcggcgtcgggctgggtggagggtgtcgccggtcggtggaggcggcgttgggctcggtggaggcagcggtctcggtggcagcggcggctggctcggcaaaggaggagtttgcggcggcggcgccgggctcggtggagggcggcgccggtcggtggatatgccagtcgggtaggtcggcgccgggcgggcggcgtcgggctcggtgggggtcggcgacgtgcgtcggtgaggacgcgggcggcgacgacgagaaaggccgacaccggtccggtcggtgtagaggctcgagggaggacgacggcggtggcggcgggctcggtggcggcggcgccgggctcggtggagggcgtcgccggtcggtggaggcggcgggctcggtggcggcggcagcgggctcggtggcggcggtggaggtctcggtggcggtggcggcgaagtaggagttggcggcggcgctagggttctatggaggcgggaaactgtagtgggacttagaaaaattttcgatccgatctgagaaacccaagatatagtagagtgatgagtcatctcaatcgggct

SEQ ID NO: 27136 - DNA, 2858 bp, Oryza sativa
  unsure (1)..(2858): unsure at all n locations
agcccgattgagatagattaatctatatcgaccgtaaacgttggcccgtcaccgatgactcattttccatctttcatttgttgtgagtgcaaaatatatagctgctgtataataattcattttattagtcataatacattttcggatagtaaatgatttcaaatggaaatatggtcaacaacaaagttgtagagcctttcaagatctactggttttattttggtcatttttctatataatttttttcccaatagtttgaaattgattttgacaatatgataaatctaattaacagcatttgtaaatactaaatgatttcaaattgaaatatggtcaacaacagagttgatcctctcatcatgatctacaacttttattttggtcatttgcaataaaacaaaattaaccaaattaatgactacacatatcaagtctttgcaataaaacaaaatactttattcattacaatagataagtacaaatgcatcagtcacaaggttatgccttccgtatgatctgaacgagcatatgccacaggctcttggggatcatcgtcaaggtcaatgtgaggtcttacatgaagattatggttgtattcttcttcatcgacgatgttgtcaactcctacaattcggcgctttccatccctcacgatgtgcatcttcttgtttgaagggtcttttatgtagaatatctgctcgacctgtttcgcaagtacaaatggttcatcggcgtatcccaccttagatagatctactaaagtgaaaccttccttgtcggctttgacaccagtgcgtagattcacccaacggcagcgaaacaaaggaaccttgaacttgacgtagtttagctcccagatctcctcaatgcggccgtagtatgtgtttgacccaacttgatcctggaatgcatctatacggacgccgttgttttgcactgtgcttttgtcatcctgtttgacggtgtaaaatgtgtatccatttatatcgtatccatgccatgtgtctacgatccaagacggtcccatccccaacaactgtactatctcatttgggacatccgtggacattgtcacacgattcttgaaccattcgttgaaccgagaattatgttctctgttaatccatgcatcagatcgccccaaattctcatctcggattttcgctaagtactcctcaaagtatgggccaacttctgccatatgttggagcacagcgtaatgagcctgcgtgtacgacgcttgatcaggcctaattcttttccttccgattgtgccaacacctgacaaccttccctcgtgacgagatgtgggaacaccgataggattggcatcggacatgtaattgacacagaactcaatagcctcctcggtcgtgtaaccttcaatgatgctcccctcgggtttagctctgttacgaacgtacgacttcagaactcccatgtacctttcaaacggccacatttcccttagaaaagccgggccacatagttttgtttgcttcaccagatgaatagggagatgaaccattatatcaaagaaagacagtgggaaaaacatctccaggtgacagagggtattcacaatatcggtctgcagcccatctagatcttctggatctataaccttctgtccaattgcattgaagaaggcgcacagacgttggatcgtgtgacgcactttcggttatagaatgcctttgatagcaattggcaagatttgtgtgattagcacgtggcaatcgtgagacttcattccaacaagttttagatcgtccaatttaacatacttacttatcctcgctgaatagcccgatggaactttaatatccttcaagcatgataacattgcgatcttctcatccttcgacagtgtgtggcaggctggagggaggtacactttacctgtctctgcatctcgtatggactgaagttcactatgaatattcatgtcctgtagatcaaggcgtgcgttcaacccgtcctttgtcttcccggaaatattcaacatcaggccaaccaaattctcacacacattcttttctacatgcatgagatcaatgcaataacggacatcaagatctttccagtaaggtagtcgccaaaatatggattttttcttccacatacccttctcctttgtcttgctacgttttcttttcttcccaaactcattgcttatgtccttgaccatattgtggacctcatctccggacaaatctttgggagcaggctgaagttctctcttaccgttaaaaattttcttctttcttctaaatgcgtgacgtagcgggagccacctccggtgacccatgtataccatctttcgtgattttttcagccaccggcttcgtgtatgttccttgcaatcggagcatgccttctttccttttatagtttgtctggaaagattaccgagtgcagtagtcattaatggtgcagaacaatagaactcttagcttgaagttctcctgaccatatgcatcctaagtttccacaccttctttccaaagaatctccagatcatcgataacaggctccaggaatacatcgatatcattgccgggttgccttggaccttggattaacaagcacaacataatatatttttgtttaaagcataaccatggtgggaggttatagttcgcaataagaactggccaagtgctgtgagtactactcatgtcaccgaaaggattcatgccatccgtgcatagacatatcctcatgtttcttaaggagtccgggcccnnnccaaagtctttggttttcgattgatattccttcattcaatcgaatccgctgggtgtctaagcataccgtctttccttctctcgcgggcgtgccaacgtactaacttc

SEQ ID NO: 27137 - DNA, 3998 bp, Oryza sativa
caattgttcacctatgtctccagttccaggacccaatagcaggaatcgaggcctcgagaggataatccgcgaaaagccatggggaaaaggctccaaaatcgcggagcaatcgaaatgaaagccgaaaatctagggaataatcggagaccaagaggctccctcggaaaaacagcccaagaaagaaaccgagttccagacttgcataggtaaatcaaagcttagccagctcctccaattcatcccccacacaaggaatgaatccatcctcgcggaaaaatattcagcaaaacaaaaaggggaaaatcccctccaaaaaaaaaaaagaccagaacaatcaactcacccagtccaaagcacgcggcgcgaggagccgaggacccttctccctatctctccttcccggaccctgcggggcggagacgccggcccagcttcgggcctcccgaccccctcctaaacgcgcgcggaggcgggaggcggagggggagggcggctcgatcgggggggggtggacgcggcgagggccgagaggaggaaggcgagcgaagctgtttgggtgggcgtggcgtggcgtggcgcccgcgcggaggtggacgcggctcgcgaggcgcgagtgcccggcggatgggggcgaaatctttttttccgctcgtcctggggcgtggcgcgggatgtggatagagacgacgacgacgcggcctcgcgggcagctttgggctggggcggcacgggacggcagaggcggaggtgttttttttttttcttttcttttaactcgtgtgtagtgaatgtgatcgtatcgtatcacgccaacgcgacctcgtctcgtgctatcgagagggcagcgcacgtgacatcgggagtgtagcgcgccctcgtggcggagcaaacaacgacggaaacgttctagagtactccttcgtcttatattattattagtcattttgattttttttcttaattgaatttgtttatattttatcaagtttatgataaattgtagtactttctcagtcatataaagatggttgttttgcaatttataagatgtcccaaaaagtttgtcatgttagtttttcaaggtcattagtacttctaaagaattattctggtccacccatttgaattgagtgcaagtaaacaattcattgtttttctcaagcattcagaggacaacgataaatcaagggcaatttggtaatttatgattgtgggctaatttgtatcaaaatctttaagcaaaatttgctacaggacaccgaaagattgcgacctttattgtgggacactcgaagatcgtgtatttgctcgtggacactaaaaaaagtggtaattagctactagacactcctcccattattttattatttacggtcaaaatgaagagagaaactttggttaaagataagtttgcccatggtcccacttgtcaatctctctttctctattcttcttcttcctctttctcggttcatctttttctcgttgcgccaccgccgagctgccgagctccgccacggctgagccgtcgtgtgtcgtcgccgttccgtgagcactccctctccagcctcctcgctgccctcccctccagcaccgcgcacgtcggctgcctcagcctcacccaccggcacactcctccgcgtcgtcaggaaacaccggcaggtccaccactggcgccgtggggtgcaccgcgcggggcgcggtgggcacgtacgcggcgtatagccaagcgggagcgtgggggtagacacgccgccgtcgtggagtgcgtcgcgccgggcacgccgcctcctactgccgccagcagcgcggtgggcgtgtatgtagcatatagccaggcgcgagggcggggcaggatcgcagccacggcgggagcacgacacctccggctgcgccccaacggcccgcgccggccgttgcaggaagcgaggacggcggggaggagaggcggggacggggtgagctggcagacggaggtggccgtcggtggtgaaccccggcgatgcgccgctgccgccgccccaccgtggtcgagccatcccggcttaggccagccgcggtcgcgaggaagaatggggaaaagaaaaggagagagaggaagaacagtacgtgtctaggggcattttggtacttacacagctctttatctctccattttgaccggaaataataaaataatgggaggagtgtccagcaactaattaccacttttttacactgtccacgagcaaatacacgatcttcgggtgtctcacagcaaaggccgcaatctttcggtgtcctatagaaaattttgccaaatctttacaacgtcaatctttgtgggatagaggaagtgatatttgtaacacaatacaaacatatattatcaaaaaatatatccaataccaaacttagtgaaactaatttagtggtttagacattactaatttttttattaaatttgattaaacttttttaaaaaaccatatcgtaccatcgaaggtggcctcgtgcgaagcaaaggacggaaatgatatagagtaacataaatagtggtaccgttagaccattcacactatagcggtatggcatttggacttaaccatctatgcgggagactctcctccacgtacgcaattttccttccccaatgaagacgctcggatccctgtgaagaaagggtggctttgtcttaacgcatggtaaaagcgagaggagacagaaaggcgtacgatgggaaagaatgtcgaggggaaaaggtgatgactagcgagggggataggcgatggccagagtgaggagaggcaaatctacaacaaacttaccaggaggatccacgccatcgctaccatcatcggcctcgaagctcactggcaggagctgcctccgatccatctcgtcacgatacttgttgggatgatctactcgctactgggcccccctatctgatcgtcgtcggaccacactgccttcctagccgttctcccgtcggatcaacgtccagcactaccagatcgaggagaaatgaggttgcatagcttccgtcgatggcgaccttggtgaggaagacgaggtcacacagctcctatcgacaaggcggaggaggtggattggcggtgaaggcacatggttgacgctcatcaccacctcgccggcgcttgagtcattcgatggtggtgagcgagaagaggaggcggctgtgcacaagaagagagaggaggggaacagacggcaaaacaaaggagggggtggcaacggcgacctgatctgttcggcgaccttggcaacgatgatgtgaggtggccagaaaagggacatgagcaagattcagccagaaaagtgaccggaggaagaaggggatcatgatggaagagagagagggggggggaaatagaggagagggtggcacgtggccacgtgggttcaccagtaggttgagggcacatatatagacttttttttttgttgatatagggtttagattgtaaagttttaattaatttgctaacaaaaataatataaggactaacacgataaaagttaggtgctgaatctaaaaaatattatagagtagcctacattatggagatagtatttatatttatatatcatatatagttggaaccaaaagtttgacatgcatataaccccttttttttagagtaaagggcagaagctctgctaatttcatttcaaaagaaaagagatagtgtttttacaagcatgtaggttacaaaggatcccagaatcccccaaatagcctttggatctttcgcatgctttgatatcaaccattcatgtgtcatgtgcatttaaatcccacttagtgtagatgtagttattactataaatctaaatatctattaaaaccatacatatcgcctagataaattataagcattagatttctctcatgttagatacaagtatttctaaatttttctactgcaacgtgcgggataaccacttgtttttaagatggttttatccatgtactacctccgtttcacaatgta

SEQ ID NO: 27138 - DNA, 2814 bp, Oryza sativa
tattatattcttcatttatttcctttaatttattttcgtaatattttatctcactttcttgatctaatttttccataaactctgaaacactatgtcttctattatctattatatttctatcagatgcttctgtttctaagtcatctgtggttctgggtttgtaatttataaatctaatgctggtatttcctttactattttgataacttatataattttcaggctgactcaaagttttgctttcaattaaatcactaattttccattcttctcctgccctttcttcagaacttatttttaaagggctcatgaaagttattcccttagagtgcatattttcaatcacgtcatttacatttattttgtatttggaggcacttctattagttaatcttcctataaattctatgcttactagcaaatttgttcctttaaattcctcgtatccctttgtttgaaaaccaaaactcattttatctataaattcttttataggcatcattagatctggggctatatatgttatcaacatattctcattcatgtcaccttctaaaaatcctaatgctgctttatctattgtgtcccaccttttatctaacaaagttattaaaactttagctcctattttctttcttgtcatacctttgattcctattatatacataccttggtgaatatatttataccctgagtactttaatccattttcaaattccttggctacaatttttaactaactggctttgttaaaacgcttaactctacttctctagatattctgtataacccattattattctcaaaaaatcccatgcaatatattagttgaggtcttattgccttcagagtatctgtttgatatctttcgagctgtttgtctacttatgcaatatcttcaagctcatctatgtcttcttttttaccttttggtttatcaatacaacttaaagatttatcgtctctgcttgctattcttctaaacaaactcctagataggtccatttttatgaattaatagcttgagacgaggtaattatgcctgttgaagccaaaactatctcttttcctttactagaatttattatttctaataattctttgatataatcactgttttgtaatatcttattctgccttatcttataatcctctagctcttttagcactgaatttaatttattactgacaagcaaatattgttcttcagattgctttcgttctttaaacaaatcttcaatccttcgctctaaatcttcctgctttttatcccaatttatataaaaattatatatcagatcaacaattaaatttaattgactattgttagagtgccaactatggtcttcaatgtgatttaatctacaccttatactcagattatctttggtagtaattatctttccaatattagcttctgaatttgatttctctatgatgactggctctgataccacacttatgcttcggacaaaaaacactgttcaaaaacactatttatatacatatatatataaatatacatatacatatatatatatatacatatatatatacatatatatacatatatatatacatatatatacatatatatatacatatatatatatatatatacatatatatatatatatatatatatatatatattactcggaaattaacggacatgttttttctttgatgtaataaccattgcattttcttcgtcggccaccgtcttccgaaaacacattttgccattctggtagatgtttgcacgccggagatggggagatgtgaagtaatgatttattcttttcatatcatttgattcattgttaaatatactttcatgtacgcatatagccgatttttttaatctaaacacatgcagcccttttattacgtatttgagcacaccatatttataattccatttctaagcatgtacatgtacaggaccacgtcaatccctcgatctaatgcctaacaaaataaatgtaccttttgcaaccttgtttctagcgataacgtccacaagttagaagcctggtaatgtaaactcatttatttgtaaactagtagcaatttcttaggtctattagcttgctatattcagtttatacttaaaaaatgtgtaacaatgatttgtaaaatcaaaataacatattttgaaccatacttaataaatatgtcaaacattaatacaaagtaacaaaactcaattcaatggcctattaatttgttagacattatgttatggaacaacacttggacattatgttatggagcaatgtctgcacttgagcatctcgtctatggattgaaatatgggtttggcgtgcttatatttggaattaaactgatgcatgtgcttacatgtaaaaaatcgggcacatatagttttatatatttcacaaaattttttaaataagacgaacggtcaagcacgtactataaagtcaacggtgtcaaacattttaaaacggaagggagtattatatataagcaattagggaatatagctttactagtaagcgaaacaattcactttgggcctacttgactgtgatgttgttgacttggaacttaattggaagtccttattaacgagagacaaagttacacgtgggctcagacgtgctgtggataaatcgcgccggggagtgtgtgctgtgattagatggagagcggggcggaggaaggcgagaaaggggatcacgttccgggccacacgtgggctcgtaatcccgttctgggccgacaactccaggcccaacacgtttgacggccgcgaaagcatcgaatttttttatttatacatttttt

SEQ ID NO: 27139 - DNA, 5874 bp, Oryza sativa
tttttttgggatggagagagtacttgatttgatatacctggctcaactcaatcgtgctggatataattttttcccgggcaagttaccttatatttataacgcagtaactattaaaaacacagctatgcataggaaatctactagttagatattttctttcctgcttaatgaagtggcagacctctgcttctttaaaaaaacattttcttttacagaaatatatataaagatcgaaaagtggcatttcaagtcaccaacatactgatgcattgtttgtttggttcattgattagtgaaggcttgcagctgtgcagctgtgcgtgcagggccgacgacgagggtatgcgaagtgagggatcgaacagggtcgctaaaaattaggagccgcaaattttttatattttgatctatgccaacgtgtttcaatttatttaaaattctctcgctctatttttacaaaattttactctttcttatttgttgattttgttagaacaagcttatttttttcagctacaataagtgttcgatggcaatcacgaccaattcaaagagccgatgatatggacgtgtcttctgtgcattaaagattccattcttttttcttaacaaagataaatcactacatcatgatataatatttttctaatatttatcttaaaaatcttccgctacttgtttcttacgtatttttatggacctcaaattatgtttcaccggggccttaaatttctatatacggtcctgtgtactgtgcgtgcaatgctttcagctttcgtgccggtcagacaaacatgaccagggtgtatactggtagtcagacatgaacagttgttactctctccgtcccataatatatcaatctaatatctgatgcgacatttcatagtacaataaatctatataccctcctgtttagattcgttgtactataaaatattctatcaccctcctgttcagattcgttgtactataaaatattctatccggtactagattgctatattatgggatggagaaagtatattggattacagccccaagcggtaacaacagtaggctgtctaaatcgcggcatttcctttcagcaaaaacagggtactacttattatctcggagagacggagacttgaccatcactatcggatcaatgagctctgacgtgctcatgcagcacacaccacagaaaatgcaacagccaaacaacacatgtggccaattctcacacataacgataacatcccaatcacaactttatgataaacgaaagcttccattccatccagttcacggcaaagagattacccggtcagtcaaagatagcagctgcctcctgccgctatccgcactgacctctggagtccacacatccaggcttgcagtgatccgaatgccacagcaaagaagagaagaaatcaggaatggattaagtagcattttttttcagcaaccattcagtagcactttctaaaatacaacctttatcggttgtaaatcataaataaatagtgtaaaataaaatatatcactgtttacagttaatatttccagcttcagcattttaccacctacctacaagagctagctactagctagctgatttggcatcaaaacatgcataagttcactcatcctcctctaagatttcagttagcccagaggagaattggtaagaatccatcataggtgacatggactcatcatcacagaagaatggtcttggaggcatctgcaggccaacaacgccaccttcaagcatctctatgacctcgctcatcgtcggccgatcgtgagacttcatctggatgcaatgtagcccgattatgcacagcttcctctcaagctcatgcatgttagcaacagtagcagcagatatctcaccaacacccacctgttgctctattagccggtcatacacccacgacgggtagtaggcctgacttgagttccctgcatgcatgtctgagttccttcttcctccagccatctccagcagcagcattccaaagctatagacatcggatttgcttgatataacgccaaagctccgagatatcatttcaggagcaatataacctattgttccccttaaggcgttgagcggcacaaaactgttgtcccttgggtacagtttggcgaggccgaaatcagcaacctttggaacaaagttgtcatcaagaaggatgttgtgtggcttgatgtcaaagtgcagtatctgcatatcgcaaccttgatgaagatagttgatccccctagcaatacccaaagctatctcattgagtttgtcccatgagaaacttctcttggatgagaaaatgtacttgtctagagatcctcgtggcatgtactcctacacaagtgccctcctcagttcctctgaacaaaaaccaacaagacgaactccattcacgtggtggatcctaccaatggtggagacctcactgatggactcttcaccgttgcagttggcattttccagcaccttgacagccacattaacataacctgggagaacacctttgtataccgagccgtagcctccttggccaagcttctcaccgaagtgacctgtaattgcagtgaggtcagtgtaggcatacctcgttggtccaagcatcagttgcatacgaagaaacttgtcgactgcatcaattgttatcttatttctccaatacttgtgggcaaggaagatgaatactgctaatggggccaatacgaatctgcacagtactgcataagagcaatttaccataaaacaattatggattaacctagcaagaatgtagtaagacaatacactctgcgtctacaatgaggtataatgtaatgactctaaattaccagcagtccacttcaaaatcagtagggctgtgtgaccaccatgtacgtgtagatgaggttattatgtgatctatctccaagcaggaagcacgaccagaaatagaagtcaatgatagcaatattcgcaatcctttccttgctccctgtacctgtctggctacaagaccatggggtaaagaaatgagtaagacatggctaatcgtatttgagggcttgtttggattggattacagccatcgttaaccttagcaaaatattatgtgggagagtgaaactacattatttgacagattaactcaccggattgacagtgccaggcattctttgaagttccacccactaactgtgaaaggaaatcgaacggcaaatccagtcatcattagctttacaacatcctgatagcttacattctgcagcgccgacgtgctgttcaacttgctgccacccaaaggagtcgtggccaggtacccacaggaaggctcaaggttctgaatataagcagattgttggccagtaaacacgtaaacgaaggatctgctggtgctcaggcaagcgacgggcatgtacatccaactgctgttccttatttcctgcgaacaattgacaaagctagcccaggtaacccctactggaggtgccaattcaatgatgtggtgtgacttggcctggagcctgggatcacgaagaagggggttccagcgaggaagaaggcaactgctacgtgaatccaagaagctggcatcgacgacccacaaggtagaatcaccatagttgatgtcacttacagagtatgtctccttgtcgatctgaattgtagccttgtcgtctgcacaagttagctcgtaggattgaacaccgcactccggcgggtcacctcgccggcggaacgggaacgacacgtcactgagatggccgcatgtgaacggagggcagtcatggcgccgatgatgccgccggccacctgcagcatctggaacgagaaccccaagcacacacaagacataaattactcgcatgacagtagagcaatgcagagcaccatgaatcgcaattgccaggttcaaagaaaagcgcacaggtcagaacaagatggacgaacgacatggttgatattgcaagcgcttccgtgttccagttgaataagcaaaaagaaaaaaaaataatatccgaatacctgagcaatgacgtgtttagctaatcagggctgcctgcccttgactgtgatgctgttgactgagagtctgagacagattcgttcgtttaggatagcttaacagacatgtccatatattctcccttcatcatcacttccgaatacctgaacaagttttgctgcacctcgttggtctgggaagtgggactgaatggtactcttctgtcttcttctgtctcatcaacagcatctcagtcaagatcaggcaatgcagccgctggaagttacaccgaaagcgtgcaattacctgccaccaaacctttaaaaaaagattatcaccagtctctcctttaccaccataaagcttcaccatgtcaacttcacgagttgatttcaacatcaccaaaagaaaaaaaaaagtctcatgtactagctttagatgttatcaaggttattggaatagtagccggaataaatcggtagtgtaaaatcaagggcatgggggagccaaaaatgataaggaataccttttgaagaaatagaacacgtcaaaagtttcattggctctgctcagagcctcagacatcatagcaagcacagcatcaatcgtcaccgagaaaacaggtgaccaaatatttctaaagcacagccctctcatcatccacctccatctcatctccattgaactgcatggacttcaccaaccttcttatcacggtgctcctcctactctctcctctcaaatacgaatccgatgttgccacagcaagtgatgatgaagacttcttcaagacttgttcatcccagcggtgcagcaagcatggaccagagatcaggtacccgttccgtctttcgacacaacctccatcatgcggtgcacctggtatgcaattatcatgctctggacaagacaccatcctggatcaccctgttcttggttcctgcaaagtgaccatgatatattacaggcatgttatcatgaacgccattccacttgtagattccttacctcactgcccacttcagaagctcgtgtcagtaaatcaatcaactgctgtgtacaaacctcatacgtcggaagttgcaagtgtagtaggttgttcaagagattccatagacacaaaccaatatggtatagttggcccaacctcttgccccagcctcgctaacaacgcaagccagttctggtatttggcatatccctatacatacatgtctattcttccattgggctgcacaattgtttccaaagacatcccaatgccctacagttacgataaaaatggtccaaactttgacatctcaatcttcccgaaacagcaaaaagagtcatcagcactggtgagactgtattcacttggtacacaagtaacgttactagtatttgccaacaatgtgaacgtgaaggtcggcgttgtggctttagctctcaaaggaatcaagcattctgccagcatcatagtatgtctctttctcaagtataaattcagtttcattatgatgacttgttttagtttgaattttcacttctctatctattacatctcttatttctcgagtattcagttttcaaactatccaggatatttttcacaaatagtcaaactatctagcaaactgtgaatcagccaaaggctagcttggatgaacattttggttctaggttcacaactgcaatttttctcaaagaaaatttcatcaagagatgataatgtctgatcattatgaaaatcaatatttttttttgtaaaattctcatagaaaaggttataagcaatggcagcacattttagcagatagcaatgatctaaagagcaagctttatttgtattactctagacattggtattaacttagaacactaaattggattcatatgg

SEQ ID NO: 27140 - DNA, 2405 bp, Oryza sativa
gtgttcaatccctaacacgctcacaatttcttcttaaaaaatggttggagggacatctctccctccaaatctcctatttttttagaccttttggtggtaagaccatagtcctgattgttagaaagttgcacccatcgagtaatcaagaatgtaccagtataatttacagcattaacaagttcccacagtgttaacagggtagaaaccagaacatatccatcttacacaacgttggtacgaaagttgtgcacatgcatatttccagcgatgctctgtaagattattgaatcaggtaatttcttcctcctaggcactatagataaaaacgtcttacttctatggttaagacaagaagcctccttatcctatttctatatgacaatgccaaataaacaagccatctaacaatcaggaactaattgtttctaggaaaaattataggtgtttctctcaatttatttcatccataaatcatgtcataactaataatctttcttcatatgtccaggtccgcgtgtcacaatcattgcaggtaagcaactaatttttttcttcattcttcctgaactgctcattctgtagaatcattgccttttctccaagtgcaactagctaaatttctctctttttttactcagcaacatcatctgtgggcacatttatagttctttcattaattgtggccactgcactctacatctccttgaagtcaaggtacaatgaagagatacatttgaaagtcgaaatgtttctgaagacatatggcacatcaaaacccacaaggtacacattctccgaagttaagaagatagcgaggcgattcaaggacaaattgggccatggtgcatttggaactgtatataaaggtgagctaccgaatggagttcctgtggctgttaagatgctagaaaactctgtaggagagggacaagagttcatcaatgaagtcgcaaccattgggcgaattcatcatgcaaacattgtccgcctcctaggcttttgctctgaaggaacacgacgggctttaatatatgaactcatgcccaatgaatcattggagaaatatatattcccacatggttctaatatttcaagagaactcctagtaccagacaaaatgctagatattgcattaggcatagcccgaggaatggagtacctgcaccaagggtgcaatcagcgcattctccattttgacatcaagcctcacaacatactgttggactacagcttcaatccaaagatttcagactttgggcttgccaagctatgtgcaagagatcaaagcattgtcacattgactgcagcaagaggcacaatgggctatattgcaccagaactatattctcggaattttggagcaatttcatataagtcggatgtctacagctttggcatgctggtgttagaaatggtgagtgggaggaggaacacagacccaaccgtcgagagccaaaatgagttctactttcctgagtggatatatgagagagttatcaatgggcaggacctggtgcttaccatggagacaacacaaggagagaaagaaatggtgagacagctagcaattgtagccctatggtgcattcagtggaacccaaaagaccggccctcaatgacaaaggtggtaaacatgttgacggggaggttgcagaatctgcaggtgccccctaagccctttatatcgtctcaaaatcaacttgtgatttagatcatgagaccgcatcgccatggtttggactttggagaccagcaaagcaatggagcttggccagcatttcctataaaatggcatcaccatggttttgtgcctgagtgacagataatccacatatcataaaatagttcttagtgagctgaagcatgcacatatagtgtttaattattaaactaaactgcgcaaccaggtatatgatatatcaccatgtactcatgtaattctgatatccagcaaacatatgccaatggattttatttgcaatataataatagttgatgacaactaaattaccttattccatcgttgctgctagtccacaaatcatccttgctgaacgccacaataaagttgtggtatttgctctccattcccttcaacacaagagatcgatcccgcagcgtgtcatatttactcccagtgctgcattttcttttcaagagtaaaaaaaaaagtgctgcatcatccagaagaggaaaaaaaattaaaaataacaagggaagaaagctaagcaaagggattattaccaatgcagcgaggctcaggatggaaattgactaataatgtgggaaacggaggtggtgtgagggacttgagaagacgataccattgaagacatcgggcttatagattcgaccggatcttgacacggtagcaataacagatggcgtcatggcggcggtatggg

SEQ ID NO: 27141 - DNA, 7908 bp, Oryza sativa
tatttatagtagtatttcatacaccgaaaaaagagtttaagcgtagtaaatatcaattgttggatccatgaatatggaataataacagccattatttatgaacgctaattgctagctagatccatcattgtcatcacagcctagctactggctaattcagctattccatcgtcctcttctgagattgcagtaagctcggaggagtgaaagtaagaatccatgacttgtggaggtggcatgccattgccaatgccatccccatcgcagaaaaatggtctcagaggcacttgcaacgcatccacatccccttcgagcatctctattgcctcgctcatcgtcgggcgatcgtgtgatttcatctgaatgcaccacagcccaacaaggcatagcttcctctccagctcatgcatgtcagcaacattggatatctcatcaacttgttgatctgctatcagttggtcatacacccatgctgggtagtatgccctgcttgcatttgagtttgcatttggatctgcattccttctacctccagccatctcaagcaacaacattccaaagctataaacatcggatttgtcggatataacgccaaagctccgggataccatctcaggagccatataacctactgttccccgtaaagccctatctgacacaaagctcttctcccttgggtacagttttgcgaggccgaaatcagcaacctttgaaacaaagttatcatcaaaaaggatgttgcccggcttgatatcaaagtggaaaatctggattttccaacccctgatgcaggtaggttgatcccttctaccaatgcctagagcaatctcattgagcttgtcccaagagaagcttctctcggatgagaagatatacttgtttagagatcctctaggcatgtattcgtaaaccaatgcccttctcatttcttcggagcagaaccccacaagacgcaccacgttgatgtgatggatcctgcctatggtggcaacttcactgatgaagtcttctccattgcaattggagttgccatccaacatcttgatggcgacatgaacatcacccgggagaaacacacccttgtacacagacccatatcctccttggccttgcgagtaagaaaaatcatcacggccaacggtgcgaacacaaacctgcatagcactgcatacgaaaaggctaatgaattttgcaatgcaatatgtggtgtgaccagcttgatagtgtatactgtagaattgagtggaatgcaaaagttaattaattaccagcaatccacttgacaagacacaaggtgtatagtatgaagagcttatggtaaagagaatgatcaacgccgcggatcatgtcgctaatggaaagacgcatgtcgatgtaatactctctggataagcctatcatgcatccccagaaacggaggtcaatagaaaggatgtcaatgatccggtctttgatgcctactctgggtaatggattgtcatggctatcagctaagctgcaagatcatttattggaaagagttaattaaacgggattggaggagaagagctaaacaaaatcggcccttttcagatgataaagtaaaggtttcgagattataaggaattagagcctcactccggtgctttctacttatagtagaaaataatccgagccgttgatcgtatataatcatagggttgagatctaattctactaccaccactcttagtggtagtagaaacgtggaggggtatatttgtccatagataataattcatgtaagggtattatcgtaaattattattcagtaactctaaaccttcgccattctcaagcgcctgaccccatccatcgtcgacttcgtcgcttgtccatctccctctccgcctccatcatctccagcgcgatcgacatctcctccccctccagcgaccaagggtggcccttctcctcttcgccaagccgctgaaggtccttgcccacggcggacgactagtcctgccatgtagctttgaccaagacagaggagatcgcggggcaattggacggcggacgaagttcgacgggttccggcgaacggcggcgaggtaggaggaatgggcaactgggaatgaacgagtgtagtatggggatgtggtggacggctcggattggccaagaaatgagctatggcagccggcgacgtgcggtggcggagctcgagtgaggcggtggcatttggtcgccgccggtgaccgtacgagcggctaagggacttgggaatgaggtgtttggatgctacatgaatagggactgtgcatcacttcacaagctgccgcggagctaatgcaaatgcttttgcataaacacgacagtataccagggagtttgcagcaaagagtgaatcaagatgttctaagcccccattagtagacattgtcctatgactgaaaaaaaaatcaatttagtggcaattgagggcttagctacccccatatgagcacaagaaaggaatcatgtagcgatgattcagagcgccagaatatgacagaatgcagttagatgtttcgatggtatgaaatataaaacaaatcctgaattacagctctgactgaaatgcaatttacatatgggcaaaactctgatagtgaaaaatctcatttaagcagtttatcagattttttcagtctcactctttcaggagcaaaacaacttgtttactgatccaggagcaggatgacatatttcagttcaaattgcctggactcatctcaccccatcacagttgcacacaaaaaaaatgcacaacacactgacatggtcaacacattgacattactagtagtccatcactattcaccttttcttttttacttaaaccattactgaacaatgaatatattgggacagtcacaagatccaataaacatcagtatctcaaagctcgtcaattagtcaatgaagtattcgacacaccatacaactgaatattacaagcagaatgaactgggcaggccttcttgttgtcacggagccacttcgcgatgttgcaatcctcgtggaagtcatgcccgcaggagagcgtgcggacagtcgccggccaccatcctgagctagcagatcgggcatgccgcatgcatcgttcagcgtccgatccagtgtcctgacgccgccgcgagcacggatgtgctgaaacctctgagcattgcggtctatcaggttcgccggcgacgccttccacggcagcacgcagcgagcgacactgttgcatattctgcatctcatgccgtgctcgcggtcgaggaggtgctcgccgatgcaagccacaagactcgggcacgcacggagggggaccggggatacggcgccggaatgtatcgcatctgcctcccaagtggccgcagcccacacaatcggagcaacacggaatggagatcactacccgccggcggaatggattgaatcctccaaagtgggcgctgccaagaatctcaggtcttgcgcaggggctccggcggaatcggacgcgcgcggaaggccactcgcagcggacagaaggccacgacggcgaaccaggatgccggcgtggaatataggagaggaggagaaacggatagacaggtgagaggtgggaggaggggacgcctgagggtttcgctgcaccgcgccacggcatgccgggaggagtagcgataagcaacgtgcgtcgggcgagatgcagtgcttttcgtcggacctgatgcgatcaagctaagaccgaccgagacagagaaaatagatcctgccaaaattgcccctaatatatattaggagattactaatctaccctttaaaatgaacggtcgagattaattctacttgtagtataatactccaagtagaaagcatcggagcattgctcaaggaattaaggcgctcacctaacagacttgttgaggcattttttgatgagaccaaaccaattaagccaaggtgttggaaatttgacggcaaatccacccctcatggattttacaacctctgcataactagtgtattcgggcagattaacggagttccagccaccgccgataggagtcatggccaagtatccacaagaaggttcgatgtcttcgacagatggtactaaagaaccaaaaaatgggagcatataataaacgaaggacaaagccgtggtcaggcaatccacgggatggtacacgtacaggtatttgctactactgttcgtaattagttcctgcgaacaattgacaaagccaacccaagtaatcatatcatcaaggcccaagtcccagctgtcgtgtgatcctgggatacccagaccaacgtaaggcagctggtccgagcgaggaagagggcagctgctgtttgcatcatcctgcaggttggcgtcgacgacccaaaagatggaagcagtgtagttgatgctactcacatagtatttccctgtgttgatccgaatggtggccttgccatcatcgctgctgcagtctagctcgtacgaccggaagccgcacctgcgactgcgagggtcgcctcgccggcgaaaaggatacgatacgttttggagatggccgcaggagaaaggttggcactgatgccgtcgtccttggacacggacgacgtgatgatcagcatccgctaccacaagtgcgagcacatacaggacggttgacaaagcagctgcttccattgcatttgcataccctgtatatactaatatagtgtaggctaccaagctagctacttgttgctcgctcggccggctcctacttataagtactacgacgtacgctacccggccagggttttcaatttcgaaattcaattttatgccggaggttaccgaaattaccaaaatttcggaaatttctgaccgaaattatttgaaaatttgactgaatttgaataaaatttgaccaaattcacataaaaatgtaaaaaactgaaaatttcgggcgagatttaagcatgccggtgagggcaaaatttctgaccgaaatttcgaaccgaaatttcaaatcctgacgctaccaaggaggggaaaagagaaaattgagtatccgtaaaacgagcttagcatggtttttaattggatattaattgagtatacgtaaaaatagaaattagcgcataattaattgttttaaatttagaaaatagattaacatggtttttaaaaagcaacttttaggtatatatatattttaaaaaaatactccctccatctattttgatagttatatttcatcttggcaggatacataattctacttatcatccatttaaacatgctactagtcattcctcgtaaacaatcgattctttaatatttacatttctcgatgcccatgtagctaattttgtatggaagaatagagagtcgtgcattaaatccgagaaagtcattaagagaatatgttgttggattgaaatatgcctatcaaaaataaatttttcagatttgaaaacatgactatcaaaagtagatggagggagtacaactgttagtagtatgtaaacatgcacatgaaaaaatgagtagttttttcattctttcagctcggccgaacctttgaagttcgaatttatattaggtagatcttatgctataggtcgtatccattacattctacctccatcccaaaatattgctatctagcatgagatttgacctatgtccagattcgttgtctaggatgggtcaaatctcatcctatgtagcaatattttgggacggagtaagtatttgttatttatattaagttgaccttacgcaaccatcgaactcatttgatgaaagaaaaggcagtaaattaagcaccgaactggacggcctcgtccagtccagatcaagtggccagagacaaaactctcggctcgcagtgctgaagcagtaactaaacaggctactcggtagtagaatatactacctttccatttttcttatgatgttgatttttcgtataatgtttgattatttgttttattaaaaaatagtatagatatgtaaaagtttgatgataaaatccagtcataaaaaaataaataatacttagtatatattttttactgaattgaatgcccaaacgttacgtcaaaaactaatggcgtccgctgtaaaaaataaacatacatgcgtgttgcaaacttctgactgtagtactgtacgacaacaaagctcaacttttgactgtacttgtatgacaacaaagctcgcgcgtgaattagcatttctgcgtgcaccaggcctaatttccacacgggaattaacctttactaaccggtttctatgttaatcgctcatgagattgggcatgagtcatgagtggactggagcaagtctacgatgctccaggtcagtcctggccggcaagattttccaaagtacccactccgtttcattttttttagataatggacccactccgtttcatagtttttgacttcttttactggttaaactctaatcaaatttataggaaaatacgataatatttttaatacaaaataaatatattattaaactatattaaatattagttgtaatgaaactaatttggtgttttagaatttagatattgctaaatttttctttaaatttaatcaaacttagaaatgtttgactagaaaaaaaaaagtcaaattgacttataatatgaaaaaaatgacttgtaacatgaaacacggggagaacatacagcgcattgttgcttacaatgaagcgcacagttgcaatatcctgatcccacatatatatatccacacctccacttcatgtacatatatggaatacctacagagtacagactacagttatctcttttttttttcaagggaacatactacagttatcacacacacaattgcttttgcacctagagtcagagatcaatatgagtagcaaattcctcgccatatatctcctgcttgctttcctcagccatggcacctgcagctacatggccaccacagcttcaggctgggatgaccacgacttcttcaggcattgtccaccgtcccggtgcagcaaggatggaccagagatccgtttccctcaccggcttgaatcagcaatacatcatcagcatgccgcgcttcatgcgcgaggctagcatgctctggccaagacaccatcctacatcacccaattctggggccttgcaaggtcacctccatagattacaaggaggccgtcatcaacatcatccatctccttccgtttccatgccctctccagaagctcatggtcgacagtttaccgcctgatgactaccatggctgtaacttatacaggaggattcctgcaaaaatagtaagctgctcaaaagagtttacaccaagtggtacctctccagttccgtacgaacttgaccatctccagaatgctgccgaaaatatcttcggcccaatatcctgccttagcggcacaggacagtacttctcatatttggtgcatgctcagctatacatgtatttgcttccattggattgcaggatcgtctccagaggctccattccaattcctggctcagactcctgcagtggcccaacgttcaaggaaaaagcagaaaaattcatcaactttgctgagacgactgtcagttgggggtcctttcaagatggagttctcgacaactgcatggcgtgtgaacgtcaaaagcaactctgtgcattcagctcacgaaggaatcaaacattctgcacaagccacggcaatcatcatggtactaactatcctaactgcacaaacatgatcgtaccacccagctttgttcctgaactagttttctactcttactatgattcaagcattcagccatacagtactagtgcaccgctctcaatacatatgctcaaaactatttttgcaggctagtagcctactactagaaatcatttagggaactaactagcttcatcaaacatttttgcacaattgccata

SEQ ID NO: 27142 - DNA, 6920 bp, Oryza sativa
gtttcctctagaagtagaaagtagctcgaatatgtaaacaagactgcaagggaacacttgactgggacaagatataatctaagtttttttttatttttttgccaggtcggcgaaaggaagccgaccaaaattcattaagataaaggaataattacagaggtatacacgatataatctaagttttggtttgttacctgatataacaggagctgcagttagatctttggttgctttgataatagattagtagacatgggaggtgatatgtggaagcctttataatttagcccataacccacctcaactcatcctaatcatccttatctggcatgacaaaaatacgagagttagcacacagaactgtcttatgatgatactgcaaaataagatgtaaggaaaatttcactattgcaaatatattcatatgatcatggtgcataaaaatttagagccaaaactctatcctaccccaccagggccatgttcgctgatacattttgttggattgctctgtttttattttcaagatgtaattatccattatctgttaaaaccaccaaccagaacttattatcttcgttcatacttgcaggttagcgtgtgaaagtcatttcaggtactgcagtactcaaacctacctttctattaaaaagagaaaagaaacaatgttatcagtacatataaattcttattgctagcagttctgagtcttctgactcagcattcttctgctaaaaaagacaccacctgctcttacagtacccatcaggcaatcacaatcagttgattactagccacaactttcgatcctaatgcaatgtgctaatttccccttctctgttaattcagctacatcatcggtagccgcatttgttgttttttcgttcatcatggccacagcactctatctttcactgaagtcaaggtatgatgaagaggtacatttgaaggttgaaatgttcctcaggacatatggcacatcgaagcccacaaggtacagtttctctgatgttaagaagataacgagacgcttcaaggaacaattaggtcagggtggatttggaagtgtatacaaaggacgactaccaaacggagtgcctgtggcagttaaaatgatagaacactctacaggaaatggagaagagttcatcaatgaagtagcaacaattggacaaattcatcatataaacattgcccgccttctgggattctgctctgaaggaacacggcacattcttatctatgaattcatgcctaatgaatcattggagaaatgcatattcttgcatgaccctaatacttctcaagaactcctagcaccaaaaaagatgttagatgttgccttaggcattgcccgaggaatggagtatcttcatcaaggatgcaaccaacgcatcctccattttgatatcaagcctaataatatattgcttgactataacttcaatccgaagatttcagactttggtcttgcaaagctgtgtgcaagggaccaaagcattgttaccttgaccaaagcaagaggcacgatgggctacattgcaccagagctatattctaggaactttggggagatatcttacaagtcagatgtatatagttttggcatgcttgtgttagaaatggtgagtggaaggagaaactcagacccgagtattgagaaccaaaatgaggtctactttccagagtggatctatgagaaagtaattactgagcaggactttgtacttagtagggaaatgacagaagaagtagactgaaggttagacagatggccctcgtggcactgtggtgcattcagtggaacccaagaaaccgtcccacaatgacgaaggttgtaaacatgctaactggaaggttgcagaatatagaggtgccccctaagccatttgtttcatatgaaagccatgttgtgccataaatcatagtaatgttatgggagttatacttagttgacgtgctgcatagtaatgctgattaactgtatgaggtatgaatcgtcgctctttattaccatgtaataaaagtaataagaaacacatcagttgatgtgattaccttgttcagttgttgctatgatatatctccatccaaccaccgtgtgcagagtactcctcgttgcactatttcagtaagatgccctcctcgtccgtttcatgggtccataactagtggtttgcaacaaaatcctgcaaggaaattgaattatggcaatttttcccatgcagaactaatataaaatatcgaagcaaagagtattatttttgtctgtttgtccgtgcgaacggccgactagggtaacattcataccctgaattcgtcactgaataaagaagtagattcatatcctaaattactcactgaactaagaagtataataagttaagttggcttggtcacattcctatccatcccattcaaaaagtcagggcccgcctatctatctgatggaaatctcacagcaaacaggatgctgctgggcaagcaatcgaggagctacgaatttgcaatgtgaagagatgaatgggcatggactcgactagtgaataagtacactttaataaaaacttaggaaaaataatcaaaagcagaggaaacgggctacctttatcaatgcaaggagggggcagcgaaccgaacaaccaccggatcaggagacctccccgagttctgtcaatcctgcggctcggcgtggcatcccgcttggggcctggatttgcggctcgggtctcacaaggacgcagggagaaggcgacgcatagcccgggcaacgcgcattgacggcggagcgcaaagcagagacatcgccggggaagcagaggcggctgggagtcggtgggatcgccggcgacggcgaagggttcgtggcaagagagggaggaaaggggattccgtacggtttgcaaccagaaactaagctcggcctagggctagtaatggggccggccctaaagctcctgccgctaatgggcctttatttgcatttgggccaaaaatgacctgcgggaggcctgtcttctttctgctcgtggaaaattccatgtaaatcgaccatttgttttttttttagagaaatgtacctttacccggcctctatatccaacctgatatatgtagcctttttacattagaaatttagctctcaaataacccaatctgaaattcgcttctatagagatttgaactcaggatcttggggtgttactcaggtcacggcaacaactaggctgcattgtgcttatacaaagccaaattttaaattttaaaaacttaactttgaagtagatttcgtggttttttcacgaaagtttattttatagaatttacttttaaatcgctaagaacacgtatataattttttttacctacaaattatttttctaattgctgtaataaatcatacaaataagcatatggaaaagcaaaatatgaatcggaatcgggaatcgctagtcagtcacgtaggaaagaacatagcaacagtgccgaccaacacagaacactagcttagctcgatttttgcatgcattcatacagatgaagcacaggataataaatcgtacaagcccacatatacgcattctacaggaatataggaataggagcatagaaactgcatctgtgtgactgtctacaatcatcacaggcttgagcacaacctgctcacgaaaagacatagacacactatacttgctacgtactccactagctaattcaactcagtgatactctcctcgtctttctcctcggagatggcagccagctccagctcggaggacagatacagcgactccattgccgggatgtagtcatcgtcacagaagaatggcctaggaggaatttgcaaacaatcaacaccaccttcaagcatctctatcacctcgctcatcatcggtcggtcacaagacctcatctggatgcaccacaatccaacgatgcagagcttcttctccaactcatgcatgtcggcggcagcggtgatctcacctgtttcttgtcgggtcagctgacggtacactcgtgatggatagtatgcctggcttgaattctctgcattcggatcagcattccttcttcctccggccatctccaatagtagcatcccgaagctgtaaacgtcggacttgcttgatataacaccaaagctccgagagatcatctcaggggcaatgtaacctactgttcctcgtgcagcgctcaccggcacaaagctcttgtcccttgggtatagccttgcgagaccaaaatctgcaacttttggaacaaagttcttgtctagaaggatgttgtgtggcttgatgtcaaagtgtagaatctgcagatcacacccctgatgcaggtagttgattcctctggctatgcccaacgcgatttcatttagcttatccctggagaaactcttgtcggatgagaagatgtacttgtcaagagaaccccgaggcatgtactcgtagacaagcgctcttctcatttcttcagagcagaaccctaccaggcgcaccacattgacatggtggatccggccaatggtagagacctcactgatgaactcttctccgttgcagttggagttgccatttagcatcttgacggcaacatggatattgcccgggagcaatacgcctttatacacagtcccatagcttccttggcctagcctgtctctgaaatggcttgtgattgcaatgatgtctgtgtagccatacctcattgggctgagcatctcttgcattcggaggaacttctcaactgcatcgattgtgatccttgctttccagtatttgtgggaaaggaaggttaatacaacaagcggcgccaacaggaacctgcatagtactacataaaaacaagtttgtagggttgtttaggattggtttaacctttgaatataataggatcctgaagtacctgcaatccaagtcagaatggacatggctggtcctgttccgtaaattgcaaactcgtatgcaacacgaggcaatttaactggagccattatgcactgccagaaaggcccatacgctaaaaggattgctagaagtcgatttttgatgtatatatcagacgatggcaccattgtttgacgaaatatgctgcaggacaatgccatggtgaaaacggaaataaaattaaggtcctcacaaggttttgttggtacaaatgggatgaaaataccttacctaacggactctgccaggcatgctctaaaatcaaagtgatatgtccctgatgaagaagaaattccaatggcaaaccctttcctcatgtatttcaggacatcagcatagcttaagcttgcattgatagacgctcccctgtcatccagaggtgtcatgcccaggtacccacaagaaggctctaggctctcaacataaacagtttctgactccgagccagtcagcacgtagacgaaggaatggctggtgctcaggcaagcgacgggtttgtacctgacattcctcgttatctccttggaacaattcacaaatgcagcccacctatttgtaaaaggggccagttcaattacttggactccgtcactggtaggggccatggatatgcgctcgtgtggaggttgatgctgccgccgcggaagagggcagctgctgttatgtgaattcagcaagtctgtgtcaacgacgacgaaaaggctccaatggataatgcgagtcacgtagtatgttgcattgttgatgcgaattgtggccttggtgtcgctgcaaaccagctcgtgagatttatagccgcaatcaggtggatcgccgtgccggcggaacggaggggaaacgttcttgagatggccccaggagaagggaggacactgcgctgtctgcgctgcctcctcgggcccgtacatctgcccttcaacttgaaggagagctgcaagcacagacaaggcagttagcgcctgcagggcagtggaagtagaacgacgaaatgcaccagccaccgccatggcagacagccagacacagacagttactgttcgactagctagctctagctgccgcccaagttaccaagttgattagcaaagctagttgacgcgggtgattacctgctaagtactgcactgacctacattcagatgttgactggagtaatccaattcttaatcgcagtacagttttgatttgatctttaacttcttccagtaagtcaaatgcactgacctgtgcattattggtctagacaacctacaatgtcaggctaacttttcttttctgaaaccgaggcaggaaatgcaattaatatttgtaaacaagaaaaatgggctccagaataacagcgcggagctcaaagcgggtacacacgttgtcatgttcttgtctatcaaacagcaagcaaacgattagcgaccataagaacttcagacaaaccgaatatactaacaaactcctgcctaacaaggacacctgtactggttttctctcaatcttaatagatttggccggcgtttcctttgccagcccagcgaaaaatatatagatcataaaaatgtttgtttttagcaccgactgcagaatacaagtgcagactgcccatgatttctactgactgcggattagaacgggaagaatttcaacaggcagaaccgaaagcacatttgcatataaactacttaccccggccggcagtatttccgtagtgtttcaattgactattgctgaagacgacttgactgcagcaagccagcaagttcccattggacttagacaagtccacaacctcagtcttctttatatgatgatatagcttgccaactttacaagagtttatttctgtagaagatacatgtttcatgaggttagttatacaaattagtgagaatagtagtatgactgaagaaaataggacatccctgagttgagacaaggatagtcaaaataaggatcacagtacagctgtcattggcaaaa

SEQ ID NO: 27143 - DNA, 2191 bp, Oryza sativa
  unsure (1)..(2191): unsure at all n locations
gaaaggcatcccaataccctacaattatgatagaaatggtccaaatgaaaatcaatacctcgacatctcaaacttaaaagaaaaggcaaataaagtcatcaactttggtgaaacagcatttacttggcaccttaacaagattaccaatgcttgtcaggggtgtgagtggaatggtcatcactgcggatttagttcacaaaggggccaggcattctgccagcatcaaggtatccttcatctcatatttttttttcacaagggaattctacaagttatttcttctatttattgtattaataattatgttatggaattcataattatcaagctttttttaaacaattcctacaggatttttacctaaaggaagaccttgatgaaaactgtaatcgtcttggaaaagttctaataactagtacgaaaaaatgaaccaaaccagtggaaggacatgccaaattggaccttcctcaataaataaataaataaaccaaactttctctccatctccaggtttttagttatcttgacttgcgtattttagagcactggaattaatgcagatcactctaaccaaggtcatttcatgctaaatactatcatactaatttgggatgccactcttcttactcatcaaaattggacttaccgacttagacccttgggtgctaatacagtagtgctgactgacacaaaactgatctaaccattatgaattagaggttcctaacaaagttatagaaagttgttttcccttatctttgttattactaaactttgatgtaaactatttttttttcttccttccttcaggttcacaagtcatcctcattgcaggtaatgcagatattctgttcttcaaattctcgcctgtcagcaaccaagattttgtgtactcttgttccaataagagttgctttgttcctttttctttttgtttcaaaaagcagatattagctcacaccttgcttatcctaatggaacaaactaatttcatttaattttacacagctacatcctcagcagccacactagttgttcttttgctgatggtgggcacaacaatctatctttcactaaagacaagatataatgaagagatacatttgaaggtcgaaatgtttctcaagacatatggcacatcgaaacccacaaggtatagtttctctgaagttaagaagattacaagnnnnnnnnnnnnnnnnnnnnnnnnnnnngggtatggaaatgtatacaagggtgagctaccaaatggagtgcccgtggcagttaagatgctagaaaattccagaggcgacgggcaggaattcatcaatgaagttgcaaccattggaagaatccaccatgccaatgtgcttcgtcttttgggtttttgctcagaaggaacaagacgcactttaatttatgaattcatgccaaacgactcattggagaaatacatattctcacaaggtcctaacgtgtcacgggaattcctagtgcctgacaagatgctagatatctctttaggcattgcccgaggaatggagtacctacatcaagggtgcaatcaacgcattctacatttcgatatcaagcctcagaacattttgctagattacagcttcaatccaaagatttcagattttggacttgcgaaactgtgtgcaagggatcaaagcattgtcacactgactgcagcaagaggcacaatgggctacattgcaccagaactgtattctcggaactttggggtgatatcttacaagtcagatgtatacagtttcggtatgttggttttagaaatggtgagtggaagaaggaatctggacccaggtattgataaccaacatgaagtttattttctagaatggatttatgagaaagtattcactgggcagaacttattgattggtacggaaatgacacaggatgaaaaatacaaagtgaggaaactggcaattgtggcactatggtgcattcagtggaaccccaaaaacaggccatcaacgacccaggtggttaacatgctaacaggaaggttgcaggatctgcagatcccctcctttaaaccatttgttcccttccaaattcccctttgcaagcgaatctataccataaaaaaatgaagatatcaccacgggtggcacatgtttttttttttgggaatacgcgaggagcgcatttttgtattaagaggaataaaagttattta

SEQ ID NO: 27144 - DNA, 7668 bp, Oryza sativa
ctctgatgtcaagaagataacgagatgcttcaaggaacaattaggtcagggtggatttggaagtgtaaacattgtccgccttctgggattctgctctgaaggaacacgacacattcttatctatgaattcatgcctaatgaatcattggagaaatacatattctttcatgaccctaatacttctcaagaactcctggcaccaaaaaagatgttagatattgccttaggcattgcccgaggaatggagtacctgcatcaaggatgcaaccagcgaatcctccattttgatatcaagcctcataatatcttgctggactataacttcaatctgaagatttcagactttggtcttgcaaagctgtgtgctagggaccaaagcattgttaccttgaccaaagcaagaggcacaatgggctacattgcaccagagctatattctaggaactttggggagatatcttacaagtcagacgtatacagttttggcatgcttgtgttagaaatggttagtggaaggaggaactcagacccaagtattgaggaccagaatgaggtctactttctggagtggatctatgagaaagtaattactgggcaggactttgtacttagtggggaaatgacagaagaagatagactgaaggttagacagatggccctcgtggcactttggtgcattcagtggaacccaagaaaccgtccctcgatgacgaaggttgtaaacatgctaacaggaaggttgcagaatatacaggtgccccctaagccatttgtttcatatgaaagccatgctgtgccataaatcatactagtaatgttatgggagttatgcttagttgacgtgttgaaatagtaatgcctagaaattgcataatatgcaccttgactgcacattgattatctgtatgaggtatgaatcatcgctctttattaccatgtaataaaagaaataagaaacacatcagttgatgtgattaccttgttcagttgttgctatgatatatctccatccaaccaccgtgtgcagagtactcctcgttgcactatttcagtaagatgccctcctcgtccgtttcatgggtccataactagtggtttgcaacaaaatcctgcaaggaaattgaattatggcaatttttcccatgcagaactaatataaaatatcgaagcaaagagtattatttttgtctgtttgtccgtgcgaacggctgactagggtaacattcataccctgaattcgtcactgaataaagaagtagattcatatcctaaattactcactgaactaagaagtataataagttaagttggcttggtcacattcctatccatcccattcaaaaagtcagggcccgcctatctatctgatggaaatctcacatcaaacaggatgctgctgggcaagcaatcgaggagctacgaatttgcaatgtgaagagatgaatgggcatggactcgactagtgaataagtacactttaataaaaacttaggaaaaataatcaaaagcagaggaaacgggctacctttatcaatgcaaggagggggcagcgaaccgaacaaccaccggatcaggagatctccctgagttctgtcaatcctgcggctctggggcctggatttgcggctcgggtcgcacaaggacacagggagaaggcgacgcatagcccgggcaacgcgcattgacggcggagcgcaaagcagagacatcgccggggaagcagaggtggccgggagtcggtgggatcgccggcgacggcgaagggttcgtggcaagagggggaggaaaggggatggaaaaagtacaccgaaggttcctcaacttgtcatcgggatacgaaaacatcctcaaaccgcaaaaccagatatgcgggatctctcaactatacaaaaccggtcacccgaggtccctcggtggttttcatcccggttttgtccgacgtgacggctgagtcagcgtgggacccacgtgggccccacatgtcagcgggccacgtcatcaccctctcctctccctttctcctctctctctctctctcactcttctcgtttgggtaggcagcgggggacaacggcgtcggctggcgactggcgacgcccgccgttgcagaggccgcacgcacggaggtgggccgcgtcgagtgaggagaaagcaagggggccggggagtccggcggcgacctcctcaccggccgcgacgtcgccatcaagtccttccccaaccggcgacatggcggccggcgaggggagcaaggcgtccgcggcggcgaggctgttcttgtccgcggccagcttgacccggcgcaacgacgagccaggcgcgggcgacgagccacatgtggaccgtccacacgccgacgctcttcaccttggcgctggcgccgcctcgtccgttgcggccacggcggactccgagagctccccggccgcgaacctgccggcgaggtcgtggaggtaggccgccttgcgggcagagacgccgatggcgcggaggtcggcggcggagagggcgagcaccgcggcggggttgaccaccgcggcattgggatcggcggcggcggggaggcgcgtgaggaagcgagcgtagatggcggcggcagcggagggagcgagcgtagatcggctgttgctggccatggcgacgtcacggaggcggacgctgctcaaggtcatcgtcctaggcgacagcgggtcagcacactacactagctcatccttggctactgcaggcctagctgtttcatcttagcttgattcgaatcgctctagctatgcttctgtcagcttgatttcatggtgcttgtttgatttttgcctgactcctgacatggattggtttatttggttgtgattttggttttggtgcaggttggggaagatgtccctgatgaaccagtatcctttacctccatagctgcctagctgcatatcatcgagctttgtatcctgcacatctaccatggccaggatgagcttgagaccgagaggccggcggccgcgggaggcctgcggcgacgaccgcctcagcgcactccccggcgacctgctcctcctcgtctccgccgcctctacacccgcacggcacttgccaccggcatgctctccaggagctgggcgcatctgccccacgagctcccggccctcgatttcagggtcagcgacatactccgccgcgctatcaccggtgaccggtgcatcctccgccaccgcggcgtcgtcggcgcgtcaccagtcgccagccgccgccatcgtgtcgcccgtcaccggccgccggcgacgccctcgtcctctcccaccttgccccgccgaaggcagcagcccgccgacgtcctccccagctgccatcccaaacgagaagagcgagagagagaggagaggagagggagatgacgtggcccgctgacatgtggggcccatgtgggttccacgctgactcagccgccacgtcggacaaaaccgggttgaaaaccaccgagggatctcgggtgaccggttttgtataattgagggatcccgcatatctggttttgcggtttgaggatgttttttatcccgatgacaagttgagggaccttcagtgtactttttcctcttacaaaaggattcggcccaagagcttaaccggtcattaccacgagccttcatctagccttctaggaataagttcaccggtggtcctcaacttaacagggagattttttaggtcctttaaccacaaaatcaatacccctaaactcacacaaaccgtgcactcaagatcctatggcagtatatatgggttgtttagcaacgtggcatcctactcagcaaaataaaataaaaaaagtacgtggggcccacattgtcagctgcacattctcttttcttctccttctattctctttcctctcttcgctcttctcttcttcagtaagggaggtcgtcggcgggcggagcggcaatgggcgagcgcgatgcgtgcagcgagcggagagccgacagcggcaagcgagcgtggcagcggtccacgggtggcgggcggagcaatttgggagggagggggaggtggccggcgaccccgtccgagctcgtctgacttacgtgcgagctcgcccccgacgtaactcggtgtgctggggacgacgacaaggaaagggggagagagaggtatcgacggccgacgacagtggaggcgggcgagctcggtgacgggctgctcacgctcgtcgaccaggccccccgctctgtactcgcccaccgctactccgcctgtcgcgctcatggaggaggttgaccagcacgacgacgacgccggtggtgaagatctagagcatgacgagcgccgttgctcttgcccgccgcccatggctagcttcgctcgcccgtaactctattgctgctctcgctcgccgctcttgcttgccgctccgcctgccactctcactcgccgccccacccgccgctcccgccgtcccggcggcctttctccccctctcccgcttcttccccgcgcgccgccgcacccgctccgccgtcggctaccacgcccgcatctgcccgtctgctcctgaatgtgcaactgacatgtgggccccatgtatttttttttatttttttctgactaggatgccacgtcagcgaaactacccatatatattgccatagaacgttgagtgcatggtttgtgtgagtttagggtgcacatttctggttttgtggttaaaagacctcaaaaaatatcgttgttaagttcagggacctcaggtgaacttatatcatcaaaacgcagcgattgtagataccatagatacataaaatagatcaaaaggtgacatcacatctcaaggcatcagcatactgatatactgtttgtttggttcatttgattagtggaggcttgcagctctgtagctgtgccgctgcgcgtgctatgctttcctcctgcggtcagacaaacataaacagggtgtgtacatggaatttgttagtcagacataaatatattggatatttgaattacagctcccagcggtaacaacaggcactactaggctgtccaaatcgtggcatttcttttcagcaaaaacaggtccatataacctcccggagacttgaccatcactatcgggatgaactctggcgtgctcatgcagcagtagcacacacaccagtacaccacataaaatgcaacgaccaacaacacatttggccaatggccacacataacgatggcgtcccaatcacaaagttatgataaacgaaagcttccctctagttcacggcaaagaaacgacccggtcagtcaaggcaagaagctgcctccttccgctagccacactgacctctggagtcaacacctccagcgttgcagtgatccgaatgccacaccaaagcagagaaccaattaggaatgtattgagtagcattttttttcagaacttttttgaacgacttgcacagacagtgtgaaattcaaattgatatagtaggaaaaaattacaaaattacaaccttgggaggtcgtaatcaggaaaaaaacaaagatttccacctcccacgcaccgacagcaccaaacacaaattgggaagaaggctagcaccaaaccggacgctgctaggccaacaaaggaactacagtcgaggtcgcccaaacctatccctaacatctgacattaaacccctactctagccacctctttgggattgagagagaaaaagggtgagacagaaggatggaaccgctctcccccataggccctctgacatggtcaacttgcataagctagggcgctgacacgagaggacatgcatctagagagctagcttgcaccaaaagtctaggaggattcaaccagggttgcctagacgatgtctccagggagaggagcgaataaaacaccgccgccgccgtccatcgagctctcaaaaagagccaagactaggttttcacccaccgaccaccacctgcaaatccacggctgacacaccgatgctccaccaccgtcaaacctttgccgaaatgtgggaccactgcaccgacgccccccgccggctagcctccgcgtgccccacaccacaccgcacccatcggcagctcctcctcatgccgtgccgacctacgtcaccgccggccacgccttcttgcgccgtgctagcctccgaccactcctccaggcgtactagccagccgctgccacgtcggcccatccgctggccatgccggccagatgtagccatcgcccacgcctctcctccgctggccgtgccgaccatatgcagctgtcgtccatgcctcctgatgtgaccatggctactacggatacaaccattgcttacatcatggatgaacaacaggagatcaagttcaagacctccaagtgctggaatccgattcggccacctgctagactgctgacttcaaacggccgccaaatctacatacgacctccgttttcggcccgcgagtacttgatggaaagctcttggagtcctctttccaatgggttcagcctcatctctaaatcccatctcatttggccgcaatcaaagaaacaaggtgttgcgtcacatattataatgtgcttatgggcttgtaacttcatttgtgaccttggcccaagtggggcccatgtggggtgcgccccaatctggtggagcacgaccctaggaccctcttggtcatctctcacccctataagtagctaggtaccccttcagagtttcgagggttttgttagattaaagtttagacattcctacttgcttgcagcgcgcgtgtcagctaaaccatccgtcttcttgttcttcggaactccaactcatcatttgtattcaattcctatttgcaacatcagattgcttttatcttgttcttgcttgtttcttcgatttgcttgtaggaatagagttgatttgcaccggcaagatcaacaacccacggagaggtatatcaatcgctaaggtgcaacacaacgtctcgtacggttgtagtcggatcgtcaacgctcctcccaaatcgtggttatctgaactcaccgaaagatcgggccaacaacatccttgagtatcgagtggaactcagggttcatcacctccccgactagccgtctgcaccccgtccgcagccgcctgtgcctcccgtcgtagtcgccctcgcccgcttcccgctgtcgacatcgttgttgatgaccaaatttggtaaattatgaaccaggttcgacattgggatcgaagcggattcaataaagagattgattctgtcagagatatgggcccgggcgtatgcaaagtgtgggggagttcccttcccatcctcacacgtggctctacagcctggccctgcccccacgccccatgagtcgcaggcgcgaccggggggcctcggggtgccaggtcatgcccctcggggtgcggcgtcaggcccctcgggccctcgcgctgcggcggcccgaggccctcgcccaactgccgcgtggcggggggagcgtgaggagagagaggcatggctgagtataggtgtccaaacgggcggcacggcccggcccggcacgggcacgggtccggcacggcccgtttcggcacggcccgttaggcacggctgatgaaacgggccgtgccgtgccggcccacgtgccgaaccgccggcccaagcacggcccgtggatggccgggccgtgccgtgccggcacgg

SEQ ID NO: 27145 - DNA, 12017 bp, Oryza sativa
  unsure (1)..(12017): unsure at all n locations
ggcacggctactcgggccgtgccggcacggcccgttactgtagcaggccgtgccgggccgtgcctgctacaggttcggccgtgccccgggccgcccgtttggcccggcccgtttggccacctctgtggctgagcagccatcaatgcgcggcgccccaaccgtccctcaccatgtttaatgcggtaaggatgaacgtgcggtgccgcaccactggcccacgtcaaatcgggtgtgaccagtctgtgatcggcctatcgccggtcacgtccgattgacgcgcggtcgtgccctcacgtcgcctttgtctccggcggagtggaggtaggtatgtcccgtcacatcggggcgtcatcggagtcctctccacgtgagaaggacagtcaccagtcatcgcccatttaagagcgaatgatagggctgtcccccgtgtcaggcggggggcggcgctgggtcccacctagagacgcacaactaccttgcttccggttgaaggcacggatggaggtctgatccaggctaggtgggtccccctcccatggaggggtaggtatagacggtgcatgtggtatccccttgaactataaaaggaggaccttgctcaccgggaaaagggacgacactcggaaaaccccgaactccaggaagagaagggaagtaagctcttctaagttggggaacccttgtaatcctcatccataattccacacacaggagtagggtattactgtcacgaccggaaataacctaacgggcgttccttacatacgtgtattattccttgtcccaggaggcaaggtacaccaaaagttgatacaattcagagtttaacaagcggaagcgtaaatagttaattattacatgggcgacgagagcccagcacacagaaaggcaatggaaaacagcggaagactagggcgacgaccacaagcgcctgacggcaggcacgagctagacaccaaagccttcatcatccaggagctcctcttctgggtttgggaaaaattgagcaagactgagtacaaccaccgtactcaacaagacacacccacaagtgcagcatacgccaggacaaggttttagtaacaccattttgtgttactatatgtccaaaaatgtgttacaatgttattcagtaacacatttatgaactgttactatagcctatgttactgtagcgcaatctactgtaacacatctatgcgttgttatatataagaaaaggtgttacaactaggctatagtaacatgtatttaggtgttgccatagaccattgtaacaccattttctaccattaccaacaccgttggtaacatcattttctacttgaagtaacatatttgtaacattttattgtatatattacaacacaattactttttggattggtagtgcatttcacctaaaattactacatttagaaaaaaatactgcatgaagttttatcacttcaaaaatggaagtggcatgaccatatatacgtaataggagaaaataatcacaagtgaagaagtgaaatgatcataatatattgcattgcaataaggaaatttacagaattattgtttacatcttgtaacaaagaaatttataggcatatcttttaaaaagaaaaaaatacacattttagcagcaagctgctagataattgtgcaatacatctattcatatatcatcttcgcaaattccttcgcttctttcttagatcttgaagtgggcattcaactgtcagaattcagccactgatcatctgaatctgcataagaaatttattattagccttcacaattgcattaaataatattgacaatattcttcaacatataaaatgctactatgaccatacataaaacaacatagccatattgtcattttccttaaaatgatgatctgtaaccactttactaaactagttcaaaggcaaaaaaaaaagttgctcacagattcatctagcattaaactgaggccaattgccacctgaaaaatagattaggagtactaatgttcatcaagattatcaatgatcctgtcaccagtataattatctgatagtttcatcctttatatctgatgaaactggggaatttaaattggtttttggacagatcattttattactaagcttcatgttctttctcctctgttctgtcaaccaaaaacaatgtggaactaacctttgataccattgcaaccccagtgtggtagtgtcccattcatcttaaatatattcttgcaaacctgcttcagaggggaaaaaagacgacgtagcatcaaagtatcaaataatgtattgaagcaagaatcattagtatttaagtccatctaaagcaaactatctaacgccatgtttgtggagtattgactgtacacatcatgcttccatgcttcctccaaacgtgcctacacaccacaatagtttcctacacaccacaatagtttcctccatactacagtagaacgggggcccccccctttggtaaggtaatttttnttcctttttttaaaaaaatttgggggttttaaatttttcccaaaaaggcgcccccctaaataaaaagggtgtaatacaagattttggaaaaacacagtgctcaggaaaataattttctgttgaaaatgcaggaaaatagttcgaacggcacatttcttaacattgaaagctacagttgactgagatatacaaatcggatatcagtatccactgctaccaccatatagaagaataaatgattactactcctacaatggcaataatacattgggtagcatatcaaactttggagccacacaccatagaacaaaaagatataatactctatatatgcgctggatatgtcaacagttaacatcaaatatttttgcaacatcatatatttttgcagcaggaacttcccaatatgcatgtgagcatgcacttctgaaagttcttactactcctaccaatgacagtacaacttctatcaatcatctgtgaaggaaaataaaaagtaattatgaccttcttttcctatatagcatttctccaataagttggaaaatacccatagaataattatgactaaccagagaaagctgcagccataattaccttgcaccaagtgatgtgctctgtgagttcttctcctgtggttccatctttacaatctcgtaagcaggcacacatagtgatatagagttgctttgcctcattttctacacttaaagctgcagtgttagtttcttgtatcagaacttcattagacaataatatgtttgatttacttaacaaggcatggaagaaaatagatgacatgcagaatagtaccttaagatttcgttcccaaagtttagacatagcacatcttattttgaacttccatgcacaaaccacaacatgctgatccaaaatattgttcaaagctagtgttttaatcaaacaagttgacatttgtttgcaataagaagtcaacttgtattatattggttttgctcttttggccctctgttgtgagttgtgacctttaagtaatgatcaggcataactggattttatcgaacaaatcggtccatatatactgcctgcttgaaagagtcaacaacttaatccccttgaaaatactggctagctgcataaaaagttgttctgttgatggtgatcacccaatgtgttcatgaaactgaaagcaatcaagcactactaattcacagatttaggtttttttttttatgaatgatcatgttggcataagaattttgcaatttcgcgtgatcagaaaaagtatggagagatgtgaagataacatcaataatctgtctaaggacaaaattatgcttttacggagttggcatgcaacagtacacagtgaagcttttcatcaaacacatgatgtgcatatgtgtgatagagaacaagccatccactcctattaaagaagaatttagtgagacagtacacaaaccacaaaaaggattcctttgggttcttgtgatgtgctcaccatgcgtacacaagaaggatgcagtgatcagatgtgtttggactctccagcaatcagatgtgtctcgatcttgcatcctgcaaatgccaggaagaaagggatgggtgagacaggctagatagatggccagttttggggagagcaagcatgtgcggctgagcaatttactccttctcgccccctcctccgaagccgccggcgtctgtagtccctcgacatcgctcacgcggctcacctgacgagatcgatgccgctccacggacggaaactcccctttctcccctgcccacctgccaccgtaggggctgcgacgagccgactcccctttcttgtcgccgggatctgagtagttgataacacgagattgcagcagccagcagatgggaagcacagacctcggttgctcgggtgatgagtcgtgggatgttgggttcctcctggaaataaggaggtgatggggtagggggcgttgggtcttattatatcgtgaactgaagatgtggagataaattagccggttcgttacaagtgaaattttggcggcagtctctagacggaaagtcgagattggcgggaagtatttttatgtaaattgcgcatgaaaatagcacggtatttctttgtctaaaaactatgagaggccataatttaaaaaagttggtccacttgtaagtattaaattaaggtaattttaattttgtttatatatgtaacatgagatttacttctacattactgtttttgagatggaagtttgatcacaattctttaaccaaatataaatttatagaaatgtaataagtttatgagattaagaaattactttcaaaacaaatgtacatgtatcattgctatatgcacaaacttatcattttcgttgatattatttaaagttataataatttaatagaaacttttctaaaacattatatattttctagatcgaacgtagtaaatggtaaacacatccattaatttaattctatgttatttggctctaccatgctatctcaattagtttatcgtctattggtttatccgagtctgactaccttcataaatagcctgaagtgcaagtccaaacatcttatcactattttacttcctatacttttcacaaccaaccagagccgtctctattagacaccggtccttttaagttagtgttatgtcttcagcgtcctacgtgtaagctagagaagccacgtggctacaaacgtgcgaaacacaaaggtagcattcgatggaagatgattttcacaagttcagtgaagcttgcttgtggttcgcatattttgacttaaatttcattgtcaaagtaccctctcaattctttagaaaattaataaaatttctgccaatatgaagttaattgtgcatcccatacttatggacaagtatcctctacatgccgttgtgcctagagagcgtcgccagccgttgtcattgcagtaaggaataacaagatattatcactctttgcctccttccattctcattcatcatattacataaaaaagatacatatacttttccgtaaaattttattttccgcacattataaataacattgtatatgaaatgtaataggctattatttgttatagaggggaagattttgtttcattaacatggattaaactaatttattgataaggtgagtacaaaattattaaaactttatagaattccaaataaaactactactaatttatttctttataggtccaccctgtcagatttccatcaatctagttctattgtgcctgaaaaagagaaacacataaaactgattttgccgcgggtttgctccaaatttttgtgtttgtacgcttttttcctccctcaatttgccgggttttcttctccactatcggaagcagttatgatcctaatagagaaaacaaaacccatctccttactcctgaacataccgatccaatctctccagtcatcgcagcttctccacagcagatcccggcgcccgccacggccgacgacgtcgtcggtgcggcggtgcctcagccctgtctgctcgtccccagggcaagatcacccgcctcaacgcgcttctccacgccgtcatcgagatcgaggtcaactccgacgcgctccagcagccggcgcgcgccgacaccgagcacgcctctggccacagctactgcgggccgctccacggcgtccccatcctcaaggacaacatcgtgaagcgcgaccggctgaacacgacggccgggtcgttcgcgctgctcggctccgtcgtctgccgtgacgccggcgtgacggccggcctccgcgccgccgctgccgccgccatcatcctcagcaaggcaaaccccgtcccgaacggttggagcgctagacgctggtaacccctatcaccacgctaagctgtcgttttatctccagcatctcgtcttgtatgcaatgtgtttgtgaaattgtccataaagagcctcatgttgtcaattgacgtgatctggtccagccgcgcagcgccagcatgatgcatcatcgtgtcaaacgggtggcggcttacgcaggcgcgcatcccctgtgctttcagtttcagcaccagcagcaaccacctcaccgtgatggattcactggctgaatttgttcctgccaatcaacggcagctaatcatagtaagcacttgttgaatttgtttctgccaatcgatggcagattagttagcactctatttctttatgcacaccacatgttcgatactttgggccagtgcaaatcattggtcttattgtttgaaccgactcaccgctgtatacttctgtggatttaggcagctccagttagctactcacaggaagatcatttttgcatctactagaagctgcagcatggacatgatatatttgcaagatatggtgagcacactatttaataatcccaaacatcatattagtgctggcagtgattgtcatacttttgctcatgccataattgtttggaatgtcagattgcattaggaggtgatgaagtaagtgtttcaaacatgcaaattcatgtcatcatccaccagaactgccccctcgctactttctctaccgtatgtactagtaattattatagttatactctactttaaatttgatttcatgctggaactttcttaggagtaatatgcaacttgtgacctgtttttgctagcattattgttgttttgaatgaaaaattgatggttgcaattggcagatttctgctaacccgtgaatcagtaattaagttatgaatggatgcaaattctgctaaatacatagctatttttattcaggatagagcttcgagctacgacatgaataatactcatgtacatgaatgtacatgttaatacatacattaggataaatataataaagaactgcatgattgggtagtgtgaactagcctagcaaaatgcttgtgtttcctattttgtcctaagaggagttctgatttcagttctgttttttaaatcgtttggtggaaaatctgtcagtttttttataaaaagatatgtggaatgatgtagacactcccagtcttatatacggtcctcatcaaggttgttcaagttgcttaggattttattcattcatccttatgtttttttttgtctaggagcaacatctttgtaccatgatctaagctgtcaacgtagtatgatcagccatctgtggcctttcaattattctaattatgcatgtgacaagattgtcattttttttattcaattcagcgatctccaaggttgcatgtaagctttgtccactagatcatggatccaacacaagcctccacggtgctgttaacctcatctccacatatttagcaaacaaactttgtgtgagttaaagatcagattgtttaaccaaggttcaacaccactattttaacttgtggttattaaatttttaacacacctaaattacctttactttctatttcaacacagggaactatggatttaaatgctagtaaacagccaatgcttttctacagaccatttatgagcatttttggtagaataaaggagttttccgatccaatggccatttaagaattgtgtgaattagtgattattacagcagaagtgcgtggtcattgagtatgtttattaaaattctttgaagtggtggaatttaattacactgccaccacatatttgtcactgttgttgctatggaaagtacaaatattcatctatttgacatcaactgtttattttcaggcccattctttggttgtcaaggtggtaaatacaagtaaaggcttgttttgataacctctcttgcaggatttattttcaatttgttcaaggctgttggtattgcaccgaggaaatttattaccttctttttttttcaccttgaaatgtcatattgataacccaagtaatcatgtcatcaactcatatgtgatatttggagtgccttggagtgtattgctttgaaagcaatttgaatatcaacagagattgtacaatgttgctttctactctgctagtggagggtatttgttaattaagtccattgttgatggatgattatttgatttttgcccatgataatggattaaacttagatcaacatgctatctgcaatatatttatctgactacatatggaaattcttgtatactaaacaatgttatgaagtccaaaataatttacagttgagaactgcacaagtccaagggaactttagtctggtctattatagaaaaatggcaaaagcagaggtgattaaaatgagaggtatgagagaaaataaaagagtattagaaattttaagtaaacaatgcaatggaaagtaaacggttgatgtaaatctccgaacaaacgaatacaatacacatttgagttagtttgctatatggttagcagttttccttttttttttgtatatatatttggagacatgtcgcaaatcagagtaaaaaaacacaaagtaaaattaccacaacctaatatgcgctttccaggtgccactggattgcgatgcttgcgatatactccctccgtttcaaaatgtttgacaccgacttttcagtacgtgtttgaccattcgtcttattcgaaaaatttaagtaattatttattcttttcatatcatttgattcattgttaaatatactttcatgtacacatatagttttacatatttcataaatttttttaataagacgaacggtcaaacatgtgctaaaaagtcaacggtgtcaaacattttgaaacggagggagtacatgtttgagcccagatattattattattctttcaaaaaaaatcttggacaacagttgataatgtgattacgaggttcgctgaattggccactagtttggatggcgcaaacaataagtaaaatcatctacatgcacctagcaacaccaaggcacacttgcctacttggttgatcgagaattgcatataccaaaggtctagagttcaactccctccacaagcagcacttttttaccatatatttgttcgttgtctcagcattcataacattgtgttactataggcgtcagtaacatatatgtaggtgtatatttgttcgttgtctcagcattcataatattgtgttactataggcgtcagtaacatatatgtaggtgttactgtatgcagttcatgtgtaacataactcatatgtgttaccaagaagactgtaacacatagctttgtgttgctattgaactttcttgtaacacatgtcataaagtgttacaaaattatgttacaatatgtaggtcctggcgtagtgtaaatgcaaagaagtacaatggagttatagtatagggggttagggtttgcaataaacagcatttaagaaacacttagttgctcaaagctaaatttaaaacacgatcctataactatttaatattattaaacaaggccgtgaacccacacgaacctgccttaacccaaggtctacgatgattcagaccgaactggcaacccgaccctgggccccagctcgtcccaagccaacccaggccagccattccacattttagttattaagcaggttttaagaattgaaaacactaacttgggtacattgctaggcttgcccataaccgagggcgcggttattcgaataggttttactctgatcagaggtgtacatctttacccacaagacacgtcttcctcacgtgcaaccccgtgccacataccaccgcggcatatggacggaagacatgacatagtttccaacccatcctagccatagacaagagtaccgacccaaccccacctacgaccggaacctccgggacaggtaggcaggactgagcccctagcagcaggacaccagccctgtgccatgacatctcgactaccgggccgcagctcgtgtagccttcatttgtcctagagatgtccatcgacccctgacttcgtccatctccattcgtgtacttttgtttataaccagactgagccacaaactaagccttacccactagacatgtggaagtacggtagtgctttgcaacagaggcccgaagtccggtccttatgtggtcgaggtgctactatcaaaaccatgcaccccaagcccagcgtaaaaccattttgagagttttgaatagagggagaggtgtgcatccaattccacaatagtccaaccattccataaagtccaagagatatgaatgttcccaaagtctaaagttataaaaaccacctaatgttgtcttattaatcagcgaagcatctacctaaattcataccaggggaaccatgagtagagtgcccactagtaggggttttgtttattctagggtgaacaaggtaataataacaatagcaataataaggtcataacaaaggtaaataggcatggctaaataaaacagtgataacgcgggaatttaaataaagtgataatgcaataatttaaatcaaagtaatttcataaagtgggatccaatatgttcaaagaatgatgtgacttgccttgctcgctttcccaaacgtcggcttcaacctccacgaagagcggatctttcgaagctgcagcgtctacacgaccaacggaaaagaaaagggcttttactctaataaactccatataacaagcaagaacaaagcacaaaaatgggttcttgacttcttaagaaaaaattagagacttgaacggtccaattccgagttcaaatggccaagttatggccatttgaagtttatatgctctttaaatgaatatttacgaatttcttcatttaaattttaattaaaaataaaggtttattgcgtcagctgaggggaggggcgcgcggaccgggtccatgggagtggggcccacgcggcagcctctcggtccacggtggaccgggtgcacccgggctcacaccggccggcgccgtgggccccacgcgtcagccgcacccgagggcgcgggcggctgactgccgggccccacgcggtagccgctcggcgcgcccgaagacggccacgtcggcgcggccggcgggagacggcgcgcccgcgcccctatggtcgccggcggcggccataggcacggcggagcggcggccgaagaggggagggaaagggggaaacgaggcggcggtccacggctcacccaaggtcgacggcgacgacggaaaaggcgaccggagcggaggaaggcggcggcgcggctcgggtggacggggacggcggcgctccggtggtcggcgagctcgacgagggggtggacgggacggcggcgatgcggcgaagccggaggaggcgacgccggggcgggagacggtcccggcgagcgagaagaggcggccggaggtcgtcggcgacggaggagagagagagcgacggcgcgagctcgattccggcgaggagaaggcgcggcaaagggtggaaatgggcgaaggaggtgcggggagggtttaaatggggttgggaggggcagagggcggccggggaaggaaggaaaccggccgggaggtccggccgccatcaatggcgccggcgagatttgcccgggcaaatccggccgtttgaatgcgacagaaagagagggggg

SEQ ID NO: 27146 - DNA, 1594 bp, Oryza sativa
gggggagaggagagagggggagggagatgggccgaattcggcccaagagaggaaagggggatttttagggtttttctttttataaaacctttttaactttgtttatttcttaataattattatttgtgctctgaaaattccactaaaatttatttacacattttaggcttttaggaaatatacaaaaatcctccaagccttaattgacttttaactttgcacattttaatttttgaaggctttcacaaggattttaattattctaggcataatttaaagggtatattttagggtcattttgggacgcgacaattacgcttcgtagcggcccgaacctgtataatctcggtgctagtgtgcagttcagtagagtccagggcggatacaccatctccttgagcgagcctcttcccccggccgaactcacaaaggggggtctcacgatctcccgctagagaggatcactcctcgacagattcgaagaacggagtatgcatcggctgcgaaggcatcggctggagtctgcattgactgagatggatcggacagagggtagccgatacagccgatagaggtgatgcagccgattctgatgatgatgactttgaagatgcttctagaattgatcaaggtacttcacgaggattgccgtgatggagataaagctctcggataggcaattgtatctattaattaggatatttcatgtaatttccttagagatatgtttgggcaaaagtatgccgcaaagacttatggtatcttagagtttgttagagataaatatcgtgtccggcaaggacatatcttgtatctagggtataaatagaacccaaacccatataatcaattaacacacgttcaatacaatctcgtgcgcatcagccacccttttacgttttgttttcatctacgacgaagttctcgtctttcggcgtgagctgcactgtttcgatcttcaactagaggtaaacttgtcatgatggcttgcgttctcgggattagtgcttccatctttatgatactctaatattgtttatataattcgtcgagttatcacatatcctatataatctttgacaatattattatctaacctttaatcggccaacatctatcgttgtaaggcagccgattaggtttgacggagctcgtggctcctcaccgggagaccgcgcaggcccccctttgccagttcggccgggggcttagggtgagatctcaagctctctctgtgtgtggaaagatcgcgtaccaggaagaaacgtgagacacggacgatgtatacaggttcgggccgctgggaagcgtaataccctactcctgtgttttttggtggatctgtgtaagagcaagttacaaaatatcaaccagccctctcctctcccgggaaaatccccccccttctctctttgtgggcatggtcctccttttatatcttaaaagggggggggggggggaataccccaacaattgtttaaccccccttttcctttttccccccttttttttttttcccccccccaaaaaaaaaaaaactgacttttttcttttatggcggagattggtatggttgccgtccgaatgacacttc

SEQ ID NO: 27147 - DNA, 15196 bp, Oryza sativa
ctttaatcggccaacatctatcgttgtaaggcagccgattaggtttgacggagctcgtggctcctcaccgggagaccgcgcaggcccccctttgccagttcggccgggggcttagggtgagatctcaagctctctctgtgtgtggaaagatcgcgtaccaggaagaaacgtgagacacggacgatgtatacaggttcgggccgctgggaagcgtaataccctactcctgtgttttttggtggatctgtgtaagagcaagttacaaaatatcaaccagccctctcctctcccgggaaaatcccccccccccttctctctttgtgggcatggtcctccttttatatcttaaggggataccacatgtaccctctcctttccaaactggacttttcttctctttatggacggagattggtatggttgccgtccgaatgacacttcgatgggacagcccacacctacttccactcccggcggagacaggcgcaatgtgggatcgtggctgtctgttgctgacgcgaccagtgtcagaccggtcacagatcggtcattcttgtcctctatgcgtcagttcagcgatctgcatgatcacccttctttttatagcatcttgcctgtaatggttgggatgaagcctggtattcatttaaccagggctaacgtgccatctctaagaggtaacacgctagccccggctggagacgtgtgcctagaggctctcgtcttgacgggacggggcgaggcgtgcgtcagaccaccagtcgccacctaaccgttgatccgaccggtctgtgactggtcacagaccggataaaagagcgcgctgcattgcgctgcatgcaacgtgacacgtttgaccagaccgcaataaatgcggttaggtgagccctaccgtgttcacccaacctatgtacatagtgcaaaccccacagggggtcggggcacctcggccctcggggtcggggcaggagcaacccgaccccccccctcggggaaatcaggaggagggcggacacctcaccctcgggcccgacgtccccgaaggtgccaggccacgtgggcgattccatctgcctcaagcctccgggcgcaatactcccggtcccatatcaccgacagtagcccccggcgttatgtcagggcaatcatccttctcaagggaagcggccgggcatgacgccactcatgaagcctggtgacaggtgggaccggtctccgtgattgggcagaaacccaacggtctcaaaccacgcatatcggtaacggtgtcttggccgtcagtcatgggcggtctcttcaagactgccacatcacttgagcagcgctcgaatctgggcgtgtagatttgtttcgtctggagatatggtaacgtcgcttcggtcagcgagcgtaattaacgcacacacgatacgatctatctcgactgccacaaccgcatatcttccttatgcgccgcaagcgggcgaatgggattagtggaagcgtgggcgcgagaaacgagggagcgagatagcgagtaacgagggagcgagatagtgggcacgagaaacgaggagccgggctcagcgatggcaagggtataaagctatcgaggaaaggacttgctcccttcctttcgccactattcccctttccttcgccgtttgcgcccctaactctctctttgctgcgcctcaccttcgccacacacactcgttctcaaccctctctttctccgacgacatggcacggggctccgctctgctcgacggtagcgtactaccgccttcccgcattgtgagtgagaggcaggctgggctgccgcgccgcttcatgccggaatccgccaccggccgggagatagtgatgctgggcgaggcgcgcccagcgccagattacccggggcggtccatcttcttcctccccttcgcaatggccgggttggttcctcctttttcttctttctttatggatgttctggagttctatgatctccagatggcgcacctcacccccaacgcagtgatgactttggccatcttcgcgcacctgtgcgagatgttcattggggtgcgcccatctcttcggctgttccggtggttcttcaccgtgcagtcggtgtcgccgccgtcggtggtcggcggctgctatttcctgccgcgggggccggtgttgaaccgctacatcccctgcgtcctccgcaaaaagtgggatgactggaagagcgactggttctacacccccctcgccgacgaagcgcatctccgacttccgagccagcccccggtgcaggcctccagctggcgggcgccggtagatctggtgtcacgccctgaagttcccctcccttgctctaaattcataaaataaatcgttcgaagaaattgtttaatttaacctagagagaaaccctaaattaataaacgcaaataataatcggaatcggcatgtggaatttttcttgggttctacatgtcaaaatacgctaacaggatttttagtggaattttcagagccttggaaataattttaaccaattaaaatgagcaaagtgcaatattaaatccctgggaaaatcctttttctttttctttttctttttcctctctttttcctcctttttgtcaaatgggccgtcggcccatttcccttttcctccccctcctctctgctgggccggcgacaggccgaggcccagtccggcggcccaggccgcccgccgcctcctctctcggggtcgccgacaggtggggcccacctgtcgggcccgtctccctcctcccgccgatcccggcgcgccgccgcgcccgcaaccgtcgccgcgcccacgtctccgccttccccggccctcgtcgaccacgcccgcgcgtgcgccgcgtcccccgcgcccacttccctctctctcccgctcgcgcccgcgcccgagatggccgggattcgaaaatcggatcccgcctctctctcctcccccactccccacgtcggccggcgattcccgccgctcccggccacgtccggccccctctccccttatttaagcatcgccggcaccccctctctccttttccccatttcgccgacccctcccgtgctccccatcgtccccgcgccgtgcaaccacccaccgccgcttcttcccgctactccggccgccgctagccgtcgctaggctcgccgccgtcttgcgccgtcgccgccgttcgattcgcgtggccgagatccaccccgtccacccctcctccgtcgaagttcgtcgccggagccctcatcctcttgcgcacgggtgagcaccacctccaccgccgccgtcggccatggtttccgatcgccgtggtccatctccctctctctaacccctcccaaccttttctctaggtcctcccggagatcgttcgcccgtcgccgtcgtcctcccgtcgctcgtcgtcgtcgttcgccgtcgtctccactcgcgccggccaacctcggtgaaaaactccccctcctccccctttccctctcttccgtgtgcgtcgccgtcctccgcgcgcgcatcgtcgtcttcggccgccgccgccgcttttcgcgccgtctgccgtcgccgtccgtgccgccggttgccgtcgccggcgaccgcgcgtgccgccgtcgctcgccatgcttggcctgccggctttgaagccgagccgagcaggccgccttttccccccccccttgtgtcactgccagtagggcccgcgtgccggcgcctctccctcactctcttgagccgccgctcggtggggcccgcttgccagccgcccctctccctccttgagtcactgacccgtgggtcccgcatgtcggcgccgccccaccccttgctgacgtcagccctggggcaatattgcgcaataaattgattaagagtttttctttattagtaaaaacacagataatcttctaaaaatcataactaattcatccgagctccgtttaagtccattcaagtctcagtaaattcataaaaatgtgtagaatccattaaaaatggttttgtttcctgtttcagtagtcttatagcatgttttgcttgtgtgctttgtttgtcgcgtagatttcgcccgtttcgtcgattcgtggtttctcgaagacgttgctgtggttccatcagtgcgagagcaaggcaagtcatacattgcaattgatcatattgtacctaatttacaaatgtcccgcatttctattaaatattgcattgttttacaatatcatgtgggatgggtcctattactcagctatatgttgttttccgtatgccattgatagctggggtattaaaatgactagatgttggtttaggagatgcttagtcatgcttagttcaactagtgcacaaagggggaccacattaaagcatagacttgattattggcaatagctttggattagtgccaccgcaatggtgttggctaattaaaatacactacatggtgggctgtgggtgcatggttttgctagacgtgcccatggcgattaaggaccggttcgcgggatgccctggaagaatttatcgtacttaccacaagccagcgtgggcaacggctgggcttgtagtgtagcttttctctagccgacgtacccaggcgagggtgggcgtgatggagttgggtcggccggggtgtccggttgatcggctgccggattcaccgcggcacgaaaggggggctgcccgttgcctgctggggacgggggcgaaccctaaggtgtggtgcgatcggttagagggggttatacgaagggtcctgtcacggcctctttccggtatgtcgtggtggcatgtcggcgcacgggaacgtgtcgtggggctgtgtcttgtgggtacagttgtacacctctgatcagagtaaaactattcgaatagccgtgcccgcggttatgggcggtcgaccagattcaccgtgattagtttcaccctagtttagcttaatgaactggttagttcaggtggtggtttgggcctgttgcaacgtggtgtaacgttggacagtgattggttaatatggattaattactacaactgttttactgctttcaactactgctttgaaatgccggctttatgcaaaagaacctttagcctcccttggatatatcttgcatcatacctcctcttccggtgtgacttgctgagtacagtgggtagtactcagtcttgctctcttttcccccacaccagagttgaagtccttctcagttgaagatgtctcgaagaggttggtttcgtcgctgccgtcaaggattgcctgtggaatggagtcgcccgctgcaggagtcaagtcttcaggcttagctcgcttttatctttttccgctgcatttgtaatcttttatatttttgtaaggcgtggatctgtatgtcaacaattgtcgtttgtgtaccctggctggtcctggacaggggtttaatacacattcagcttagaaattctggttcgtgaatttctgggcgcgacatctgggggatggctatgtcgccgtcctcgaccgcctcgcgggcctgcgatcccaggggctcaccggggccatggtgtacggcgactacctccgtcgtcggattgcgccgctccagcggcgcgctcgggccgcctgggagtacatcgggcccgaagactatatgcggacccgccagggggtcagatgggattgggcccccgaggatttcaagatactgatccaacgggtgctaaatctcaactccgtggaggcgtccctcatcccccacggtatcctccccctctgcagcgacccagatcgcgtctccatcttgaccattatgacggcggtcggggcctcagaggagcaggctcctaagggccatggcggcgcaggtgggagccgccggggggatcaacctacccccggagggggtcgtgcttctgggccccgcgtcgggggctcggggagcaaccgccctaccgacgcccgggggaagaggaaactgggaggaacacctcccccatctcctccccgagggggcggggcggcacgtgccagcagcaggcgcccggagggggccgcgccaacatcgcagcccgagggggagcgcaagaagaaacggctgcgcaagatgggggagacagaaccatcccagggaaacctaatttcccctccaaggtggtcatttaaccgaccccctcgcaggttcgtcccgctctctttgcgaccgtcttttcttctatcccaaaagcaagttttaccttacctattttgtttgccttctggttttttcttctgcttcagcgatgtcccgtcgcgtccctcccgccatcccaagtccggccaatccgaggccgaagatccggcggccgcagaggaacagaggcgagaatctgaccggcgagaggccgcagatcgccttcgggaagctgaagaggccgcccgggaggccgctcgggttcggcaggcggaggataccgctcgggaggaggccgcccgggctcgccaagctgaagaagccgctcgggaggaggccgcccgggctcgtcaggctgaagaagccactcgggaggaaaccgcccgggctcgccaggctgaggcgatggcgtcttccgaggcggttcacaacaagaccgccggcgcgtcgctcgggcccactccctcgggtgacgctcaggcgacaacctccggggcagcttgcgacaaggccgcgggcgcatcgcctgggcccgctccctcgggcgacgcccaggaccaaacgggtccgggggacatccccgagctcagtgcgtcttctggcgggccgagccgcgtcgcattttctccaaggcggctcttctcctcgtcttctgccaccccgctgagtgccgagccccttctgcaagccttggccgccgcaaacaccgcggtgctagatggattcagcgcccaggtggaggccttgcgagcggaacgagcggagctcgaggccgcatgggcgcgcgtcgaggaggggcggcgctcggtggacgccatggtggaggtgggccgtaaggctcaccgccgccacatctcggagcttgaagcccgcaaggcggcgctggcggagatcgcccgagaggtggaggaggagcgagaggccgccctcgtcgccaccactgcgatgattgaggcgcaggactccctccgccttcaacacgggagctgggaggcggagctaaagaaaaagctcgacgccgcccagggggtcctcgacgccgccgctgcccgagagcagcgagcaacagaggctgaagcggcgtcccggcggcgcgaagaggcccttgaggcccgtgccatggcgctggaagatcatgccggcgccgtggagaccagcttggcggaccgcgaggccgccgccgctatccgggaggcgacgctggcggcgcacgaggccgcctgcgccgaagaggagtccgcgctccggctccgcgaggacgcgcttgctgagcgggagcgagctcttgaggagtccgaggccacgacacaacggctggcagacagcctgtccctccgcgaggcagcgcaggaggagcaggcgcgccgcaatctggaatgcttccgcgccgagagagccgcgctggagcagcgggctgctaacctcgaggcgcgagaaaaggagctgggcgcgagggagcgcaacggcggggcggctacgggcgaaagcgacttagtcgcccgcctcgcagctgccgaacacaccgtcgcggacatgcagcgcgccctggactcatccaccggggaagccgaggccctccgcttgtcgggtgagatagggcccggcatgctttgggatgcagtctcccggctggatcgcgccggtcgggaagcgggcctctggaaaggccagacaattccgcgctccaccaatctggaaggcctcgccccgcaccttaggaggatggcctgggctgtccaacaactccccgaggaactcgagaagaccatcaagtcatcctcgagggacctcgcccaaggagcggtggaactcgtgttagcgagttaccaggctagggaccccggcttctccccatggatggcgctggaggagttccctcccgggaccgaggacgatgcgcgcgcacgggtccgggatgccgccaaccacatcgtccaaagcttcgaggggtcggcccctcggctcgcgttcgcccccagctccgacgaggagggcgacgccagcggtgaggacgacggtggcgacgaggccggcgacccgggcacatttgaatgagcccccaggcccccgccaatctccaattttttctttttctttcttcttttcgtatagatcaacttaatctgcaatcaaaaatgatgaaaaatttctatgttaactttattttgctatgcatatgagttgaggatgatttgtgccgtggtccttttgcattttagcttgatttaagggctcgtgctcaagtcccgatcctcaaatggctcgggtcggggctagtgcctggggagatccacatgtcgagactggccaggccgggaacatggtgaccgagggttatgggtgacccgattgtgggtttttgccgattcccccccggagttcaccacgccctggggcacggctcggttctgggccccgcttggcgattttagctgaccgaaccgagcccccgagggcaaggttgagcacgagtgaccttatttcaagttaagattcttcagaaggaaaaacggcacagacacaacctttaggaaattgaaactgcttttattgaaatgctgaaataagaaaagtaaggttgtgcatgtgtggtagcccccggctaaccctgcacacccgaggggggtgcgtggttagcccgagcccgaaacctgacacccgaccccccccctcaggggtagaagcgacgaaggtgttcgatgttccacgggttcggcagctcagtgccgtcgcccgtggccagccgtacggagcccggccgggggacgccgatcactcgatacggaccctcccacattggtgagagcttgctcagtccagcacgcgtttggacgcggcgtaggacgaggtcgtcgacgcagagtgatcgggcccggacgtggcgctgatggtagcgccgcaggctctgctggtagcgcgcggctcggagggccgcgcgccgccttcgctcttccaagtagtcgaggtcatctctacgaagctgatcttgatcagcctcgcagtacatggtggcccgaggagacctcagggtgagctcggatgggagaaccgcttctgcgcagtagacgaggaagaaaggcgtttccccggtcgctcggcttggtgtggttcggtttgcccagagcaccgctggcaactcctcgatccatgaatcgccgtgcttcttgagaatattgaaggtcttggttttaaggcctttgaggatttctgcattggcgcgctccacttggccattgcttctggggtgggcaggtgaggcgaagcagagcttgatgcccatgtcttcgcagtagtcgccgaagagttcactagtgaattgggtgccattatccgtaataatacggttaggcactccaaaacgggccgtgatgcccttaatgaatttaagagcagagtgcttatcgatcttgacaaccggataagcctcgggccacttagtgaacttgtcgatcgcaacatacagatactcaaacccgcccggggcccgtttgaacggtcccaggatatcaagcccccagacagcaaatggccatgacagtggtatgatctgcagggcctgggccggctgatggatttgcttggcgtggaactgacacgctctgcatcgccggaccagatcgactgcatcattgagagctgtcggccaataaaatccttgacgaaaggccttgccaaccagggtgcgcgaggcggaatgggctccgcactcgccctcatggatgtcagcaagaagctcaacgccttgttcctgaggaatgcacttcaggaggattccgttagccgcgcgccgatagagggtcccttctaccagcacatagcgtttggaaatgcgttgtacgcgttcactcccttcgcggtcctcaggtagagtcttatctgtgaggtatgtttggatctcagagatccaagcgatcaatctaagggagtttggagcgctcccttcgggtcccgaggcctggactccgacgggcctcgggggtcggtcaggcgcatccgtctcccctaaggggtcgggtcgcgccgacggctgggtaagcctttcttcaaaggcgcccggtggggtctgggctcgcgaggacgcgagccgtgagagttcgtcggctatcatgttatcccgtctgggcacatgccgaagctctattccgtcaaaatggcgctccatacgccgcacttggcgtacataggcgtccatttgcgggtcagagcaccggtactccttacagacctggttaacgaccagctgggaatcgcctaacaccaggagacggcggatccccagtccggctgccaccctgagtccggcaaggagtccctcatactctgctatattattggtcgctcgaaagtcaaggcggaccagatatctaaggacgtctcctgtcggggaggtcaacgtgacccccgcaccggcaccctggagggacagagaaccatcgaactgcatcactcagtaggtggtgtgaggtagctgcgaggggttcgtgctggcctcggggattgagacggtctctggagccggggtccactctgccacaaaatcggcgagggcctggctcttgatagcgtggcgtggttcaaagtgcagatcgaattcagaaagctcgattgcccattttaccacccgtcctgtaccctctcgattatgcaagatttgaccgagggggtaagacgtaaccgcagtgaccctatgtgcctgaaaataatggcgcagtttcctcgaggccatcagaatagcgtaaagcatcttctgggcctgagggtatcgggtcttagcgtcccggagggcctcactaacaaagtagacaggccactgcacctttcggtggggccgatcctctctgctaggggacgtatccccggggcgttcttcgttcaagtggcctttcggggcacacttgtcttctgtgccgatgacctcggggtcggaagatgaaaggggcggccttccctcagtggcctcggggccgtcctgggggtcgggggctcctggcatcgtcggacaagcgggcaaagggccaactccggtcgtcaggggcctctggcctccgttcgactcgggggcctcttctccctgctctttcccgggtcgagtcagcacagggttagcctcggggtcagagggcgttaagtgcggccttcccgcagtggccttggggccctcctgagggtcgggggcacctagcaccgtctgacaagcgggcagagggccgactccggtcgtcaggggccgtaggccaccgtccgactcgggggcttctcctccccgctcgctcccgggccaagttagcatagaatgggggtgcacgaaatgaggattgtcttcaccgcgctccacaaccaacgctgcactaactacttggggggtcgccgctaagtaaagtagcaggggctcatttggctccggggcgactagaaccgggggagagctaagatatgcctttaactgagtgagggcatgttcagcttcctccgtccaagtaaacggccccgagcgcttgaggagcttaaacaagggtagcgccttctctcccagccttgatatgaaacgacttagggcggccatgcaaccggtgacgcattgcacatccctaagtttgctgggggggcgcatccgctcgatagctcgaatcttctcggggttggcctcaatgcctcgggcagagaccaagaacccgagaagcttgcccgcaggtacaccaaacacacacttatcggggttcagctttatgcgggcggagcggaggttctcaaaagtttccgctagatctgaaagtaaagtttcttggttgcgcgtttttacaaccaagtcatcgacatgagcctcaacattacgtcctatttggctacccaaagaaattcgagtagtacgttgaaaagtaggacctgcattctttaacccgaagggcattgatgtataacaataggttcctacgggggtaatgaacgcagttttctcctcatcctccctagccatgcgaatctgatggtaaccagagtatgcatctagaaaacacaaaaggtcgcaccccgcagtggagtcgacgatctgatctatgcgaggcagggggtaaggatccttaggacatgccttgttaaggtcggtgtagtcgatgcacatccgaagcttgccgttcgccttgggaacgaccaccgggttcgccagccactccggatggatgacttcacggatgaatccggcctccagaagtctcgccacctcctcgcggatgaaggcttgacgttccggggcctgccgccgcactttctgccggaccggccttgcgcccggccgcacggcgagacggtgctcaatcacctccctggggaccccgggcatgtccgctggtctccatgcgaagacgtcagcgtttgcccgcaggaaggagacgagcgcgtcttcctatttgccatccagaagaccaccgatccgtgtggtcttggatgggccgtcgcccaaggcaacctccttgaccgggacctcgtcgcatgtggcaatccgctgcctcggggcggtgggggcggaggtgccaagcctctcgtcaccaccctcgggcttggtcgcagcagcgaggtggtccgcgcgctgctccatgcaagcgagcgcgactttaaggtcgccacggacagagatggggccaccagggcccggcatcttcatctggaggtaggcgtagtggaccgccgccataaacttcaccaacgcgggcctccccaggaccgcgttgtagggcagactgaggtccgccacatcgaagttcacccgctccgtgcggaagttggctgatccaccaaaggtgaccggtaggtcgatgtgacctaacggccatgtgtgccccggcgtcacaccaatgatcggttgagacggctggagcaccatccccggggccttgatagcatcaaaggccgcgggggaaaggatgttgagagccgctcctccatctatgaggacacgccccaacttcacattgcagatggtgggggaaaccaccatcgcaatctgccctccccgggcaacgcacggtgggtggtcggtctggtcaaaggtgagggccacctccgaccaccgcgcccgacgcgtcgcctcatgagtaggggccgcggccagaagctctcgcttcatagccttgaagctccggcgagaaacgtgagcacacgctcccccgtcgacagtggcaatggtggccccaggttcttggaaacctaggtcatcatcaccatcatcgacgtcaacggcgggggccttctgtctggcctcacttcgccgtttaccggagggaactgccgcggacttgccctcacggcgttcctgcctcctgtcctcctcccacttcctcgttcgctcagccaagtttttgactgcgcgacagtccgcgagatcgtggagggaggtgttgtggacggagcaccacttgctggctgggcgctccctgctgggagtaccagcctctttctttttgtcgctcgcaggcctcccctttcgggtggcccgcggagcgccctcgacggcgaggacgtgaccctcgtcgccggaatggaccgaccttttcttcctcctcctgtcacgccgccctgtctgagcggcggatccgggggcggccgaagctgccacaccggaaccggaggggttccaggtccaggcctcctccttacgagccactcggtccgcgagctgaaaaagctctgcggtagtctggggctctttggaggcaattttttcgagcatgcggttgtgccgcacacccccctgaacgcgtagatcaccgcgtgtgcagggatgcaaggtatagtattgcggacttggcagaaacgctgaatgtacgagcgaagggattcatcatcccctcgctgtactgcgtgcaagtccgcttcttcacctgggcgtggataggtgccttgaaagttcatggtgaactgctggcacagatcctcccaggagtggaccgacgcgggtggcaagttcattagccaaccccgcgcctgtcccttcagggccatgggaaagaaattcgccatgaccctgtcgtctcccccagcggcctcgatcccggtcgtatagacctggagaaactcggtggggttgacgctcccatcatacttctcggtgatggtgggccggaaccttgggggccaacggacattccgaagactcgccacaaaggctctacagccaacaccaccaaccgggggcacggagggctgatcctcacgtccatgtcgaggtgacaccctggacgaagaggcaccctccgttgcgcggggagcacgccgatcactacgtcggcgctcaatgtcgaggcgggcatccggctcttcatgctgatcctcccgagtcggaggcgccgacgagggagtggtagccgaatggcgtgcagcagccgccgctcgccgcgccctccgtcttgacgacgcggaaccggtagtggcggcgccggaggtcttggtggtggcggaccgtccgccagcacccaggcgttgctgtgccgtcatgaccaagttggccacgtcgtccagccatcgctgggctggagactccgggtcagggacgacaggcgggtgacgtaggagcgcgccaacagcctgaagcgcgccttgaggcgtgctgccgtcgccgtagacgaggaggcgacgctccccatctcgccgttctcctgcaccacccgcgactggcgatgctgcggatttttcgactctctcgagcgcttccccccgcttgggactttggcgtggaggaggtgggggagtacgagctcgacggcgcgggtttggctccccgtcgtcgccgctcacactcggagagaggtcgtgcgcctttgcttgctcggccattaggctgaacaagggaaacttggcgcacacggaagagtatgagagctcagaaaacacacgctgagccccctacctggcgcgccagatgacggagctcgtggctcctcaccgggagaccgcgcaggcccccctttgccagttcggccgggggcttagggtgagatctcaagctctctctgtgtgtggaaagatcgcgtaccaggaagaaacgtgagacacggacgatgtatacaggttc

SEQ ID NO: 27148 - DNA, 5755 bp, Oryza sativa
gacccccccccccctcggggaaatcaggaggagggcggacacctcaccctcgggcccgacgtccccgaaggtgccaggccacgtgggcgattccatctgcctcaagcctccgggcgcaatactcccggtcccatatcaccgacaaggttaaatactaatatcgacttagattatatagggtatccaccatcctatgaaatatccaacggcttgattgtctagatactgttattctttccatacttataactgcatcagttaagtttgaccttataagtcgtgattagaatctcaatctctagcctgcttttggttgccgattagggtagtatcggggtttcagccgatcttacctgatttaactcctttatattttatatgcttgattgatatgttaaatccgccctttatattaagatcttgttgcatttaggtatattaaacttcctgtttgatatattttgcttgctttaatatcttaatatagaatggtatcggagttttagccgatacatgctagatctatctgatcggctatgctatgaatgcttataatctccttgttaatatatattttgatctaagtgatttatactatctcggcatggcgaccgatatatcctaatcacttgatttaagtatatatcgacagaagcattatataccattaatatttacagccgatcgaatagatttagttctttctttcctatttatgactgccgatcgattcaaatatgtcatcggctcaaagataaatgatatgtcatcggcgactggccgattggctatcatttatggatttaaccgctatttttttgtctttatttcttgttgattgcaggatcaaatcaactggcacgctcacgaacctaaaggcaagattttggacctgcactgaagttaagcagatcttccaggccagtgtgtgtttttcgcatcaacttctattgtttgtaaataaataaatagcgtacgaaattcatttcactgttgccggcccggcagaaaattcatttcactgtttacaatcgtttctagcttcagcattttacagcctacttacaagctagctagctagctgacttggcttccaagcagacacaagctttagtgctcatcctcctccgagatttcagttagctcagagaagaaatggtaagaatccactgttagtgtgaacgcaaaatatgatcttgcggctaaacctaaagtcggcaaagagatattttgtttagggtgatcgctacagtgatcgatctctcatgaacatccctgatcgggggataaccgccataccctagtgtcggttccccctgtgtgcagtggctataaatagagatcaatacctaagtgttaaaccctaagagatttctctcgctacccgatcaaacaacccactgaaacacagggaagaatcaagacacgattctcttcgtgcttccaaactagaagagaagaaagaagaacaaagacagagagaatgggaactccaggagatcaaggtatgatccaatcccattttaatttgtagttccactttgtgccaaaccgattctatcaaatccaacaatggtatcagagcaccgggttggcctcaaattggaactcaataagtgtttatgttcaaattgttcttcgtgttcatgcccaaatccctctgttaaagttgagttaagcccaaatcatgcaatcccgaaatataagaaatggaattaggccttctagggtttcgggttgaagaaattagaagaaggggaaagcaaaagttcatgcaaatctcagacaaatccccaagaaccgaaaccctagctacagtaagatcccaaatttttccccaaatcatgaaaccctaaccctaaaatcaaggggaaaaaggagcacggcgggcttacttaagggccatggtggccggcggcgaccaccgtgtcgccaccgacgccggaaagaggcgagcgcgcgcccgaggacttggtccccgagcggcctcgcgacccgtcgtgctggcccggctcttcctcttcgcgtgctcgtctcgccgacgccgcctcgctgaggtagccgtcgccgccccgtctcgccgtcgccgccgcggatcttcctcgcgcgagcgaccggcgggtgcttagggcaccgtcgagcaacgctcgacggggatgcgcaccagctatggcggcacgcagccccggcgagcaaggctcggcggcgccacctccaccccgtcgtgcgccgcttcgccgtcgtcatcgtctcgctcaccgtcgccgcgggcgtgagagaaagaggggaggagagaatggggctagggttttcaggggggggggcggccgcgcgccggttttgtcccgcgcgggagcgatcccggccgtccgatgagatggacggctcggatcggctcgtcccgacgcgggctaaccaggccgcgcgggaggcggcgaatgccggcctaggcccaggttgttgggcctggagcccaggcggaaggcggcgcggcaatgacgggccaggccgagtgcggcctggctcgagaacgtggcccagttcaaaaaaaaaggttatgtgggctgcatactaatgggcctaattaaaaggattgggctgagataatattacaattaaaattttcttttttgaagaattatgattatgattatgatatttgtgtttaaacattgaagatattttattatgttttagttaatgataataagaataataagtgattttgttatgtgataaaattctctttcatttatttatttattttatgatcattacattatatttattacttaaagttattattgttttatgcattatgagtttatttccgttacaaataaatattataattaagtgtgacaaataattgtcattctggccaaagctgattgacttttatttgatcacaaaattttattaattcaattcaaatctggctaaagctgttttgattgaattaataaaaggagttttaaacaaattaataaagtgtggtttgtatttattattctggccaaagctgattaataaatacttattcacaaaattttattgttcatttccttctctggccaaagctgttttggatttgatcaataaaagaaggtactcatcttatgcctcacaaatttccggaataatgggcaatattgaacaacttaatggaagtaattatgcttcatggaaggagaagctggaaattactctagctctattggatattgattatgccctccataatgatcctccggttgagcctagaccggaaaatgagaattatgagacattaaaaaggatatatgatgaagtaaaggcaaaatgggatatttcaaaccgtaaatgccttatgattatcaagagctccattattgacgcaataagaggagcagtcccagatactcagacagccagagaatatcttgctaaagttgaggaacaatttaaaggctcttctaaggtttatgccaccactcttattaaaagattggtcaatgaaagatacgattttactgaaaatctgagggaacatattatgaagaaatgtcacatggtttctaagcttaaatcaatggaaatggaaatctctgaaggttttcttgtccatttcattatgtcatctctgcctcaggagttttctccatttacgatcaattataatgcaatgaagatcaagtggggcattgatgaattaatagccatgtgtgtacaagaagaagaaaggcttaaggcagaaagagttgaccatgcaaatttatttaagcactccgagaagaaaaagtataagaaatttaagaaggagtatttgaagcctaagcctattcaatttaaagaaaaagggcaatcttcgaatcaatcccagcagaataaatctggaggaaatccctatacagaagaaaagggaaaagaaaaggatgggtgctacttttgtggaaagagtggacaccgccaaaaggactgtattggatttatgagatggctcagtaagaaaggtactgatgttatttcttttgttgatgaatccctaaatattgattatgccaccaattcttggtggattgactcaggagcgacaattcatgttgcaaattccttgcagggattcgctatgaggaggaccctaagaagagggcaaagaagaattagagttgctaatggagttgaaactgaagttgaggccattggagacttcactctcacacttcatactggcttcaaacttcagctgcatgatgttctttatgtaccctctatgaaaaggaacttagtttcagtttcacgtttagataacggtggttactattgtacttttggaaacaatagatgtataattatgcatgataataaagatgttggtctcgccgtttgacgggaacaactttatcaaatctctgtgtgcgatgccacctataatgttgactcctcctcaaatgcaaatgtcaataccaaacgaaaacataacgataatgagacttcttcgaaattatggtagtatcgtttgggccatatttcaagggggggaattgagcgtctcattaaagaaaacatcctttatcctttggacttctcagatgcagatgttgatcactgcattgattgcatcaaaggaaaatattccaagcaaatcaagaaaggtgcaaatcgaagtatgggagttttggaaatcatccacacagacatctgtggtccatttaatgaaaagtcagtcgatggatttgattcattcattacattcaccgacgactactctcgttatggatatatctatccaatcaaagaaagatctgaggcattagacaaatttaaaattttcaaagcagaagttgagaatcaacatgattgaaagatcaaaattgtaaggtctgaccgtggtggtgaatactatggtagacatactacttatggtcaaattcctggaccttttgcgaggttcttacaggaaaatggcattaaggcccagtactcagcaccaggcgaaccccagcaaaatggagtagctgaaaggcgtaatcgcactcttatggatatggtacgaagtatgttaagtcactccactctgccggtaaagttatggatggaagctcttaaaacagctacaacattcttaacagggttcctagtaaatcagtccctaagacaccttttgaattatggactgggaagaaaccaaccctaaattattttcatgtgtggggttgtcctgctgaagcacgagttttcaatccaaatatgggaaaattagacatcagaataatcagttgtcattttatcggttatcctgataagtcaaaggcatatagattctactgcccaaatccggaagggttttttttaaaaaaaaggtttcacttggagaccaagaacacgctgtgttcttggaaaatgacataatcaaggggagtatgacacccagagaagttgttctggaagagaaacgaaattatattccaatgcctataattgaagaacccgttttctcaacacatactcatgttgcaccttcaatagaaagaaataatgatgcaacacctgctgaaactcctgcaactacttctagtagtgtatcaaatgatgagaataatgaggatgctcagcagccccagattgtgatagatgagcaaaataacgaacccgtcagaagatcacaacgagttagaaagtcagcgattccaagtgactatgtcacttacataaatgaagaggtgaataaacctatgggtgaagaggtgaatgagcctatactagataatgatcc

SEQ ID NO: 27149 - DNA, 5566 bp, Oryza sativa
ggcaaaagtggcaaatagttaagaaattacctctctcaagtggcaaattattaagtacaaatctaagaggggcatttggataattggcagatctaaaagtggcaaatagttaatttccccgccaccgggacactatagtccttggagaaattggcccacaaacagttggacggtctaagtttaaagcccaagtacgtcacttgtatggcctaaatagtttgcaattatatatccttgcgatattttagtttattataataaaaaaattaatttcttaagagacattttgatcacaatatgaagagattttatttgggggcatctaggaatcgggcgcccgattcccaggtgcagtagactcgaatcctcctcctcccatgcgccaatcaaaaatcaactaagtaaagccactgctatgcccagccggaacaagatatttctacgtcagagggacgtccgtgccggatcgtcgtccgtttcacatccgacggtagcatcattttcagaccgtgctcctccatcgaccatcgtctccgtccagttgcagaccaagggaaaaaacgaggttccgctcgtccgcccgccatggccacgatgtcggcgaggcgcttctccgtggatgccatgaccaggcagcagaggttgacggagctgagtacgacgagcagccagtagaagcagtcgagcctcccgtcatcgaggttatcaacgagctagccgccgtcagcgccatggccggtgaaggtgatcttgtgcacgatgatgatgagcagcgtgctgaagaacaagctgatggcgcacatgctcaggaacagactcgtgttcatggtcttcatccctttggagtttggatcctcgcggaggaagacgttgaggagcatgtaggtgaaccgtgaacgcttcgccaaagctgacaggagaaactggggcatcagcaggagcacggcgctgtgcgacgacgatgatgtcagccggtgccacaacggccaagcgggtgatggagagaaagaggccacaaacacgcttggagctggggcttgccaacgtcgtggctatggcggacgagcggaacaccagcggtgttttcccctcgcttggtctgcaactggacggagacgacagaggtgcatgggctggaaaacgatgctaccgtcggatgtaaaacggacgacgatccggcacggacgtccctctgacgtagaaatatttgtacgtccctctgacgtaaaaatagtttaaaacaaactttaaactatttttttcttaaattatttaccaattcacaatccaatttcaccactaaatttgttgcaattaaatctttaaaacaagactacacatggctataattcaatgaaaaaaatatttagctttattaatgaattgtttttaatgttgcacctatatcatttaaatgtttcatgtagtattcatatgatgtttcactttttaatttgtaaatgttgcacatgttgttctaggaatgtttcagcatgtactttataatgttttaataattatagttccaccaagtagtaaaatgaccaatgaagttgtttacatagtttaaatagtttgaggtgtcgatataactggttttgtgggataggaatcagatctgacatatatttgagggagacaaattatactcctccggttgataaagatccagattggtggggaattttttgtatttttagatttttttttttaatatttacagaaatattatagcgccgaaaaaatttgcaaaactagaccctgccgcccttcgcaagggcggcaagccgacgtggcacacggcgcgctggacggcgcgggacggccgtcctcctgccccctcctgccctcttgccgccctggcaaagggcggcaggacccccttgccgcccttacagaaggcggcaggcctggccgcctataaagcccagccggctcctttgaggagcccattccctcctaacctctccacatcaaaaaaaaaaaaaggagaaggggaggagaagaaaagaagaggcgaagccctgccagtttcaaacttcgatttcaggtaatattcgtagattatatacgtgactaaatatatgataaatgcattgtatgaaataaagttttacctgtggtactatataaatatatattgttagatgtagccatgtaggtaacttagtagatctgtagtatttgtagttattaggtttgtagttttaaatgttgttgagtaacattgcaatagaatatataaaaatttaggtacgttgcaaagaagatattacactgtagtcgtttattatgtaaaataacggcctagtaattaactttgcagatatgtccagtaaacttatatttcaactataccatggtcaaggaaacgtccgttatgggccaactggggtagatctgtcagaatttattgtaacagcaaggggaattgataggccagccgagaggagtgtaccttctataaaaaaatggttgatgcggggcttgggagttgatccacagactagtgacattacaatctatgttgtagtaagtcgggcaacagagggtttttattgggaactaatgccggttcaaaactctgggatgtggagatggtatgtggagaatgcattgcaacgtgggtggcctctagctatggttccgtatgttcatccgaaggatccaagtgtacagatgaacatggatgatggcgaggggccaagtgcagaagtgaatgagattgaagtggatcaggtcaacgcaccagaggaagatggagtagctccagtagtagctccagtaggcatgcaacctggtggagtggctgacgagggggagactgtgggtgccattgtggacgaaatggaaaaagaggatagtgacaacgagcgtgtcgaggaagatgattcgtcagatgatgacgagaacaatattaatccagctgaatgggctagtgatgatttttctggtttggtcatctctgaaggggaaaatgtgagatgggagtacaaggaaaacgagattatcgagggagcgaggtatggtaatggagaagacatgaaggaggcggtgaagcattatgcagtgtcacttcatagggagttttgggttgccaagtctaaccggacacaatatgaagttaggtgtgttaatgaaaaagatgggtgtccgtggagagtgcacgcctataaggggaaatggaaggactactggacagtgtcggtcgttacgaaacatacttgttatctacctggtgttcaaaaataccacaggaacattacatgtgcatttgttgcatctgagatgtatgcgcatgtcgtggacaatctggcatatgaaccgaagtcaataatccgacatatcgaacagactttcaagtatacaattagctatgccaaggcgtggagggccaaacagaaaataatagagatgagatttggaacttatgaagcctcatatgacaatttgccacgtctgctatctgttatccaacaaagaaaccctgggacctcttgtgcactcaagacattcccctcaattgaacatcctggcaagactgtgctgcaaagagcgttcttagctctacatgcatgcaagatggcattcgtgcactgtcgtccagttctttgtattgatggcacatttttgaccgggaagtatcggggccagatactaacggcaattggggtagatgggaacaatcaggtattgccgttggcatttgcttttgtcgagagcgagaacaccgacagctggtactggttcctccatctggttaagacagaagttgttggtatgaggcccaatgtgtgtctaatacatgacaggcacgccggtatgcttcgagcgatagaagagttaaagtttgggactatggaaagaggataccctggccagtgggaagatgtacaaagcaggtggtgcatgcgtcatatgggagctaatttcttcaagcaatttaagaacaaggagttgatgaacatgttcaagaggctatgcaatcagaaccaggagaaaaaattcaatgagctttggaagagattagatgagttgacaggcaaatgtagtgaccagcgtgcaacaagaccagcggccgctgtacctgaccctcctcaagcactcggagctctcccaacagacagtgtaacattggttagaagaactggggagcaaattcgaaaattttctcagtggattgagaatgagccaaaagagaaatgggctaagacttatgacacaggtggtgctagatatggtataatgacaacaaatttggcggaagtttacaactgggtgatgcgcggtgtccgtggactcccactagttggtatagtggagttcattttacatgggacatgcaagtatttcagggagcggttccaagcagtttttccctctatgccgaacaacaacattttatttggaactttcatggagaaaaaactagcggagtggcgtgcaaaggccatgaaacatccgagctctagtgcaaggtacccaacaacacaggtttgaggtactctgccaagacaaggcaggcaggggtatctaccgcaagagagtaaagcaggagtgcgttctcaaagacgacggcacatgtcactgctcctgtagaaagccgacgctgctccacaggccatgcacccatgtcatttccgcggcatctgagtgtggcatccaagatgcagtatatgtgtcacaatacttctccaagcaagcaatatatcacacatggagtggcgagatttttggcttcggtgtagctggggagttcacaaagattaacgatctgataatctatattcctgacccaacgaaactccgagacaaggcgggacggaggaagactcggcgcatccgcaacgatatggatgagtcggaggcaggcagggtgaagcggtgcagcaaatgcgatgaacgtggccacacctacaagtattgtcctaaagacaaggaaaaaccaagtgcggcggaggcaggtctatcaggatcagcagcagatggagctcgccctacgggtgaaggcactacttcaaggcgaccccgtcctagacgttctcgtggaacgaccggttacgtggtgtagttcgtgtgttgtatgttggcaaaaggctttgcttgtaatttcgttcgaacttatcgatatgttcgcattgtgttgtgttgcgaaccacttgttagacttccgcatgtaatgtctttatgttttacggcttgtaattttgttttatgttatttcattctcggtacgtgcctttgtgtaacgaaagttatgttctcaataatctgcactcttgcatgtctctataagtattcttccgtttcagataacttgtttttacaattatattattaccttcttatttaccctaacatgtaacacgttacttgcagagatggcacatcctgagttgttggatccggcgatagatcagcgccaccggtcgtaccttactggggtggagggggctcagcttgggacgttccgtccacggtcgtcacgtgagcgacttttggttcacgactccttcgtcgagaggtatggttttactgtgttcacgacaccgggcttaccttacta

SEQ ID NO: 27150 - DNA, 8146 bp, Oryza sativa
cgcacccgtgcagcgcctaccaggtctaccgctcgagccgttgcagcagtaccgcaacaccgggcctaccaagaggtggctgcttcagttcactgtaagttctttctacctaaactgacgtgtattatgtacgtaacttgtaaagtgcctaacatttcatccaacacttgcaggttgaccagctaccggaggaggccgacgagtactccttcagccgttgtttggaggcgtacttgttgtggctttttgggtgggtgatgttctgtggtagtcacggacactcggtcgaccggggtctcgtgcactacgccaggagcattgccgacgccgcggtcggtgaggtgcctcagtggagttggggctccgcgttgctggcggctcaataccgtggcctctgcgaggcttgtaccaggacggaccctggcgcgatcttcggtgggtgccctctcttcatttctctttgggcggctgagaggattgcgatcggccgcccccttgtggagcaccacccttacgacgcgtcgctgtacgagaacagaccggcggtcgactacccaacgatgggtactctgtggtgccggcgtcaggtacgtcgctagtatttggtaatgttgtcctactattgttaacttcatcctacgtcacactgaccttattgtattgcagcgccgatgggctcacgtgcaggttaggcggtcgtacgcggaatttgtgatggagttcgaccgccttctgccgacggacgtagtgtgggagccctacagtgccttgcttacccacagtcgggcgccgctaggcctgtccacactctgcacgagggaccaggcgtactggatgactacggttccgatggtgttcgacatctgtgtcgagccgcacgcaccttaccgcgtgatgcggcagttcggcttccgtcagtcctttccagtcccgtttccggcgggcgtcacggctgccgttcaccggtaagccgttttactacgttttaatatgttgcattaacatcgggctgtccataataatttgctttgtttgtcgtttgccctaatacaatacattaatttgcaggtactcgcgcaagggtcagcactcagctggtcactggcctgccaagttggggccttttctcgacgactggttgcttgctaccgaggaggtcgtggaccacgcgggagagccacacacggaggaggggtatgaggcgtacctacgttggtatcagccacgcacccgtactagagtcacctacgctccgacggagcaacaggcccacgccgcgagcgccagagacctctacgccaggcaccgcgaccaggacttcgctcgtgcggtgagtaccttgcatcgcaccatcgtctcatcatcctttctgttggacaaaggctacgaatatttacgttgtaattaaccgtgcaggccgttgagtgcaacagggtcgtcgttgatgctacaacggcgatccaacggttaggcgcggggattgaggtgggggcagacgagcacctgtcgacgtacacgcggatacgggactcgatgcgctcggttctccgtgcgctgacctgtcgtgctgccgacgttgctcacgcagacgcagcaccacaggtgcgtccccgaccgactgctcctcgtccagctgcgcacgttcctacgccgacaccccctcccttcggaggtacgtatattcaaggtctatttgtacatcatcaatcaattgatactcaatttatgtgtaagcttacaagtgtcgcgtcgtcgatgtgtaggcttcgctcagcctgggacgacgccgggcgcccactcctggcaggctgcggggtcatcgtcacaggcaggtgtgtcggcctcgctgtctgcgcagttctggcaggacgccgggacttcgtcacagccgcccggcacgtcttggcagggtcctaccgggacttcgtccgagcacgggtgggcttccgccacgcacttcgacattagtgacttcgacttcccggacattatcggtccctcacagcttggaggcgcaccgccggtgcacacgcaggagcagtcgccctccaccccactcccagaccctcgcgctacccgtgctgtcccaccggatcgcttcacgtactcccaggaccacgtgcgagcacaggcccggaggaccaagcggggtcgcggcgcgagtcacggccagtagagcagacatctctttatttttctttacattcttgtactatatggttgtaaactgaatatgttgttgtttatattcgggactcgcattcctacacttcgctgttacgttttccaaaaacaggagtcctttccagccgttgtgcagagaggaagctgccgcccttgcagagggcggcaagccctcggctccccgcggcccgtgcgcgccgtcaagacgcacacggcgccgtgtgccacgtcggcttgccgcccttgcgaagggcggcagggtctagttttgcaaattttttcggcgctataatatttctgtaaatattaaaaaaaaaaaattaaaacaaaaaaaaactcgatggtgggccgaattgggtcgctatcgatccaaattgtagtgggcctcaaaggacttgggccagtttcgtcgaaatggaccagatcctttgtgtgcatggttggacgctgcaatgtttagcttttatcagaaccacacgatttcaatccaacgatgcggatggaagttcgcgagcaccacttctaggagatggagccaggagggtccatccaatagtcttgtactgaatttgaatttgtcccattttgatttgcacaaatttgaagcgattgaatttcgtcgatcgatcgagaggaggattttacagtggaagggttttccagccgggcttacacacgatgaaagtccacgaaccaaacacaaaacaccttcttgattaattaattacgatgaattcgtttgattaattagctaggaaatggtgcgtccgccgtcgacgccgacgacctggccggtgatgtaggaggccgccggcatgcagaggaacgccaccgtggccgccacctcctccggctccgccagccgccgcatcggcagccggtccatctcgctcttgatcagctccgggtctatcgtctcctgctccatccatccatccaaattaatcaatcaaaatcaatgatgtgattaatcacactaactgtacaattaatcatgcactaattgcatatgagtaactgagctggagatcaattgacgtggtatatactcccctatttaagattttagattataagtagttttgattttggtaaaaatcaaaatgctttaagtttaaccaagtttatagaaaaaaaacagttacatttacatcccaagataaatatattgtaaaaatatatttaattacaaatttaatgaaacttatttggtgttgtaaatatcattatatttgtctacaaacatggttaaatttgaagtaattttgctttgactaaagtcaaaacgattcctagtctgaaacgaatgggagtatttagcttacgtcttggcagatatcagtcttgacgcctcccggcgcgacgcagttgacacgaatgccgtcgccggcccactcggcggcgaggctccgcgtgagctggttcatgccgcccttggtcatggagtacacggccagcgccggcatgccgacgctgccggcgacggaggagatgttcaccacgcagccgcctccgccgccgcgggcgccgccggcggcgagcaggagcgggtgcgcgagctgggagaggtggaagcaggactcgaggttggtggccacgagcacggggaagtcctcgccggagcacgccgccgccgcccggaacatggtccggccgacgttgttgacgaggatgtccagcctgccgccgaactccgccgccgccgcggcgaccagcctctcccggtcgccgcgcgcggagacgtcgcagacggtggcggtgacgcggagcccccgctcctcccaccgccgccggctcgcctccagctccgccgcgttccgggcgcacgtgtgcacgcgcgccccgaatccggcgagctcctccactatcgcatgcctatacggtcgaacacgtatacgtaggtatatacagtcgtattatactcgtatatatacggtgatgtgtatatatatacccgatgcctttgctgccgccggtgacgagcgccgtcgcgccggcgagggtccaccggtaggggatgctgcgagctgcggcggccgccatgatcgatcgagcttggtgttttctctctctatgccggtgtagctgagtgctttgggatgaatggattgtagacgcatatccgtatacatatttatactagtagctcgcacgtatagtagctttaattaactaaagcggtgcacaactggtcgtcgttgaaatttgattacaataaacatatacttgttccttcgttttatattattagtcatttcgatttttcttagtagttttaaaaaaagtaaagcgacactatttttcagaaaaaaaacatattatcaaaatatattcaatgttataaataaaactaattaatttggctaattaacttggtgttataaatgatatcaaatttttgtaaaaacttatttaatctaaataaatttgacttaaaaaatcaaaataatgtatagtataaaaccaaggaatatataagctagtagttgttcatctgatggccggatacgtggggatcatatgcagcacaagaaggcggcgaccggccggccgccggccaacacgatcgccggccggtgcatcccaagcggcgaccggccggcatgccggggtataattaaactggaggagtatatacttgattcaaatatttattatcgcatatatagaaaatataaagtgatatattcgtatacatgcatgcggtgcactaccgtcgtcgtcgttgagctatcatgctcacgtgtcatttcttgtcaactatagctcccatctataatctcatgatctcatctaaaatatatttatatccgtgtagctagcgtatgtatttttctacccatctactccctccgtttaattaggaatgtaaggtgttttgggttttttttcactaagttaaactatttcatatttaaccaagtttatggaaaaacatgacacctataacatcaaactaatttcatctgatatactgttaaatatatttttataattaattcatttgtccgatattaaaaatgttgctatattagttatagatttggtcaaatttaatgaaatttgacttagagaaaaactaaatcaccttacgttacgaaaaaaagataaattcatttgtcttcacttttgccgggtttgttctagctaactagaaaaaaaaaacatgcatgttaaccaatggattggaaatttatgtattgctgattatactgtatgagcccagattgtaccggtgtagatatactcaaaatggttaagaaagaaaagattaaaaaagtttccatggcgataaattatgtcctcaaagtttcagatgcatattaattaatatgacctcttgacacagctgacggacactgctaacgagacgacagagaagcgatgcatgtgccggtacatcggccgagatgcctcccgtaaatcatgatctactcatatgcatgcatattcatatattatcatgaccttacgtatgcatatactagggcaacttgtggagttgtggtacaactacctccggtgacaacgctcggattcagaggtatcatcaactacctggtttttcttggggtaaaaatggttgcatagatagctcagctcgctcgggtgtactgatacttgctgttgtttaagaaccgacacctacgtaagattttaggtgtctgttctaacctagcactaatatatactccctccgtcccctaatgtaatggattttgacattttgtttgcactgtttgactattcgtcttattcaaaaaattttggaattattatttattttatttgtgacttactttattatccaaagtactttaagcataacttttcgttgtttatatttgcacaaattttttaaataaaacgagtggtcaaatagtacaagcaaaatgttaaaatcctttatattaagagacagagggagtatatatatggggctgccagcacattttcggaagtatggtgtatgtgacgtacggtccaacagtataaccatcacctatgatcccttatagcggtgtgctgattttagataaggcactaatgactcgggtcattagttctgcatagttgcctagttggtaaccccacactcatatgatttttttgggcctaacattgatatgtagattctacaagaaaaaaaaatacaagtaccacacctacgattaaatctcataaattaattgtgcgctttaccacctacggagatttattattagaaaaatgttagttacatgctcagctgacagtataacctgggatgagctttaccgcttcctgatattaataaaaaaaatataagtaactgtgataagtctattacttaaaattagatagacagtttgcactcgattactacaaagaccctagcttcctacaaatgtactatgattcggtttgtagaatatatatcacgatagacattaatcatcatgaacatcatgttcgggcttgacaggaccaagagctgaccacgaccaatgcaaaaaaataataatgtattggccaaaatgctaataaattaataattaaacacaggaattctagagtaacaacaaaataatatattggccaaggttctaacaaattaataattaaacgcaggaattctagagtaacatatataaattagagcaacagcaagaacggtactaactaaccacgcgctgttatgacttttttaaaaaatatttagtactgatcactagtggcattaatgcgacaaactagtagctcctaaatgtaacaactgagatatatccacatgaaaatccaaattaatttttatatttctctatgcaggggaaatcgcctattagcttctatcaaagccaatttcaaggtttaaatgcaaattatatcgagtatatcagggtcaagaataagagtcctatcgaattttggtagtgagaaagcttgagcaatgcaaaattttggtttgatgataattataatgctgtgagatggttagatatctatcgatatgttttacccaaattttggtcgaacgaggttttaaagaagtgttcttgctaaacacatatatatccgaggagttcaagctactgcttgctttcgtatgctatatatatacctatcgaatttgataatattatttatttggttttcgggagatgaattatttattacatgcaagagaatattattcattataatactttggttgagtttgtttaatttgtttatgacagtggacattatctctgatctagttagagaaaattaacagaaaaccacttctaaagcaacgaaactagtatttatatatatatatatatatatacaccatgagaagttgacatatatagctataataattgatcgtgccgtgcactgagttaattgcttatgtcaatgcatggtcagaatagaaactaagtttagcaaggaacatgtggaaatatgttagtaactaatcagactatgactcaaaatttgatgtaattaagagaaatacttaacagcaagtttaatagtatatatatagtcaagtactagctcttaaaaattaatacgtaatttacaactaatttaatagcatacccatacaacagctacatatcaatatactataccattgatagatggcatatagtatctcattacacacaaagttttagaacatgtgttgtagttgactacaaatctactctcatctcctctctcctctacctaagcatagatctaatgtactccatccgttccaaatttatggattcaaaatttatcatgaaatagttgttattctagagtagtatttataattaatcaacttcgatccattcaattttctccctattctactccaactacgtaccttcttattcccagccatatatacattatttaataagagacatagtttttcttctcaagcttaatatatagtacaaacaatctagaatagtactccctccgtattttaatgtatgac

SEQ ID NO: 27151 - DNA, 5828 bp, Oryza sativa
aacggcgtcatacattaaaatacggagggagcagtaatttttaaagctcgcttacatcatttgatgtattcgctcgaaaatgggaactagcaaaaatatagaatggactgagaatttgctaggctttcccggtcattataaacatcttttaggtcatgcgtgccaatttgatgaatgtatacacaacacatacttgtttactgaaacaatactaatatttttttacagcattctgggaattatttttgatggataataaatgaaatcaacatatctcgatcgtcactgtatgtacacattaaattaattagacaccttttaatcatcatcgtccttggtttgtttacatttgtcctattttatgaaatgtgctgcggtctcaccacaagtctacaactacaatcaccactactggcatttatctgaaaaagcaagacaagaatatataataagaaaataggaagaaaaatcggagttcatggtgtacggatcttctctcttcatcagtttcaggtacggataaattgcatctgaccaaggtgatcacagagagagaaaattaacaaaataataataattaaactaattaagaaggcagagtaaacggttgacttaaattaaaccggtcgttgatttggtatgtcaaagagctactgaatatttgattgcactagctggccaaagcaagaaatatgatagtatgtcggcaagatgaaactgcagttgaacatggacgaacagatttgcttggccgtcctaatctttgggtgcattcatctacccttgcagttaacttgttctaaagaataaatgtacatgtaggcatacatgattagcacacttaattatatatcatagtcttagctaattaatgtatattttccaccattaatcctatctttgacaagcttgagatggacagcaattcttgagaaatgtttggagatatatattgattctttcagaagatactgtggatgcagagacgaaatctttttggtctacggatcatgtatagatgtggcatgccaaccacatggagtggcgattcatccatgtagccaaatttcaagaaaacttgggactcttttaaataagattttgaccaacaaagtcaaatcctgaacacatcctacgtgcaacgaagcggtcaacgagaagatgggcctggactgggccttcagcgtgggctcaaacaaattgctgacacttggcaacaatgggcagtggtgactgtcagttctgtatgttctgcaactgatggaattcagaaaatgacagtattttactcacgaatcaaacacaaataggagtcaaaactaaattataaatgtaattactcttctgttgttggttgttaatctgcttggtgacaatatgcagggtttgtttttttctgcacaagatttggtgatctgcatgttgtgataatatgcagacaagaactgaacagaacaaacaagaagatatgataaaagtgcagtgatccattgcatgctcattaattagtgagtgacatgcttgacattggtatgaaagcgagtacgcatcactaaaattcactaattcctcaagcctcagggcgtactaatgtgttttcatggctgtatgctctcaaaaaaaagttttgctgatgtctaaaattactgcccatgtcaaagttgtttgtttgtttgttcacttcagattgacagagtggaagcagttgtagtaaaaaggaaaaaccatccctgacatgaaggttgaagcaaagtgtaagaacatttaaggcttagttatttttagattactagcaatgtacccgtgggttgcaacaggaaatataattcatttacaatatagaacgagctcctctaccggcgaatcgatggaccgcctttatgagtttggccctgggagtacgagtgcaaaatctagtactccttccattccatttcaggtgcagccatgattttccgtattcaactttaatagtccgtcttacttgaattttttttgaaaaaaattaaaaaaatattatccatatttttatctaataactatacaaatattaatcataaaaaaattcaaataagacagacgatcaaagttagacacggaaactcatggctacatttaaaatgggacggatttgattgcactagctggccaagcaagaaatatgatacagtatgtatgcaggattaaattgcagttgaacatggaagcacagatttgctaggccgtcctactctttgggtgtatcgatccatccttgcgttaacttcttcagaagaattaattaatgtgtatatatatatttatacatgattagcgcactcaattaatatgatagccctaactaatctatatttgcagtattaatcccatcattgacaacctagggtgtgtttgaggagaaggggattggggagatcggggagattgggaagatacgtaaaacgaggtgagccattagcacatgattaattgagtattaactattttaaacttcaaaaatggattaatatgattttttaaagcaactttcctatagaaatttttctgtaaaaaacgcaccgtttagcagtttgggaagtgtgcgcgtggaaaacgagatatttttctctctcaatcccccagattgcccaggaacgaacgaagccctagagatggatgaatcggagtgcaattcttgagatgtataaactatatatatagctcttatatattctttcagaagatactattgttgcagatacgtaatctttttggtctacggatcatacacatatgtatatgatacttggaacatggacattaatccaaatacataagctaaactcttacgtatgtatctgcatcaatagtatcatatggatcatacttcaaagtatcatacggatcatattaatttcaaagaagcttaggatattacgtacgtataattgatccaaatacgcacgccaaatacggatcatgtacagatgtgggctagtaagcaccacgcaggcccaaacaaagtcgtgacgatgggccgatcgaatcaatctgggccgcaaaggccacatcgaacggcgctcagaggcccaagggggttcggcgttgaaaactccgaacgccttcagttgtatgttctgcaaactgatggaattcagcagagtatcgagaaaaagtgatagtattacaattaaacaaaacgaatggtaagaaaagtagtaagtagtcttgtgttgtttggttgttaattagtctgtttggtgacaatatgcaagtatgcaacggtggtttcagtactaagatttgctgatctgcatgttttgatatgcagacaaagtactgaactgaaccacacaggaaacatatgagcaaaaaatgcagagctccagtgcatgagcgcatcagtgacagtgaatgactgaagtaggggggtgaaatcggtctacttcagcaacaacaggaggcccaatagaagtcgctgacacttgcaacaatgggccgatagaatgaaccggaggcccaagggggagtcggggtttaaaggaataagttcatatgaggtcccttaactttacaccgagttcgattttcgtccgtgaatcacaataccagatacaatagatccctcaactgtcaaaaccggtgtagatgaggtccctcagcggtttagatggcggctttgactgatgtggcgctgacgtggctagtttgacttagtcctcatcgtatgtggcggtgacgtggcacttggaagcaaaataaaaggtcggacccacgtgtcagtcattaaaaatagtgggacccaccctgctctctatctcccctgcgccgtcgtccttgtcccttctccctcccggccattcttcatccttcctcgagctccctagccggccggcgagcgcgcgcggagagggagaagggcgccagccatcgggtggggaggccggcgagcgtgcgtagagagggagtaggcggggaggccaacgagcggaacgggtaggccggcgagcgcgcggcggcaggcgagagagcggcggccggagctgcacgacctcgccccccctcctccggcgccgccgcatcgatctgcacgagttacggcgacggcgagctcacagccgcgggacacggtcagcgtggcgctgacgaggcccggaactcgagctcgcagtcgcagccgccgctgcccacttccccaatcccctccatatgcgtcaaagtttttgatattcatggcgttctgctcttgttctggtggattgattgattggtgtgcttgtgcggatgatttgtgcgaaggcgacgcgaagaacgcccacttgatgtctctggacgtcgccgcggagaggctgcggctgttcaaggccgacctgctcgactacggtagcgtggcggcggacatcgccggctgcgatgacgtcttccatgtggcctgccccgtgctcctctccgcccctaacccaggggcacacatatctcttttttcagcaaaataattccttttcttctccattgactggttcaaactgtagactgcagttactgaaaatcgacaaaaatcaacagtttctactaaaaatgatttgtcgaaactgttgatttctcaacaaccagtagtagctgaagtctgcagagttgtaattaaatcgtcatgttcttgtagctaaatgaattgatgttgctgtaggttcatacacttgctgctgctgtaacgggcacgacgaatgtgcggaaggcttgttcagaagaaaggttgggacttgggaggtttgtggtggtgtcatatgtctctgctgcaatggtaaatcccaactggcctgaaggcaaggctatagatgaagattgcaactcgtgcagatcgatgcggcggcgcagcaggagtcttcgtcggcagcggggccgaggtcgtgcagctccggccgccgctccttcctctcccgtcgtgcgcacgccggcctaccctccccgcccgatggctggcgccctccgcacttctccctaccggcgcccttctccctctccgcgcgctcgccggccagcaaggcagctcgaggaaggatgaagaatggctgggagggagaagggaaaggacgacggcacggtggagatagagagcagggtgggacccactgacatgtgggtccactattttttagactgacacatgggacccaccttttattttgcttccaaataccacgtcaccgccacataggaccaggattaagtcaaactagccacgtcagcgccacattagttaaaaccgccatctaaaccgctgagggacctcatctacaccggttttgatagttgagagacccattgcatctggtattgtgattcagggacaaatatcgaactcagtgtaaagttaagggaccttagatgaacttattccgggtttaaaactccaaacccctttgctggtagcaagcgcgccaccacggccgtacgtccccatgcctagcgccggccgacagcgcggcggcgcgccggcgatggatacatcagtggcacggcggtgcgtggcggcgattgtgctggcgtcggtggtgactggtgagcagtggatggaatggaaggcatggacatgttgtttatgaatttctggactgaagcatccagaacgcagtgtttacacccaaatttggcacttaggattaaaataggaaatattgctaaaatttggaagtctaccggtttcctccgaggtaggccggtctgaccgccgtgtgttgggcggtcagaccgccggttgagggccggtcagaccggcggtgtgtggccggtctgaccggcaggtccgtgtgctatcctgtttcgttggatttcgaggtttccttgctggg

SEQ ID NO: 27152 - DNA, 14222 bp, Oryza sativa
  unsure (1)..(14222): unsure at all n locations
agttttctcttagtttgtccatctttgtctgtttgcgccgtaaaccgtccgccgccgctgcgagagtgcgacatctctttgtaggtttgtcctgaaaaccttccgttttgcccacgagacgggtagctatctagaaatcggttccactagccgatttagttatcaaattccatctaggtttagctctttgctagatcgaggtggttggcgactctaggattaccgcaaagcttaagatgctgtgatcgtgcttgtcaacttgttaaaaaagttgccaacacgcagcacttgagttttaggccgccagacctggggaaatgatgcccaggagcaggagaaaggaagcctcgaaacaggagctcatcgaagcagcgctcaccggcctcttccatgctagtatcatcttcatctagcccatcatgttggtccttggacactaggccttcgacgagccatcgcctgaccaagcatgtcctgctgacgctttcttcctctnnnnnnnnnnnnnnnnnnnncaggcagctcttgtagtgcacggacagcttgctgtagcagaaaagcatcactttcttggccacatccgctcattgtggagattatgggtatcccatatctacacggcgatggtattcgaactgggtacaggatacctaatgtagatagaatatcttgtctgtatcttgggtttgtttcttaacttgtgtatcaaggaaacaccctgagacttagtcggttacgactgtattttacctttatcttcatattccgttaggaatatggattatcttttgtaacccggactccttcccatatataaggggggtccgggcgcctctaggggcatatgctgatttttcccgaatcacacaatcaataatacactcggcggattcatccccggacaggagtagggtattacttcttttataagaatgcctgaacctgtataaatcctttgtctccaaacccatacacttttctaacttgatagccaccccctttcattattgccgaaatctagtttcgacagttggcgcgccaggtaggggtagcgtcaagcttttcgccgatcagtgcaatgggtcctttctccggcatcgacgacctcgtcttcccgcccgggcagacgtttcggttcggcagcctcgacttcatcaccgacaacttcggcaagatttctctcctcgactcggaatcaaaccagtcgggagagaaccggatttcggtcccgtttggattcccgaacgcggctgaaagctacttcaagaccatctcaaccgagtcggcttcaaaccactcggccgagattgcatcttctccaatgacaccagatcaagatgatggggcttacccaccggtcctgatgaagctccccgacgatttagcggccgtctccaccacgacagcgtcttcatcccgcaggcctaggcggaagtcggcttcaacaccgatttcgcctagcttcagggaagtcggcgttatcctccaaccactcggcacggtttcgacggatcagctagatgaccactacagccctcccaccgtcgactcgcgccccaccgacatcgtggagtacgacgaatttagttctcgctacaacgacttccacgacttcgacgacttcgacggaagcctagatgacgactacacccctctctactttggcgttttcatggccaataatgagacggaggagcaacgccaagcccgggagaccgaagagcgtcgccgactggaggaggagcaccaagcacaagaacaagaacggctacggcgtgagcagcaggaccgtgagcggatcgcgaaggaggctgaggaccgacgtcagcgagctttggaagcagggcgccgagcgcgtgatctcatcggccagcaagatgtcgaagggacaccggttttccgcacccctcaacagaatgcggttgccgcgatcacccttctcgacaccctcctcaaccaaaacgagctcaatcgatccgaccacgtcgtcaacatcttgaaccagacgaagaccatgatcgcggcttcggtcccagttaactccgaaagcgtccacacgccgactggcagccgagtcccccacttccgatctcatgattaccgtcatccaagcctcagcatcaccggcgcaggatccaaccgcaggagcaggggccacgacgagcggtctgttcactcacctcccgaccttcatagggagcgccgagtggaacggcctcgctcaccacctcgtcgccgccccatcgatcttcgcgacacaatcatacagcgccgagcagctcgaggctaccatcactcgccagaccgccacgacgacgaccttgacggagtagcagccttcaccgacgacctgcgtcgagtggattggccagccggcttcaaaccgactggaatagagaagtatgacggcaccactaaccctgaatcgtggcttaccgtctacggtctcgcaatccgcgcagcaggaggtgacaacaaggccatggcgaactatttaccagtggctttagcagattccgcccgatcttggctccatggattgccccgtggtacaattggatcttgggccgaactacgcgaccacttcatcgccaacttccaaggcaccttcgagcgtcccggcacacaatatgatctctacaacgtcattcagaagtccggagaatcccttcgagattacatccggcgattttctgaacaacgtaacaagatctctgacatcaccgacgacgtcatcatcgccgcgttcaccaaagggattcgtcacgaagaactagtcggcaagtttgggcgtaaacctcccagaacagtcaagctcatgtttgaaaaagccaacgagtacgccaaagccgaagacgccgtcaccgcatcgaagcaatcgggtcccagttggaaaccgaaaaatacgccggccacgggaggaggtggaagtaacaatcataaggaccgcaagcgtaagcctgaggaacttgttgcaaccgccgctcactcttctcgacagcgttcgcgcgtcaacaccttcgacaagatcatgaactcccaatgcccgcatcatccaaactccaaccacgtggccaaagagtgcttcatctacaagcagttcgcggagcagtacaccaagtctactcggaagaactccgacgaggaacaaagcacgtcaaggaagaaggatgacggcgacaccccggctggttttcaagatcaccgcaaggagctcaaccatatctttggcggccccctagcttatgaatctaaacggaagcagaagttaactgaacgggagatcaacgctgttcagcccgacacgccccagtatcttcgatggtcagagattgcaatcaagtttgaccgctcggatcatcccgaccgagtggtccacccggggcggtaccccctggtactagacccagtggtccgtaacgtcaagcttcgcagaaccctcattgatggcggcagtgcactcaatatcctcttcgccaagactttggatgatatgcagatccctcgctccgagttaaaatcaagcaatgcgccttttcatggagtaattccaggattatccgcaactccactcggccagatcactcttccggtcacttttggcactcgggaaaacttccgcacagagaatatcagctttgaagttgccgatttcgagacagcataccatgccatactcggacgcccggcgttagccaagttcatggccgtcccgcactacacgtacatgatgatgaagatgcctggtccccgaggagtcctgaccctacggagcgacatcaagcaagctgtcacatgcgacaaggagagttgcgacatggcccaaacccgcgagatagcgtctgcccgagaggaaatccgactggctgcaaccacggtgagcgaaggagaagtgcccgctgccaagatttcaaaaagtggggaaaccgaagccgagactaaaaagattcccttagatccttctgatcctaccaaaactgctgtaataggcgccgagttagattgtaaataggaaagcgcgctcatcacctttcttcaaaataataaagatatctttgcgtggaaaccttcggatatgcccggtattcccagagaggtgattgagcactccttacatgtcaaagaagacgccaagcctattaaacaacgactccgccgatttgcacaagacaggaaggacgcgatcaaggaggaattgaccaagttgttagcagcaggcttcatcaaagaagtccttcatcccgactggctggcaaacccggttctagttcggaagaaaacagggcaatggcgcatgtgtgttgattacactgacctcaacaagtcctgccctaaagatccttttgggttgcctcgcattgaccaggtagttgactcaaccgccggctgcgagcttcttagttttctggattgctactcggggtatcatcagatccgactgaaggaatccgaatccgactgcttgaagacttcattcatcacgccttttggggcatactgctacgtcaccatgccgtttggattaaaaaacgcaggagcaacctatcagcgcatgatccagagatgcttttcaacacagatcggccgcaacgttgaagcctatgtggatgacgtagtcgtcaagaccaagcaaaaggatgatctgatcttggatctagaagaaaccttcgcgagcatccgcgccttcaggatgaaattaaaccctgaaaagtgcaccttcggagtaccgtcagggaagctgcttggttttatggtgtctcataggggcgtccaagccaacccggagaaagttaccgctatcctcaacatgaaaccgccaagcacccagaaagatgttcagaagctgactggatgcatggcggcgctcagccgattcgtttcaagacttggcgagcgggggatgcccttcttcaagctactgaagaaaacagataatttccaatggggacccgaagcacagaaggccttcgaagatctcaaacaactcctcaccaagccgccggtcttagcttcaccacacccgcaggagccgttgttgctgtatgtatcagccacctcccaggtcgtgagcacagtcttggttgtcgaacgtgaggaagaaggccatgtccagaaagttcagcgaccaatctacttcgtcagcgaggtcctggccgactccaaagcgaggtaccctcaggttcagaagctgttatatggtattttaattactaccaggaagctgtctcattactttcaaggtcactcggtaacggtggtcacatcatttccactcggcgatgtactgcacaaccgcgaagcaaatgggcggattgctaagtgggctttggagttgatgtctttggacatatcattcaagccccgcacttcaatcaagtctcaagcgttagctgattttgtcgccgagtggaccgagtgccaagaggatacccccgtggagaaaatagagcactggaccatgcattttgacgggtcaaaaagactttcgggcactggagccggagtggttttaatttccccgactggagaaagactaagttatgtgctttggatacatttttcggcgtctcataacgtcgccgagtatgaggcgctccttcatgggctacggattgcaatttccctagggataaagcgtctaattgttcgtggtgattcacagctggttgtcaaccaagttatgaaagagtggtcctgcattgacgacaatatgatggcatatcgacaagaggtgcgcaaattggaagacaagttcgatggactcgagctcagtcacgttcttcgacacaacaatgaagccgccgacagacttgccaattttggatccaagcgcgagacggcgccctcagatgttttcgtcgaacacctttatacaccgaccgtacctcataaagataccactcaagatgcagacactcgtgacatagctatggttgaagccgactggcgagagcccttcatacgatttttaacttctcaagagctccctcaagacaaagatgaagccgagcggatttcaaggcggagcaaactttacgttttgcacgaatctgagttatacaagaaaagcccttcaggaattctgcaacgctgcgtttctttagaggaagggagacaattgctgaaagacatacattctgggatatgcggaaaccatgcggctgcgcgcaccattgtcggcaaagcttaccgccagggttttttctggcctactgcagtgtccgacgccgacaaaattgtgcgcacatgtgaaggttgccaattttttgccagacaaattcacttaccagctcaagagttgcaaactatcccgctgtcttggccgtttgcggtttgggggctcgacatggttggcccgtttaaaaaggcagtcggcggttacacgcatctctttgtggcctttgataaattttccaagtggattgaagctaaaccggttgtcacaatcacagcagataatgctcgcgacttcttcatccacattgtgcatagatttggagtgcccaatcggataatcactgataatggcacacaattcactggcggagtttttaaagacttttgtgaggactttggaatcaagatttgctatgcctccgtggcacaccccatgagcaatggacaggtggagcgagccaatggcatgatacttcaagggattaaagcacgtgtttttgaccggttaaaaccctatgccggcaaatgggtgcaacagttgccatcagtactttggtctttgcgaactacacccagtcgagccacaggccagtcaccttttttccttgtctatggggcagaagcaatgttgccgagtgaagttgaattcgaatctttgcgcttccgtaatttccgtgaagaacgctatgaagatgaccgagtggacgacttgcaccgactggaagaggtccgcgaagcagctttgattcagtcagctcggtacttacaagggttgcgacgttatcataatcgcaatgttcgatctcgtgcctttctagtcggcgacctggttttacggaaaattcaaaccacacgagatcggcacaagttatctcctctatgggaagggccgtttattatctctgaagttacccggccaggttcatatcgactcaagcgcgaagacggcactctcgtcgacaactcttggaacattgaacatcttcgtcgtttctacgcttaactttatcattgtatttccctattttgactgtcaaacatcaagttttcttcttgccgttgtcagtcgggggctatcatcataataatggagtgtgattttttatcaattcagtttgcttacttggtttatcattgccttgtttggtttttctacttagtttgcgaggactgaaagtttttaatagcttctttgggttttaggctcaacaaaacttagcaaaaacttttaagaaatcaaaaactttgcaagaatcatcaagcacagcataaatacaccagtattgtacaaattgagcctccatatattacatttacactcagtcagaatcagtcctttcatcatcagagtcatcattactcggctggaggtcgttgttgcgaaattgctctacaacatcactcgcaattttgtcagccgcagtttgcgcactgctgataagatcaagggcggcttcttcacttgtcccgtctgcaaatccatcaatggtgtcgatttcaattctcgggtacaaggattttgtcatcgccaaggccatgccagctcccatacttccagctttcttgatgttcttgaaatatacttccggagcaacactcagcttatcaaatatttcggttgcgtcgagtgcactcggaccaccattattgaggaacatggcttggataattggtgcagcggcattggcgacgttatccctcgctccttcaagcctcttgatcttaccaaccaggacgtcaaactgagcttgagatttgatcttgcgatctacaaaacacatttatgatgagaatctgttgcattataaggagagaagctcaggttgtcagctggcgttaccttcgacttcctttaaggctgagtccctttgcgcagccagttctgtcttgtctctctccagggcttcaatttgcttcgccatctgttccatcctggcggcttgcgctgtttgaaattcagatggttaaggatacagttatgccagtttaaaccgatgaaacggatctagggattaccttttgacgaaccactcagctcatagtttgaatcctggagctgggcgattcggtcccttaactctttctctgtctttttggcgcactccttggcctcatgcagctggtccctaactgcttctagagttcccaaatgaggaaccagcttttccagagttgtagtcttggcctcattgcgaagatggattctctgcatgatggatcatggttcagttctgctaaaaagaaaacaaagttaccgaaggccgtcactcggaagacttacatttacaatacgagtggcttctccgagcgctttcttcagctggcacacttcttcatcttctttttgacggtttatgactatgccggcggcttgtgagttctcgtcccaccatttgatcaagataggaggacgagagtcgtcggtcgcctttatacgagggatttcttctccgtcatcacctgatggtcctgatgtgtttccaagacattagaccgataaactgaggttatttaaatcgccattgtttgagaagacaactaacctgaagatgtacctagctgagcgtgaggtgatctttgttctttacctgaagacccagctatcgagtcgttaccagcctctggtccttgtgaagtcgtcgtctgcgcttctacctcggggatctcttgatcagggcctgcgtccgactggtttccagtcgggggctcttgagttgttgccgtttcagttgttgccgactggtttccagtcggcggcaggtcactcggattggccctatctcccgaagcatgggcgccagtcggctggctttcagcagtcggctggttttcagtagttggctcggggtccttggatatattttgctctgtcatagccggatcagggtcttttccagatggatctatatcagatggtttcctgcagagtgttctttcagtattcagcatcattttcatgagcagaacatgccgaagcggaatcataccgagaggtttaatacctggaagatgttctgatctttggcattgcacggccagccagttttttcctgggcatggtacgctttgggggtttactaggcgagcccttatccccagatttatcatcgtcgccttcatcatcatcaagtaccagctttctcttgcgaggacctgtttgaccagtcaatttggaggactgaggttgcggatcttgtctgatcgttggccctccgcctccctgagcggtgtgttggcgaggagaccggcgctgagaaactggtggatctgacttcatcaatgcatattcctgaataagatgcttccatagttagtcaactcagcatgaagatacgactatgttctgatcacggtttgaaggtttcagatacatacctgcggaggcggattgaatgcgttgtatggcacaactggcagttggtgagagtagctgactacaattgcatttgagaagattttgtgcatcctctccttcatgattttgaaatccagggagtctggttcttcacggttgggatcatgtttgccgtcgaactcgaatgccgtgcgggatctttccttgagtggcgccagtcggcatttgatgaagtgccgagtgatttgctctccctgtaagccttgttgtttaagatttaacatacgatccaacaactccaaggcttgtgctgcttcatctccgattggaagagagttccaagtatcttggtacactggagggagacaagtgtacccgggaagagcaggctcgggattctgggcatagaaccagtttgcatgccatcctttgttcgaagttttgaagggcatcgagaaatatttttggctcagagtaccccttagttggaatcctgcccccccgactacacacggtttgttcttgtttggttggggcttgaggaagaagatccggcggaatagggcaaagtgaggtttgatccccaaaaaggcttcacatacatggacgaaattggcgatatgcactatggaattcgggtttaggtgatgcaagctgattccatagaaattcaagatcccacggaaaaattttgaggtcggaagagcaaagccgccgtagaagaaatgcgagaagactacgatctcatgtgtatcaggggtcgggaaagcctcaccgcatgctggccgccacccgatgatctccttggctgggagaacgccgtgcgccaccatctccttcaggttttcctccgtcacgtcggacggcgccaattggctttcgaagctttctctctcttccgccatcgatttttctcaaatgtgctgatttgattcgagggatggcttggaagaggtgaggaattgaggcggtggatcacgggaaggattttgatgcacttttcggaggtggatttggccggagttgtgaaccctagttcgccggcgcagcttttcactgtagcaaggagtggggaaaatggcgagagttccggcggggaagacgaagcgtcgcttggatatcggatttttcagttaagggtatcggaggtgctaatgggcctaggcctgaacagtatttcagcccaatacttttaacagtgtggcccattgtgttccttagggacttaggcatattttgctttggcaatattatgcgcacaacagtgttgcccaatgctgatcaaatcctttttatgcggtcatataattctttggaattattgcaatgcgaattaaaaaggtgcccgacagaaaggcgttatgctgtttttgcaagcttttttaggctaacaaaagctgtttgggttaactaggaatgacttgtttttattatagtcacttccttggtatgttatatacctattttcattatggtaaatagtcaaggcctaggctattcgacttatttattaccataatcttcataatacttgatgggtaatctttagagtttttattcggatacctgtcaagtatgttcattcgtgaaccttttagagtgtaaaccactcggatttcttttattgtggctaaaaagcagtcggctagcatgcctatttaggcgccgcgtacgcttttgtcatgtaatgcacaattgtgttattatattgtctttcaactatatgtttagtttgttaactaatcacatagttgggggctacacctaattaggtgcatctattcgatgcaccatattctttatcttttcgccctttacagtccactcggcaggttttggcttgaagagtttgaagtactcggattatcatctttgagagggctacgatggtcgactgcaaaggactcgggggctactgtggagattatgggtatcccatatctacacggcgatggtattcgaactgggtacaggatacctaatgtagatagaatatcttgtctgtatcttgggtttgtttcttaacttgtgtatcaaggaaacaccctgagacttagtcggttacgactgtattttacctttatcttcatattccgttaggaatatggattatcttttgtaacccggactccttcccatatataaggggggtccgggcgcctctaggggcatatgctgatttttcccgaatcacacaatcaataatacactcggcggattcatccccggacaggagtagggtattacttcttttataagaaggcctgaacctgtataaatcctttgtctccaaacccatacacttttctagcttgatagccaccccctttcattattgccgaaatctagtttcgacactcattctctaagattattggacaagttctccagttctttggtcccatagggatgggcgtacagagaacgaagcagcatcttgatgatgtgagggtcatccagattccagcatcgtctttgatctctttctcactcactctcaatagctacttaatcactgcagtgctacctgtgaataatatattgtatgtgtatttggaaatgagctgaattcagcgaaattttggatgacaactagagttgatcgatgcaatatttatagagaacttttacggtacaatgtactaccagtatatactggcaatatataaaaagatatatttggaatttaatagaaaattagaaaaggcgtttcaatttatttctggatctcgtcgtgcggtggggaagagcattgatttgacaacaacgctcatgcggcggcgtgatctaacgagtagcgaggagaggttggaccgttggacccaggcgactgggctcaggaggttgatgttcacggcggtccggctcaccgtgcgctcgtccttctgccgagcctcacggcccatagctagacacggcggcgagctgattcagtgtagattcagttgcagagattataaaatatatacgactcaatagcagcggttgttttttcacacggtgtgttgttttgatttctttactgtgacccgactgattaaaaaaagacaagtttgccctttttaagtttatactgcagtatcattacgtagggagataaatcaatctacactgttagattgtttatactacaagtatatactggtagtatattgtaccgtaaaagttctctatgatctcccgaggtagagtccattgatcagcaaggctagctagcagctagtatatgggtagcgtgcaagctagctatatgctgaacaaaatgctaactaaagttcctacgtagatgaacaagctagcaatacgaaccgggaccaatgttagctagcaaaggaaaacgatgtaccaaagcgtaggcagggaggtcatcgagtcgaatattttccttttctttttccaaaggaacagtggatcgaataatctcaccagctgagcaagcaaccttgatctcatctacggccacgatcaacgtagtcactcactatatacgatttccggtgcgattaccgcagcagcatgcccaaagattctgatcaccagcaaagccaattcctgaaaggcttatcatatatacatatgtatctatatatatctcaatgctaattaggtatttttagtagctcctatggtaattagaaaaaactaactattaattaaatagatcgtattataagtagaccgtaaaataattaatacttaattaatcatacaccttatcttattttacgtatcttctcgatcttcgtctttttcagtaggtcaccgttgaagcccacgacctagatccagggcgatgccggccgtagtggcgatgggcgagaggcgacgacgatgaggcactggtggagaaccaatttttactcccggttggtaaccccctttagtcccggtttttcaaccgggagtagcaatccgggactaaagatggacatatttagtcccggttgaaataaccaggactaacgatcatctttagtcccagttggtaacaccaatcgagacaaaccggatggtcccctttgatttttttttctctttttattttctcccgaatcaagtggcatgcaaatccccaaatcaaaccccgaatcaagtggcatgcaaatccccaaatcaaaccccaaatccctaaatcaaagtaacatcccaaattcacatcaccaaatccacatcacaaatcttaaagttatttatacacataaatcaaatacatcacagattctaaaacaaatcaaatacatcacagatcaatacaataaatcacaaatttatacatatcagtgaatcacaaattaagaaaaaacaaacaaagccgctgccgccactcgccacggccgccgcctgcggccccgctccgcccgccgccggcccaacggatgggaaggggaggagggggaggaggaggaaggggaggaggtggaggagaggggatgaggaagagagggtagatctgatctgtaggaatggaggaggagaagggggagaggttcgatctgtgagttgcgattgtggaggagaggataagtgatagggattatatactacacgtacaattttagttctggttggtttcaattttagtcccagttggtaataccacccaggactaaagtgatgtctccaaccgagactaaagatcctcggcctcaaatattcatctgacaggggattaaccgggactaaagatcat

SEQ ID NO: 27153 - DNA, 1800 bp, Oryza sativa
aagatcatttctccaccagtgaggggagtgatgcgacggtcgacggcgtggctctggaaaggctaggcgtccgaattcgcgcgcctaggcgtgctagatctgggagcggcaacgaccggggcgatggcttggcacgtcaacagtgacctccacaccaccggaggagaagatgtggcagggtttggcatctctttgctagatctggtcggctgacagtggcaacaagggcgacacacatggcggtcagaggcagccagctgcctcgccggtgcgcgcggtgggttggggcctacggtggcacccagcggcatcgacaagcggtgggttggttgacacagggcacccgtgcggcaaacagagctagtacgagacatgcattgttatgttggacagatcaactaaatcacagcacacacaggttacaaccttgcaatataatgaatatatatacacgcggcagtgaacttgcgattattaattcttaccagaaccggccagatagaaatatgtaagtaggtcttcatttaattattctttccacattctgatctccttctactgtgatgaagcaacgtatatagatcgatcgcgtggtaaggggaacacgcacttcatgagatcttgagctccctcggacttacttgaggaattcttgagctccctcttggacttgattgaattcgattgaaccccggatgatgtccggagtgatcttcctcgtgctgttgcagttccagtcaaccttctccttcgtaggagctgctgcatcggcggccttgaagcgaagtatggccgtgttattgatcccagcaatgtcgtcgggggagatcgtcaccaacgtcttcgtcttgttcaagttccacacaatcttctccagcttgggagctgcacgggctttgatcaacaaggccgtcttatcagagacatgatcaagcaggaggagcctcagctccccgaactccccctcctcgagggtgacctcgctttcgatgtatgatttgcgaagcagcctgaggcagcgcaagctcttcagcttgccgaggatccgcagaccgtcgtcgcgcagtagggtgtaacgtagagtgatcttggaaagcgcttggaacttttcgttgatccatgtagggagcttgtagcctctcttgtcgccgccatttcctcccttgaagaagcacttgaggttgaggtctaagctctcaagtttactgggagctaggatttcttcttgtgaatggtcaagagtcacgaacacgtcgtcgccggccatgtgctccgcagccggcggtggcggtggctccgtgatccagactgacagtgagcgcagggtatctctccgcttggagattgcttcaagcaaatgagtgatgttaccttggctgccgtcgaggacgactcccaacttcctcagctgctctagagacccaatccgtgcaaggtcggcttggccgtccttaatccggacatggcgcaatgtctccgtcttcttcccgatcctgtgaggtaccagcacggtggagcctgactcatttttcttgccttcgccaccgccgtcggtattgatgttgttgccggcaaggagatgcttcaggttgaggaggtagatgcgcctcatggcggtggccggcatctttttggtgtcccggatatcgagcgtctccagctgccacaagtcctccatcttcttgggcagactggaaacgtcggtgttccggaggctcagatacttgagggaggtcaccttgcagatactcttaggtggctcttctccaatctctggcagccccctagatctatcacgtt

SEQ ID NO: 27154 - DNA, 5548 bp, Oryza sativa
gacaacacacccagcagcgagtccaccgcgccgttcgtcaggtgcgccattgtcgtaggatgcaattatcttatgatatatctctctatcttgatcttttttttgaggagaacgacggtaggagatctgccggaatttaatattagaagagaaaaattacaaagtagcacagatgtacagaggttacaagcaaaggaaaggagagagaattacagctgcaggaaaagctaaaaacaattcaagctgatcttgatcttgatcttgatctttcttctatgtactactagctggtgaatacttgggcaatatttgtatatagagtagagggaccaaattaaagtggttgatagactgtagcgtgcaaattaaggcttagcctttgtggatgctgaacaagatggtagagcttatacacgtgtacagatcgaaccagatgcaaatgctacagcaccggctagcaaggaaaacaaagcataggcgggaggtcagaatatttacttttcttttcttcttttgcaaagcaacgtatattataaccctgtggatcgaacgaacgaatttttttttttttgaaacgaaaagcggcaaaagacttgccgaatgtattaaaggaaatataaggtcagaatacataaacagaaacgcaaagaccgtctaacggtcgaacgaagaggcttgccaactaggcaaaaaacctcatgatacaagcgacttaaagaacaacagcatttaacatctggacaaattaatttggcttatattttccttgattaaggaggccacctggttctcgtcttgtgaagagtgacataaaattcttctgtttcgttctagccaaatattccaccacgttattgcaaggtctttaagaattagcttccttgtagctataggccttagcttgcataatgattcccaccaatttttgaaggtgcaagatgagctctgaagggtataggcagtatgtccttgccaaaggcaaattttgttccataccatagctgtgaaagggcattctttggctagatgagtagcatcttcgaacgaacgaatcgaatctgtcagtccaatccccttgaacaagctaagcgacctggatgatccatggcatgcaaaactttttagataatggaaagtttttattgaactcagttaattatattaatgtgatacaataattttgaaaatacttccgatctctacgtaactgagatgcacacaaccgaacatacaaaaccacactaaaaaacaagaatgacatggagtattgaggaccataaatccaaagactaaatcaccgcccatggcatgcatgtcaatatattagaaagaaaagagtttttgtcacacaatacaatcggccagacaagcctataccgagaggaggggaacaaaggtacaaataagaaaaatataagagaaaattacttcggaaaaaaaacaactctaaacaatgagagggtgtaggcggagccacactataatcaaaattcaatggcctaggctcgagaggttggtctggcgtttcactgtaatggattctcctcaaggagctccagcttgacgaccaatgtgacatggagaagattgcgcaatcgcataaaaacaaggtgaaaacggtatggaaatctttccgatagtattgataccatttccatataactaatacttcctccatcccataataattgcattcttaggaaattagagacaatttaacaacaaacacaatttaccacaatagccctatttaataattacattgtatacgcttatttcatatttatacttgattaaaaggaaggttgagcaatacattccatatgtaaacttaattaaaaagaaggttgtgggtatacatcggttaaattaaaacatgcccccaactgaagctcccacagcgatttggagtcgcgtgttcgatcgccgcgatatccacgttgcccccgaatgctcaggcagccggatttcgcaagcgctcgtggctccgcatcgactctggtcgtttttcaaaaaaaacccttagtattattgataatttgatgcaagtccccaatcgtacatttctaggttatgcagtcttatccaaaagaccttcaaaatatgaaatatcttatgctaagaagacaaaattcggaaaattggactgcgctctgaaaaacgtaaagtgagggatcattttgcaaaaatgaacatccccctccccctctcccaaactagaggtggccaaacgggccgggccaaacgggcggcccggggcacggccgaacctgtagcaggcacggcccggcacggcctgctacagtaacgggccgtgccggcacggcacgagtagccgtgccgtgcttgggccgctggccgagcccgcgggccgacacggcacggcacagctactgtagcggcacggcacggcacggcccgcggcacggcacggcccgttagcgggccagcggcgcactgacaaggcgagcggcggtcgaatgggaaggcgccacgtggcactaacggctatttgaccgttcaaatttgaaaataaccgttgggaggctaaaaaattcataaaaatttcgaaaaaattccaaaaaatctcaaatttcgccctataaatagggcatgaaccccagccatttctcctcatcccacactcctcatcttgtgctctcaagtgttttaagtgctctctttgttctcaagtgtgcattttttttgattttgacaaaatttgctcaaattttgtcaaaaatcaaaattagtttcgtagttcaacagtttgatcgcagaggtttgaagagctcgcggttggaaagatgtaagtaatattcaaatttgtgtattatttgtattgtgtttgtgaattcaataaatattcaaaaatttgtttatgtcggtttaaattttcagaatggatccgaactttccataccagtcgccgtcgttcaccttgggtgatttcgaccccaactacatgtcggggtttgacgatacctccggatcggctccaactccaccatctgtggaggaggtaccggttcatacggctgtcgttgaggaggtaccggttcaggcggcgacagcttcggaaggattttccggaaccgcgagcggaagtgtttcgacacacaccggctcgaagagatcgagaacctccggtgtgtggcaaaacttcgacgagataaaggaaacatgccccgatggaagggaggtatcgaaagcccgttgtagaatatgtaggcaaattttatctgcttgttcttctggtggtacaggtcacctcaagcgccatgcggagtcgtgtgccaagaagcaaggaatacaactccggcagcagcaacttatggtaaacccagacggtacggtacgcagttgggagtacgatcccatggttgctcgggaatctcttgtccggttaatcgccaggcaagatttacccctgaactttggggagtcccctgcttttgaacattacattcagcaatctcataaccctaggtttaaagctgtgagtaggcaaacatcaactagagatttagagaatgtttatcacaaggaagcaactgcacttaaggaactgtttagtacatgtactttctctgttagtgttacttcagatatatggagtagtagagctagagaggattatcttagcgtagttgttcattttgttgatgatgattggcaattacaaaagagagttttagggcttaggttaatagatgtctcacatacaggagaaaacatagctgaaagaattagggaagtaattaatgaatttaatcttgctgataaaatatttgctgtcaccctagataatgcatctgctaattctagggctattgaaatattgcaacctttattttgtgtgtatgctcaatcttttctactccatcagcgttgtgcatgtcatataattaatttgattgttaagactggcatgaagagggtaggtgaccacatcgatgctgttcgtcaagcaatcgcgtggttaactgcttctaacccgcggattgctgcatggaagaggttttgcaatgcggccggtgtgaaagctcgtaagtttgccaccgatgcagagcatcggtggaatgcaacgtatttaatgttaaaagttgttttaccttatagtagtttactttctgattttgttcagtcacgtggtggcccaagaaacagtgacgggtcttcagtactgaacgagcatgtttgggcaattgtccaaaaatttcaccaatttctagaaactttttatgattgtactctacctttgtcacaagtttattatccaactgctaatataattttgcacaaccttcttgaaattgctaatttatttaaagaatacgaaaatgatgacgttctaactaaacctgtctttcacatgaaacaaaaatatttgaaatattggaaaaatatacctatgttgtatgcttttgcttttgttttagatcctaggtgtaaattaaggggattgtctgctattttatcacttgttggagatactataggtgtagattatagttctttttatactgaggttagacgtaaattatatgaggtttttggaagatatgaagtaaagtttcaggaagttcgccagcagagaccccctcctatccccactacaggtaagaagaagatacagtggggtaggatttggggtggatcgtcttcaatccaaggtggtggcagttcgtcggctacaagtggagacgcctcttcgcatgttgtggccgaagagttgtccggttatttggacagcgacgccatccaccacgaagcacaagatttcaacgtcctcgggtggtggaatgaccacaagataacatatcctgtgctttcaaaactagcacgggatgtgttgacggtgcccgtgtcgacggtgtcctccgaatcggccttcagtctatgcggccgaatcatcgaagaccggaggacgactctgcgcagcgaccacgtcgaaatgctactaagcgttaaagactgagagcttgctcgacaacatgcccaatacactgcggacaaccaagaattggccgcccagttcgagcaactctacctggatccagaccaaccccagtagaattttgttagaagtagttctgacctttgagctgtactcttttctttgtcatggttttctcattttcccctatgagtttttacatgacaaagtttttaacgaggcagcatgtatcattgtatcctgtaatgatataaacatcaataaaagtcattactatttttaacaaattcttttgcaatattttcgcaagtgtagatttatctttaaattatttcaaaataatgaatcacaatctatatttttaaatttttcaacacaacaaaaaaaataccattttttcttttttttaacattagcaaatcattacttttttaaaaaacttttatttccattttttaaataccattttttcattttttaacattagtaaatcattacttttttttaaacattttatttccatttttaattttttttccttatacatttcctttggttttttttttaaaaaaaacactgtgcactggg

SEQ ID NO: 27155 - DNA, 21294 bp, Oryza sativa
  unsure (1)..(21294): unsure at all n locations
gtgcccgtgccggcccgggccgtgccgccgttttggacacctatatcccaaaccctagccgccagcccactcgctgcccctccccctctctcgctttctccccctctccaggcggcgaccgggcctcgctcgattttccctgccggcgacaacctctcccgcgcgccctccgctgctctccgtcatctcctcctctcgaccctgccactccgtcgctgcagcaccatggtggagactcaccaaagcacccccactgccgcctccaagtactcctccctgtccccttcctcctccgccgccaagcagcggcgcccgcgcccgcaaagagcgccggttcgtgcgaggatgcgttggcggccaagagaggtgacgattttttttgtcttttcagcgcgtgagttggtggcatgggcttgggattgagctattaggttttgatgctttgttgcaaatcaaggaggagatagctggcggtcacagcggcggagtgaatctgcctggaacttgttcgttcttaatggcattctcaacagcactgcatagccaggggatcttgcttagatccgcttgtgctttgacgccggtctgctggtctttggttaaaaaatgccaggtctactttcttccctttcccttacctcttatgattctcttatgctttgtagctacaatggagcaatcgatttggtaaaaaatgtcagtcagtgcaagctacagggcttggccttgtgttgctggagcagaggttggcagcctaccactgctgtgttgtgtgctgcaacatttaatcaacaaacaagtactaataatctactatttatcttatgtgaactcctattatctatgctaatgttttttggttgcacaattggaactgtcaaaaatggggaagatgtgttggttgctgttctaatactatctgatcatcttcttctacaatgagaaaaaaaatgaagctggcattgcaactcttgcaatataaatcagggcaaccgtgcagccttcatatatcataatgtgtttccaaatttcgaataatatgtttcacataactgattatgatggctaggagaaatttggttctttctccagatgacgcagtaacgaagtaatgacctgataagcatgtatacaacagccaagcagaaaattgtatgtcattgttcacaagaactgatttggcaagcattttgtggaccttagaacttatatcacatttttgccttgctgcatctaacctgctccgtagaatcatttagccaatggtctgacttgtgctctctgctttctttgatgcctcaggaacattgtgctgacaaagtgacaattagtctagactgtagtcttggcctgaaacatatttccctgcaggcttagaatgcagattacaacccataacgtatatttgcaactgttgatacttgatttggtttacttctagaacataacctggaatttcttattaactgtaccgtcacccttttttacaaattgggtggaaagtgcttggctgcaaactaattgatcttattgttatgtgaaaggctgcagattctttatgcatggtcaagcagctgatagcaatgaaagtaaaagcagcgggagatgcaagtttttcttgactggcaggtagctgatgtttttctctcttcctctaataacctgaatccattaaaaaaagaaaacataatttctcttactatagttgtttattttacttgccaaaggtcctaaccacaataaaagaagtcgatagctagctacctcttgtttggctggtagtggtgttccctgagtaatgcaggcatgattgcgattgtaggagccttagggattgttcacttcatcgccgcttgcaaccctacaaattttttttgttcccaaattttgctaatttaacaagctaaatatgttcttactatctctaccctaccaaaattacctattttcttattttcaaattttggcccaactagctcctaccatttctaactttcatttcttactaatttaattaacactatgattatgttggactactaccatttctaactttcatctcttattaattaacattatgattatgttggaaatacatacctgtttaacatgtagttgccaggtcaacaatgatgcctttgttttaaagattctagattcgaaccgaagctacatcaagttacaaactaggcctcttgcagtatatgatcaagaataagttccactttcatgacatcaaatttgtatttcaactggggaaagtatttcatctatgcgaccaatgaggcatatatctatgcttttgacttcaaattcaacctgctaaagattcattggattgacttgagcatcaaaattagtgtaattagcaaagcattgctgagaatcattcatgttatatattttgcaccaaaatttgtatcatgttattgcttactattataatgaagcggttgtcctaagtgacattgagaatcagtgttatttgtaataacaactagatcatatccatggtgcttcttgttacaagaaattgatgatcaatttttattaactacatgtttgattttaagccgctgacattgtgtctatgcacagcttggtattacagtaatgtgataagtctaatttcattcactaccggagaattttgtaataattttttatacatttttttgattcacgatttcaattgaaatgaattgaaacatttggatttaatattgatagggcgcacaacgtgcgtcaaaatgtctagttctatttgttgtatcccatcttatcagaaatacaatctttttgggacaaaatttgaagggtagaaatacaattattatgggacggaggtagtataataaaaaaaaattnagcggtgttttacccgacttattacctttgataaaaaataagtttactaattatgtcagcgtcgcatttaagtaacacaaaataattaattcacaaatataaaaattcccgacatttcctaattaaggacatcccaatgccctttctgcaacacattcgagcagtacgtgtgaaagcaatcatggcccaaaactgaataaacttgtgtggcatccattgctttctttcatccatatgaaaaaatggtattaaggcggtggcggcggcggtcgacgactcatccgagacagcgagacctagagagagagctttttttttcatgtttgtgagagggcaagaaggacgtacggcggtcagatacccaaagggagtttggagtttaaaactccaacccaaccgcgcaaaaaaccgcccgtccttattcctagtggcggagctagctcccatgcaagtcgggtggccaccgggctccaccactaacatctccattgcaaatatcttttgatgttcgaaaaatactggtatttatttgggcttcacgatattgttagctctactagtgcccgttcctagcgctggttggtcgctgagctccgcagcaaagcacagcacaatggtcaataccggaaaatactaccccctccgtttcacaatgtaagtcattctatcatttcccacattcatattgatgttaatgaatctagacaagacatatgtctagattcattaacatcaatatgaatgtggaaaatgctagaatgacttacattgtgaaacggagggagtagtattcattcgtgcttcacgatattcctgctctagatctcgttattggactcgtcgtgcatgcctagcgctggtccccgccgctggacccacggtggtgacccgacgacggcgaggtgttcggcagtcagcacggcgatgcgtttcgtggagaacgtgggcccgaaaccgaaacacgcaggcagctatactggcccagtaaaaattgcgacgcgacggcccaaatgaatagattggcccacttaatctggggcgcccacatctcagggccgaggtccggagtatgagggcccctttgaattaaaggattcatgtaggaatttcataggattcaaatcctataggaaattattctgtttggccctttgattcaaagaattgaagctctccaaatcctatgaaattcctatggaatggcacattgcatgtggattttggaggaaatttagcaagagctccaacctcttggaaaatttcctttgagtctatctctcttatccgattcctgtgtttttcctgcgctccaatcaaacgaccattcctgtgtttttcctgtgtttggcaatcctctgtttttcacttcaattcctgtcagaatcctgtgttttttctattcctccattttttttgtaccctgcgattcaaaggggccctgaaactccgaagaaccccctacgccgtctgttgcttgatgcccggctgatcctattcctacctacgcttatcaatcaacaaagcatatactcgtatgatgattgatgcgtgcatgtgcaacatggcggccatgtgatgtgactgtcaatttctgtttctgcaactcatggaactcaccagcaatttgtgtctttgtcaacttatattaaactttactaactccaggaagctgccacaagaaccaaacaaaaaggaaaagtaagcaaaactagtatctctctatcttgatctttcttctattgtactactagctggtgaatatttgggcaatatttgtgtatagagtagagggaattgatcgaacaaaagaccaaattaaagtggttgatagactgtagcgtgcaaattaaggcttagcctttgtggatgctgaacaagatggtagagcttatatacgtgtacagatcgaaccagatgcaaatgctacaggtcagaatattttacttttcttttcttcttttgcaaagcaacgtatattataattaaccctgtggatcgatcgaatcgaatctgtcagtcgtccaatccccttgaacaagctaagcgacctggcatcgatcaatggcatataggctcgatcgagagattggtctggtgtttctgcgacatggagaagattgggcaatcacatgcatttccacaaaatatagggtgtaaacggtataggaatctttccgacagtattgatatcacttccacaaaactaatataacaataactaatatatctttgcttcttaaattccagatttccactctaattaacaaaaataaaactacaaaatgtgcatgtctttgctgctgagcttattataagttgacaacaactgaacagaggacaacaggatcatcagatgatcaaaatggagtgtttcactgcatgcgcagcagcaggtgactgttaataccaatgagactcagcaaacgagacaagacaaaaattctctggacagttacatatttgcttcttgaattccaggcttacacttcaacaagaacaagattaaagaatgtgtagggataacatgatgagttccagcactagacttgctgatctgttatgatagacaagaagtaaatagaaatcaccctggcatgaagcatagtggaagatcagttcgatcaagattcagagcttcagaatatttttaacagctcatcaagatgtggctgatcaagattgggcaatatttgtgtatagagtagagggaattgatcgatcgattgatcgaacaaaagaccaaattaaagtggctgatagactagcgtgaaaagcttagcctttgtggatgctgaacaagatggtagagcttatatacgtgtacagatcgaaccagatgcaaatgctacagcaccggctagcaaggaaaacaaagcataggcgggaggtcagaatatttacttttcttttcttcttttgcaaagcaacgtatattataaccctgtggatcgaacgaacgaatcgaatcgaatctgtcagtccaatccccttgaacaagctaagcgacctgcatgatccatggcatgcaaaactttttagataatggaaagtttttattgaactcagttaattatattaatgtgatacaataattttgaaaacacttccgatctctacgtaactgagatgcacacaaccgaacatacaaaaccacactaaaaaacaagaatgacatgaagtattgaggaccatcaatcaccacccatggcatgcaaaacaaaaaaagaacatctttcccgtcatcaatggcctaggttctttgttttgcatgtcaatatattagaaagaaaagagttttttgtcacacaatgcaatcggccagacaagcctatacccgatggttaagggtccgtctgactcatccgagacctagagagagagcatttttttttcttctttgtgagaggacaagaaggacgtatggcggtcagatacccaaaggaagtttggagtttaaaactccaactcaacagcgcaaaaaaccgcccgtccttattcctagtggcggagctagcaggaaatgctactgggcgagcgatcgccctcgcttgcccagagcgatcagtttccacccccccccctccttccctccctccacctctccacctggtttccttttttggcaccgcattacttttctattttagtaaatttatacacctaaagtttatacacctaaagtttacacatctaaagtttagataccaaaatttataagtcaaaagtttatatatccgattcaaatttgaatttgaatttaaatattttttttatatatagtatttctatacatctaaagtttatacacctaaagtttataggcctaaagtttatagacctaaagtttataagtcaaaagtttatatacccgtttcaaatttgaatttgaattcaaatatccgattcaaatttgaatttgaattcaaatatttttcatatatagtatttctatacatctaaagtttatacatctaaagtttatagatctaaatttatagatctaaagtttatatacctgattcaaatttgaatttaaattcaaatattttctatatatagtatttctatacatctaaagtttatagacccaaagtttataagtcaaaagtttacatactcgattcaaatttgaatttgaattcaaattttttatatatagtatttctatacataaatttttctaacttttgttttttaaaaaattttgtgtggtctactgtagtagaaagaggagaaggggaggagagggaggagcatagggggaggggggccggatccgatcgctgggcgatcgcccattagcccccctggagctagctcccatgcaagtcgggtggccacccgggctccaccactaacatctccattacaaatatcttttgatgttggaaaaatactggtatttatttgggcttcacgatatcgatggctccgcgcactgctctagatctcgttattggactcgtacgtcgttattggaccagcgctaggcaggcacgacgacggcgaggtgttcggcagttggcacggcgatgcgtttcctgaaggatgtggggcccaaaccgaaacacgcaggcagctatactggcccagtaaaaattgcgacgcgacggcccaaatgaatagcttggcccacttaatctggggtgcccacatccgagagccgaggtccggagtatgaaactccgaaccccctacgccgtctgttgaattgcttgatgcccgtctgatcctacctacgcttatactccctccgtccaaaaaaaaaagacaaaccctgatttccgtgtccaacgtttgaccgttcgtcttatttaaaaaaattatgaaaaaaattaaaaagataagtcacacataaagtattaatcatattttatcatctaacaacaatgaaaatactaattataaaaaattttcatataagacggacagtaaaatgttagcacgcaaacctacgtttttttttttaaagacagagtgagtaattatcaatcaacaaattaagcatgtactcgtatgatgattgatgcgtgtgcccgtgcagaatgatagccgcgccggcgacggcgatgcgtgcgtgtctggctgaagcaagcaagcggtgagcaatggctggaattaattaagcctggaacatggcggccatgtgatgtgactgtctatttctgttaatttctgcaactgatggaacgtaactcaccagcaatttgtctttgtcaacttatattaaactctactaactccaggaagctgccacaagaaccaaacaaaaggaaaagtaagcaaaacagtaagcacttcctctgtctcaaattataaaattataaggtctatatttttctagcacggcctttaatgacatactttaaccattattttattttatgttatgttttcaacaaatattaaattactataacataaaagtactttgaaatattaatatagtgatataacccgtataatacttagtatatatgattatcagttaaaagttatcgagtttgatttttctttaaaagagggagtactccttagttataagttatgaagtatactaataagcagtccgtcctgttggtgcttaatttgcttggtgataaactggtaataatatgcacagtttcagcactagagtatctgaatgtttgtcatagacagagaacaacaagatcatatgaccaaaacggagtgcttcagtgcaacagcaggtgactgtcaataccaatgaaattcagcaaacgagacaaagacaacatatattctctggacagttatatctttgcttcttaaattccagatttccactctaattaacaaaaataaaactacaaaatatgcatgtctttgctgctgagtttattataagttgacaacaactgaacagaggacaacaggatcatcagatgatcaaaatggagtgtttcactgaatgcgcagcagcaggtgactgttaataccaatgagactcagcaaacgagacaagacaaaaattctctggacagttacatatttgcttcttgaattccaggcttacacttcaacaagaacaagattaaagaatgtgtagggataacatgatgagttccagcactagacttgctgatctgttatgatagacaagaagtaaatagaaatcaccctggcatgaagcatagtggaagatcagttcgatcaagattcagagcttcagaatatttttaacagctcatcaagatgtggtgctacagaatatttgaacaggttgatcaacacaactgaatcctcttgactcaccattaatgtagaggctacagcatctctcccttctgtgtcaaagaaaaaaaatcaacacaacagcttagatattacagattcagtgcacttctgatgaatgaggcagcgtagattggtaataaaataaatataagagtatcaagctacctaggacgacacgaatacgcgtagtaatatttggagaaagtcaaccacgcgttccatgttaaaactaatccacaataatggtcaacggaagatgggtcagctgttccatgcagccatacgacgaatgcaagccactccacatgcaggtagctagctagtcactcctacttagcttcactcccttagcttgcttggaatgatcaccacgcactgagagtctgaaaaccaaccagcaaatcaagctttgtggccaccaggcgcctgcaatggcggagctcgtggtcagctcggccaagggcgccgtgaggtcgctgctgggccgcatcagcaccatgctcgtcaacgaggcacagctgcttggccgcgtccgccgcgacatgcagttcatcaaggacgagatggagatgatggacgccttcctcctgctcctcctgcaccagcaggccggcaccctcgaccaccactaccacaaccaatgcacgccatggatcaggcaggcgatggagctcgcccgcgactgccaggactgcgtcgagcagtacgcgcagtgcatcgcagctgggccatcctccaagagcctcctcctcggccgcctccgccgggtgtcccggcttgtccggagcctccccgaacgccacaggctggccgtgcagatccaagacatcaaggtccggctgggcgaggtgagccaccggcggaaggcgtatgacatttgtgccaacctcaacagctaccgtccacctgagcaggacaacggcggtgaacaggaagatgaagctgcttggaggcgttatttggcttctgctgaaccaccggccgacctgaagaacactgtgaacgaacttgtcaggtggctcatggaggatcaacctgcagggcttagaatcatacctgtggtcggaatctgcgtggatacaagtgcgattattgctgagagagtctaccagcactcctctgtcaccagcctgtttgactgcaaggcttggatcactgtccgtgattgtcaatctcatcttcagattctcaaagatatactatgtcaacttgttctccctctgaacaagttcaggagtgagatgattggctggaacgaggagcagttggtggaaaagctgcgctgctatttgcgaggtaaaatcttcctcattgttcttcacgatgtccgtgatgaatcaatctggagtcatataaagcttgccttcccagatgattgttctgctggtagtgccatcataatcaccacagatgatgataaagtggccgagtctttctctgcgtataaaatcttcaacccagatagccccggttatgttctcgatttcttccttagtaaagctatagctctgcttaaacatgaaaatgaaaagcagctaaggaaaatcctaccgtgcatgctgatccatcttgaacctgaaaccttttttatgaagatgctccttcggtacctgtattatgggagatatgctacgttacgactgcgtgatgcactgcagcatacgtcatcgctgcatgattattggcctaagaatatggtatacttatgctacaattatttgcctgataagtaccggagctgcatgctgtatctgtctattttcccacctggttgcagcatcaggaggaccagcttagtaagacgatggattgttgaaggcctcatcactgatgagcaagagaggagtgcactaaaacaagctgatcactgttctgtccacgcgacatggatgcttcaggcaagttcaggacctgcatagtacctgacttggttcacgatgctcttactgatctggtagccagaggaagcaacattacttctgtggacacagttttggcgccaccagagttggcccgtcatctttcaatccgcttcagcacgaagttgcacatgtctccatctgaaccaatcaatagtattctttcctttctcaagtccttgcattcatcatctcggcttgggctgcttaaagtgctagatttggatggctgcaaaggtttgaagagacgccacctgaagaacatatgtggcatatatttgctcaagtatttgagcctacgggatacagatgtcaccagactgcccaaggaaatagagaatctgatctacttggaaacacttgacatccgacagacgaagatcagtgtcttccccaggaaatctttagtgctccctatgctcaagcatttgttctcaggccatactgtctatccaagtgaagacattttcaggcagcaggaatcattctctgccatccacattcctcaccaaatcgggaggatgaaaaacatggagatattgtcccatgtcaaagtttcacatggtggaatgcagttgattgctgttggccagctactgaagctgaggaagttaggtgttgtcatccatgacacagataaagatggttttgacagtttgcttcatgtaattggcaaattgaacaaatgcctacgatctttgtcagtccagattagatcaccttctgctgctgatggaagcaatggctttgacatgagcatgatgtacagcacatacccgaggcttcttgagagcctgaccatctgtggcatcaaaagtggattgcctccctggattgaacatctccaccaacttactaaggttactctgcataatacctccctgacagagagtgctatccatgtcctgggcaagctcgtgggcttgtgctatcttaggctccgacacaggtcatacatccgaggcgacctcaccatctctacaagggaattcaaaaacctcaggttccttttcattgagggcccagacattgtcaacatcagtttcgatgagggtgcagctcctaggcttgagaggatggtctggcgtttcacgagaatggtttctcttgttgggattggtcacatcctaagcatcagggagctcgagcttgaaggagacagtgacctggagaagattggggtgattctccgtgacatcaaagcacaccccaatgaccccagtctgaagcacattccagcagcagggaactaatcatgcacaaggactggtgcctacggatgaagcaaactgaaaaaactgccgtggcttagatccattatgtgcctggacaaacaaggatgattgacattactatttctttcccactttgagctgcttgttgatgctgctgctcctactacttctgaagcacttctactgttagtatggaataaagatgctgaagggggcccttcttcctcttccatgcatggattgttggctttgttgtattgtagcaccaatatttagtatgcttgtttgtttgtctcctttcccaacagtcatgggttttcctgtaccattcattagtaaggcttttgaaagaattcctgtgtttatcttatcttccttgtacaagaaaaacttggtgttattgcctaaagcttactcttcctcccttgtttctgtacacagatatgtttctcacttggcacccaataattaccactgttgtcaataatcctttaacaagtaaacaccggcctagaagcatcatccctccaaatccaagcctcttttagctagcaacgaaaaaaaaatgcagctagctttctgacagaaattcagaatcagcagacatgtgagatgaagataaaaagggggaaatggtacgagtcctacatgttacagagaagtgccaaggtattgctgcgagacttttcatcaaaccgaacaaaaggtattcagacataagcactgtaaaaatactgagaagtgattcttctacatggaatcgccaaaaaaaaaaaagaagaggtgggtgaattttacctagggctgattctcttccctctccggtgagaggttgggctatgtgggccaaaaccgactgcagctcatggcccagtaaaatgcaccgcgatggcccaaatacttagctgagttgctcgcttcttctgaattctgatagtatgtgactcagtaaacacacgctccaatatgcacactgtaaagcattccagatattgatactgaatgaatacctttatgaaccaaattatatggagcatacaaagaagctgcaatgacatgtatgtgaccgttgatttttttgataaacatttgaccatttgtattattcaaaatttttgtgcacatataaaaatatttaagtcatgcttaaagaacatttaatgataaatcaagtcacaataaaataaatgataattacataaattttttgaattagactactatccaatgaccatatgatcgacctaccttcagctccaagcctccagctctgcgattaattcaattaatcatgcatccatgagcctggctgaatttgtattccagtaggcatgtgactccagtcaaatttgataaacaacacatcttggatgaatagaggcagcatctggtacacaacaatgtaaacaaagacagaaccaatcaatgttactttccagctagaatgcatacatgcctggtattattctaggttatcttgtctttttttttttttcagaagtatcattcatactcaaaacaagtcgattcctgacttgttcaaaatccacatggctgttggtcctagcagactaaattaaggatttcataaacaaacagaatagacaaatacataccaactacccccgctactatattacaaatcttgttcccaccaaattcagtgtaatagtttataggtgaggtgacaccaaatagtccgaacagagaaattggtggtaccaaaagtggggagaaatcacaaaatggaggttgatatgtaatgtgttgacgattcacattgcaagtcatgaattgatttgaccgtgtttggtgtaatgtaatggtaccttagaaaatctggatccttgtgattctgcttagcatgtggtcacatgcttgctgacttggtaatgctaaaaggagatggagctggggctcattaaatagatgccagatttctagtagtatactttccccctctccagttgcacttgcacctgttcaggttgagttcatccttcccacttagctgccagtagtggccatggtgtgtgtctgatgagcgagctgagtgagggagatcccggatatggacgggtttggcctgagctccacccactccgccgtgaagtcgctcgtcggccggctgaccgacgtcctctccgaccaagtgcagctgctaggcgggctgaggcgcgaggtgcagttcatccgggacgagatggagagcatgaacggcttcctcctcaatcatgcccgcaggggccgcatggaccaccagctccaggcgtggatgaaccaggtcaaggacctcgccaaccattcccagtactgcgtcgaccagtacttgcggtgcctcggcaccaccagccaccgctcgccgggtggcctctggggctccgtgcgccgtctcccccggttcgtcagcacgttgccggcgcgctaccggttggctatccaaatccaggacatcaagatccgggtagtggaggttagccagaggcagcagaggtatcctctccatggcacggctaccgagcaggagccgcagtctggcatggccagcgatcatagccagcaagctttccttaccggtgacagtgaagccgatcagcaggagcatcttcggaggcgtatcttggccgaagacgactctggcctgttcaaggaggctgctgatgagctcaccagctggctgacagtggaaggagatggcagatcagatctcagaatcatccccattgtcggctcccgtggcatgggcaaaaccactcttgctgagcaagtgtacaaaggttattcctcaaggttggcagaccacaaggcatggatctcggttggctccaaccaatctccacagcaagtactccgggacatactcgcgcagattgtagggcttcatgctaacaatctgcaggacatgggaacatggggaaacagccaaatcgcactgatgattcaggagcagctggaaggtaaaaggttccttattgttcttgatgatgtctgctccgagtcgctctggaaagatatcgaagcttctctccactgcggtaattctgctcccagtgctatacttgtcaccacaagcttgcctgaagtggcacagtcattttgtccttacagaatatatgatctaaggtatatccaggaggagcataaccgctccttagttgatttcttcctcgtgagagcagctaactttataagtgacaatggtcatggcaaagctagtctcaaggaggaggttcttcgcagcattttagtaaaatgttccccctgtatctttagcatgaagatgcttctccgattcctttatgcgaatcctaacaagaccctacaggaactgcatgacttcagcaacagcctgtgcttctgcagccctctgcatctgtcttcatggctgtccaatgccgagaaaatgctcacattctgctacaacgccttgccttgtgattacaggagctgcttgctgtatcttaccattttccccaatgaccacaatatcaggagaacgagcctgctcagaaaatggatcgcggaaggcctaatagctgaaagagatggactgagtgcatttgatgttgccaaccgatgttttgatgctcttctcgctcaaagatttgttcttcctggtgatgttggaaattcaggcaaggtaaacagctgcagagtgcacaatctagtccgtgacttcattgcctgggtcatcagagatgacaactttgtgtacacaaagctaccagtcgacttggctcaccgtcttcccatccacaatggagaaagactgcagcaggtctcgcggatcaaacttcgtgcttctcatttcgacgattgttggagcatgacaaggtgttgcttcacaacgaagtcagtggatcccttggctggcatatccatgttacttagatcaattcaggaatctgctcaactaggattacgcctcaatgtacttgatctagaaggctgcaaaggattggagaagtatcacctgaacagcgtttgcaagatatttcaactcaagtatttgagcctcaggaatacagatgtttcccacttgcccaagaagatcgacaagctacagtacctggagacacttgacatccggcaaacccagataaaggcattcccaggaaagcattttatccttcctgggctgaagcacctacttgctggttgcaccaattgtcctagcaagaaaaataatctcatggaaaaggaatcttgctcgttttccactgtgctcatgcctcaaaaaattgtgaggatgggaaagttggagatactatgctatgctgaggtttccagtggcctcactgggctaatgggcatttgtcagttacgacgactcagaaaattgggagtactcttgcaaggtaatgcagcttgtaatctggattacttgttccgacaaatcgatatgttggatagaagcctgcactctttgtcaatccggatggaacgactgaagttagccaaagacgatgctcgcaaaagggatgacatggtacccgcgtcatttcccttctcacctccaaagtttgttcagaagctaaacatcagtggcatcagaagtgcattgcttggttggattggtgacctccaccaactttccaagataactctgcatgagacttcactcacggaacatgttctcggtatcctgggacagcttggcagcctgcggtgcctcaagctccagtgcaattcaaccatgggtagcagtctatcgttcaggagtggagcgtttcggaacctcgtagctcttgttgtccaggacaataacctccttgacattatctttgattacggagcagctccaaggcttgagagagtgatattgtctatcgccgccattgactctctgtctggagtacagcaccttcagcagctgaaagagctcgagctccatggaagtgcaagaaacataggcgaggtcgaacaggccatagcaggacaccataataatccagttttcagacacgagcaatggaatgatcttcactgaagcttccgaaattctgaatgtctggtgcttgcatctgtgttctacaatgaagatagtaataagtggacgcaaagcaaacctcttttttcttgatgcatccatgttaaattttacttgtgttggattttcagtttgtttgatttatatgtatcctccacagttgccactattaagcttgttgcaactatatcttccggaagcatttctgttgtacaaaattttccttagtcttctcattaaaatctcctgtggatacatggcaaatatcaccagtgtacaattaaagcaattcacatccatttgcattagtatacaccaacgcaccatctagtcaaagattgcaccatgtcaagggtaatgctctgtttagttgattgcatgctaggcaaagaaaaatgcagcagaattcctgacagaaatccataatcagaaggcacatataagatgacccaaaccatcagtagtgctggtgggtgagaacggtttcagtccaatcatttcatcagcatctaagattccaacatgatatacagaaatccaaggtgtagctgcgaatctttcatcaaaccgaccaaaatgtattcagaatcagtattgaaatgaaaattttctacttggaactgcaaaaatggggggaaattacacctacagtacacgcgcgggtgtgaatcgtcccacgcattcggcggaggcgagatacccagtaaaatcacgattcacccggccgagaagaaccaaaattttcccctgaaatccgccgcggcacatgcagttagtcatccctctcgctccgatctcctaccaaagtgcaggcgattgatctaacaatcgaagctcgtaaggctactactactctactcacctgccaacgccggccagcagcaaacgtctacattgcatccttcctgcttgaacattcatctccgccgccgccgccgccggcaaagcggcggtgccgtgctcgacggcggtgaagagggtggtccgattcgttcgagaggagaaacagagaaggctgcttgggccgtggtgggctctattaaggcaacccctaaatgggctgggcctcatttgtttctgaaaccgaggtcgtttcgcgaaggagatccactcaatctgaaccgcacgcacctgatccaacggctagtagtgtcccaggaggttcggagtttaaaactttgaacccccgctggtagcaaagaacacacgccgtgcttccgtactgtacctcgccggagcgccgccgcatcctggccgtctccgaccatccggcccgtccgtcaccgcgccaccgcacgcatcggcgaagggcccttgagagctagctaactcctgcaaacatgagcatggttaggagtggagctagaaccaaatgtggttccaatcgtttgctttactctattttggaccgagtttaaattgatatgggtgtctaggtttgaaccgagggagtgcacatacgatgaaaatagatgaattatatctaaaagaatttttgaatcggttttctgggcacacctcggacacatgtagcttggcatctgagcatgacagcaagtgcagtttaacttcagatttgttaggattctgggagaaattttccagtcaagatggcactgatgtctgtgcatctcaaaattaacatagaactgaggcagttttactcaattcattaaccaccgatagatcgaaagggcgaaacagattgcttatgtttgccgtgaggtcgaaatgtggatggttaagaaagctagtgatgatccatctgccgggaagtacataagacagtgcggttctgaagaaacaggcggtaactgtaccaattctaggaatcgattggacttttgggttcgatttgcgttgataaagtgaatggtagtatatatattttgggggaactatattagattgccatctcttgtttctcttccatgtcacctaaatagtcactaattttttttaaaaaaaagcatatattaatatgaaatatatcactacacaaatatgtaatattaaattcaatttctacaatttacaaataaacataaattaaactaaaaataattagcatacattcgcagttatacttgttattttgttacaacttgtaaatgttgaatttgaacttacatatttgtggagtgatatattttatattaatatatcttttcaaaattttttaaaaaaaattataactattaggtacatgcaagaaacggatgaaaacaatttcctttttttttttttgcccagggagagaatttaatttgcatgcatgtatgattgaagtcctaacaatcaggtgttattagtcgcatgccaacttgattaaggctgagttcttttcctaactttcccaactcatcttatcgtttttcgcgtatatgttttttaaactgctaaacggtgtgtttttcttgcaaaaattttctatacaaaagttgctttaaaaaatcatattaattattttttaaaaaaataaataatatttaattaatcataagaaaatgtgtcgcttcgttttacgtgcgcgggagatgagttctcaatcaatctcacctctgaacacaacctaattacttgaactaatatccaaaactaaagtcaacacaaagataaatattggataacctatatatctgttctatcttgcatatgcatgtggacggacgtatacaattagcgggagaagctagatgcgtgtaaacgtaaagccaaaatgagagacgaacatcctaacaaccaccaattaattatcacagattaaagaaagacttgattgaccgagctaagtcagtcttgcaaatatattcacaagtgtttgcattgacaaattatttagtaagtatacgtactccagcaagctagcttttggacagtggaagagagacaacccgaccctatatatacattgtacaccgggaagggatattattatccttcaaaatctcatataagtgttcttaaaacagatcatactccttccctcccttaaaaattacagtttcagctagtcaataacggattaaaacagtactatgcctttcattaatgaaaaaaatgttgttgtttttttttgacaaatttctagactaaaactacagtccttaaaaggagggagtatataaatgcaaacaggaaggttgttgggaggctgggccaagctaggctcctccacagaatatatgatcatgcatgacgtacgtatttgctagtcaataacggattaaaacagtactatacctttcattaatgaaaaaaatgttgttttttttttgacaaatttctagactaaaactacagtccttaaaaggagggagtatataaatgcaaacaggaaggttgttgggaggctgggccaagctaggctcctccacagaatatatgatcatgcatgacatcattgattttgtgacaaatgtttcatcattcatcctattcaaattattttacaattataaaaatatttaattatacttaaaaaatatttgatgataaatcaagttataataaaataaatgataattatatttttaataaaacgaatgaaaaaacgtataaaaaatcaacagtattatatattaaaaaaaggatggagtagtacttgctatgtgtgtcctgacataataacacacgattgatgacccctcttaattagtccatatacccgcaatagttttaaaatttatccctagttcatggaagattattatctctgagattttccgcatcaattgcaagaaatgacaataggtatgatgtctaatgttcttgtcagcatgtgaactgcatggcaataaaactattaattagcacgtcaactctgcatggtcgtattagtgttacttaatcttttggtgcatagattaatgctaccagctgtacttaatttatattacctacatagcattttttttatataggtggtatattttattttgaaaagtcttcaccgtcacgctttggacgctgatttgtcgtaatatatattcataattactactccctccgttttttaatgtat

SEQ ID NO: 27156 - DNA, 3423 bp, Oryza sativa
atatatatatatatatatatatatataaatataacccatgcatatatatgtttcaatacatatatatgcatacatatatatatgtatatatatatatattatattatattatatgtatatatggttcaggccatatgtatatacatgcataatatatatgtatttatacatatatatgttatgcaaatgcatatgtatatagatatatatatgaccaaaatatatttacattatagaaaatgtgtacacatgcatatagaaacatatgtagtcatgtattaattacaatccattatatgtcctagctagctacgatttcgacgtagtagtagtcgctgctagctcagaagctaaggaccggtgaattgtgtttccgtcgtagtagaattcacccttgggatcaaggatttcttcgttgatgaatcccatgagttgttcttgaaccgctgcgataaattccttgtgtgtggtcaggttatccctcatgcgaataaactatatgaatgtatgaaattgattagtaattaaacaagaaatcgttacgtaataaaattttgaatttatttgtacgtacatcgagctctcttgtggtgatgatttggtctgcaaggcagtggcaatactcacacacgtagtagccgcacaagttagttccctgcttttgctttgcgcactacaaataaatgacaaattaacggcgtgagatctaattaatatacagttgtatgtattaatttgaatcggagaaatataaatgtagagcatgtgtactcacaggaaatttgaacctccgcctaagtctttctctccagttgccgcggaccaaatgacggaaccgaaaccaagccctacatgtagtttaaagatatgattcgtagtagaaataattaacataacaagaatttcttaattaacagagaaacttatgccagtacctgtctataagttcgaaaaccttgtcaaacgtagactcttttttatccattgagtcatatacgttgacggtgcaggccgacaggtcgaagagtaaaagcacccagtggaatctgcaatgtgcgtgggatgcattacatatgaaacacttagcaagttcgtacgggaatgaaatttggtatgtaggaagacagtaaaattaaactaactctgtgttgtacggcaacagtatgaacgtcttgtaatgctgcgccttcaggagatggacgagattgtcctctgtttcctgcggatattggtcgagcattgcaacgtttactctccgagggtcgatgaatccagtatcgaaaaccctccgccatcgggccctttgaatctccattctacaacgataaaagggagtattttattttatatagtctacttatatacaaggacctaattaattaaaggagacgtagtaattaagaattataattgaccgatatacttacaaagtccagcaactcataatagagacgtcgagggcgtccagctggtatacttcgtagattcccttgaaattgatccagagaatatcatctccttgcaagaagtccgggtccctgatcctcgctccgatcatctctctaccggtggcgctcatctccacgtacagctgatggaacttgtacatttgtgtgggtagggactgcaccagctcgggcttgacaagcggtttaccgagttcgtacatgtatttcaattccgccttttctattggttcaactcctagcaattgatccgtagttagaccggtgtcaataataaattcttctatcgtcatgtcttccccggtcaccaacggctcgatctcctggtttggttgctctccaagctgagggactggtttggactttccaaaagatgctttcttcagtgttcgctcatagtccgatagcttgatggcctccttgacaggtgcagacatacccctgaagaagttcctgacactggggtctataggaatcttcttttctggccttcgaggcttgaattgtctcttgacttctgatgcaacgtaagcgtcaagctcctcttgcgtgcaatcggaccccgggtccttgttcttagcggtgtcaactttcgccttcttcgttgcccttgtgtgggcaggcggtggagctggggggcccttgactttgaaggtgccggaagaggagcttgcggaggagtaggtgtaggagcacgaggaggagtcggtgcaggatcctgaggaggagtcgatgctggagcctgaggtggagacggtgctggcggagcatgaggaggagacggtataggatcctgaggaggagatggtgcacgagacgccgcttgtcgcccagggaggatgatgtaccgcctgcgccatagaataatggcatggcttgtgtctcgtagatgcgtctcaccgtctcctccagggtaatccagctcgaggtcctcgtaggctccttcgaccaactcaacttcgaccttcgagtatcctgctggaatcggcctgcagtggtaagtacctgaagggtccgttgggatggccatgcccgacgccaccttcatgttgtgagagattatttattagtaatcaacatatataagcagcaactagcggaatggctaaatcttacctttattgataagttcttgaaaggaatatgcagctcacatggtgtccgctgagtgatgtcatcaacgggacaggtcgattcgtcctgtgtttgcatggcgttcatgctctgtgatcctacctgccccgttgaggcgcagctgctacggtttcctgacgggctcatcattgcaggaggaatggtcggctggggatcatgggaccgatgtgcggccatgcgttcatcaaccttccttgctacctcctcttgcatgttgagttcgtagctcgatacccggaactctaggtctgcaatcttcgcctcggtatctctcttgctcctcatccgactcctgtacgtgtggatgtcctccttgaaaccaatcttccaaggaatcacccctttccctcgagttcgtcctggatgctctgaagtctgcagggcgagtgtcagctcgtccctatctctgtctggtcggaacgtgccctgagaggaggcttccactgcatctgttagtcgtcgcgcagcctcttgtatctgatagccgaagaccagtgagccatcagctgggttgagcgttccaccgtgagcatagtaccagaacttcgatcgttccggccaattgactgttgccggttcgatacccctctcaatcaagctagcctccatctcctcccacttcggcatcgcgacgctatagcctcctgaccccaagtggtgatggtacttcttcttggcggcattttctttgtttctttccatcatcgcctgcccttgttcacctgtcttatatgcaacgaactcgtcccagtgatcccttagctttgggaatgtgtcgaagttcggtgtctgccccttcagg

SEQ ID NO: 27157 - DNA, 1188 bp, Oryza sativa
tccatcttcttccacttccgttatgatgtgccgaccctcaagcttcttcggtgcacctcgttgcccgcgtgcctttttctgtctaacggagggttgactaccactagcctcctcctcttggttcccctccacatccctttccacgtgcccctgctggttcccctccgcatccctctccacgttcccttcctcgttcaagtactggtttggatcctcgttcccctcttcttcattccagtactggctgcttccctccgcgattgtatcgtacaatatctgttcctcattgtggtcagccatctgttgatacaagaaacatctgctaagtcacgagacatttatgttttaacaatctaagtcatgtatgctaagtgtaaatgtcgtacattagaaccctacacaaccttacgtgctaagtctaattacaaatcgtgatataagctaagtctaggtgacgtatattatacaaccctagctagtaaataattatatactaagtctaattacaaataaaataatcttatattaaaattcaaataatattacatgctaagactaaaatagtcatgtatatgctaagtgtttcgtgcgtatatgctaagtctaattaagactacaatagtcaattgctacttgtcgcaccaattccgtagtcaataattacatactaagtctaattacaaataaagtaatcttatattaaaactcaaataatattacatgctaagactaaaatagtcatgtatgctaagtgtttcgtgcgtatatgctaagtctaattaagactacaatagtcaattgctaggagtcgcaccaattccgtagttaataatgtcatactaagtctaatttgcaataaaataatcttatattaaaactcaaataatattagaccactacacaatcttatatgataagtctaattacaggtctaataatcttaattaattgcattacaaatataacaatcatttatattattacgtcacttgcctgctccaattccttctagggctagctcttccactccggcttgacggtcgactccgacaacacgtcttttatgaaagatacaaaaagatgtattaggataaatgcaaagtaacatatatatatatatatatatatatatatatatatatatatatatatatatatatatatatatatatatatatatatatatat

SEQ ID NO: 27158 - DNA, 23860 bp, Oryza sativa
  unsure (1)..(23860): unsure at all n locations
cgttatggacaaggggatctcatctctcacctgcttttattgacaacaagatgcatctatacatcactgtttggaattccaagcttttaatatcgtccaggccaagaacagctagctccttcgaccacaaggtttactatatatcacccgaaatccacctaactcttaatactcaaacagtgtcgtttcttgatgcagctagacattgccaatgaaagagagtttaattttgaggtgttttaggcttgtagcaatattaacaataggggagccactacaagtatgcatagttacatatgcaatacaattaatacatacagttcgtgtcgaccttttacggatctctgttctaactttgcagatctaattaaccatgaattattgtttggtccttgcagaaactaggtccttggaacaaattaggtttgtttggtctgaattttctttcttttttttaatctcatgtagtaatttgaaaaaattatgcatttcagtattacacatgaaagagcaatatacataggtgaactaaggatgaaaacgttcaaaacgttatcatttctagctagaggaatggttttggtacggtcaaaaaaatttcatattggccaaattaactatttgattaaatttcacaaaactatagatactttgattaaattatcaaaaaactatatatttaagatgatgcatgtatcacaaaattataggtttaacatgaaattcattccggactacagatttaaggtggagtatcataaaactacagatttaataacaaagttaccaaaaaaaacaacaagtttagtatcaatttaatcacaaaatttggatgtttataattcaaacataatattagtgctaaggatttaaacccaaaatctatagttttgtgataattagccttaaacatgtagttttatgatatattacctgaaatctttagttctgtcaaatttactcttaacaatttagtgacaacttcaatacaatgctgatggaattaattaattaattaaattttatatatagctagaatcggaaaaacggcgtcacttttagttttacgaaaacggtcttggtactgtcagaaatttccaccgccattttttaacccccctataggtgataaaacaaacaacctagtaaacttttaattctgttggaatttctttaaaatttcttcgtaccaaaagagcttcgtagttgaactgcatcgtgtatagtaataacatggtcagtactagtggagcagtgtgcttcattcaatcactcaccctctccacataccatcaaaaatatataattaatgttctcaacaaccaaaagataagattatacctagtattacatacatccactttgagtcattaggaataacctatctactggataatactaaacaaagcagcaagagttggtcacacaacaaacatcagagtgattgccactgccaaaaccagctagccagccaatctctctccctctaattaatcctccataattaacaacagttcccccatgaccaaccaaattaaaaatgcttaattgcaggttggctaaccactgtttggtcggctgaacgtgtgattaggcttaattaatcctcattacccctgatggccacaagggtttgttaaccaaatcagaggatggaggttgggttattagctggagtattgcattgcatgcatgcgcgtgtcattattattttggaatgaaacgtttggtacacaaaaagcataggggagcagcatgattatgatgtgatggttagctagctactagtactatattactactactagctgattaataatcatcatcatgtgtgattagtttaggtggtaattattaaccaaattttggtgataattatagtattaaccacgccggataaggccactactcgccggcgattgcggtggctatgtgtcacggggtcctattgactggagctttggattgcatcaaggcttggcacttgtggtattttagccctgtttgtttaagatggatatgtttagttaatcacctaggttactagttttagatgtcatgtgaggtaactaactttcacatgaagaaatcaattgaactctggacaacaacatgcagctataacacgtaaatatctccccgcaaaaaaaaacacgtaaatatctatctatgcaaaaaaagcccttaatttctagctgttaaagtttatcttaatgttttttaccctcttatttctacaaaccgaggtgttgtatctcaataatcttacattttttcacctgacattgacaatactactttcttattagcgaaagttactttatttgttttctttcattactaaatgttctcaaagaaattaaggttatttttattggatagttgagtagtaaagacggcggcggcaatctttaacacactatatagttgatctatttttatattttagtggtatggagtttaattaggatgaacttccgtgataccagcgtaagtgcattgacgaggcatatgattagagtgaaggaggtccaattagcagatggattagtaggcaagaaaggaagagcttttgccgcttaaaacgaaggaaaagtatggatggagagacgagaggagaggaaattatgccgttgcccccaaaagctgcaacggcatcctttgcttcccgcttttcctgtagctttatttattagcgtagggtgccacccaacacaaatttgctctgctcacccccaccatcttctccactattggttagtatttgtgtatcatcattatatgagttctaattttgtttagagaagggttttttttacccggcctttacatccaaccggatatatgcagccattttatattaggaacttagcctattaaacaaggaacttagctctcaaataacccaatctgaaattagatttgaacttaagaccttagagtgctactcaggtcactacaacaactaggttattgccatttcactaaagctgagttcgttgcttaaggttaccaacttcgcgcgcacactttttaaattactaaatattgttcttttaaaaaaattctatagaaaaattgttttttttaaaaaatcatattaatctatttttttaaaaaataactaatacttaataattcataggctaacgggtcgctctattttgcgtgcatgagagatagtttccaactccagcaaacgaacttagcctaaaattcgtttgaatttctcgtaaggtccgctatccgtatcttatctttgtttcattcatattttgcagtatactagaaaaaaaatacacatgtgttgaaattggtgaaggctatcttaatgttattattgttatacagtttagctaaagtgaaattcattgtaggaatttgcttggatattgtttttacaagatcatgagctacaagtaggattagcatgcgagttttttttaagatttcttatacgactcctatgttttcgaaagcaaacggacttaaaaagtctactcaaatacaaatctataattccaaaagcaaatgaacttaaaaaccgactcaaacacggatgacatactaaaataccggtaaaaatatctttaatttttataatagtagagatatagttgtatatccatgtgcatgtagaccatacaacaatcacatgcaatatgttgcactgttgatccttgtttagagaagttgcactattgatattcttatagaacaagcatttgagttggttacatcaaaatattggttttcataaaagatgctataataaaatggtgggcacatgatgcatttatctatgcctcttgggtcatatctagagttaaaattgattaatgacaatactactactagttatgtgataggcaatttacagcggactgtactatatccggtgatatctaggttgctaattaagccggccttaagagtgacagtataggcaaaaatgaaagggctatgtgtgtgtgtatatatatatatcttgaagcatatgccactgaaaatgaaacttatgcatccaagttagctttttaaaaagggcactttttagatgagtaattgagaatttttcatggcaattatctactaaaataatgtcatatttacatcatggtatacctcttcttagaatttaccgatggagaatgtacaaaacatgagattcagtcaacatagatcttgtactcttaagacttaattagtatattcacttactttgatggtaactatgccaatccttaaaaatatcacttcatatacaacacttgatagtatccatctaacaaggaagacagacattaacagcatataaatttgcctaattaatttaactaacttacactgttacacataagaaagttactttgttcgagatcaacaagtacaaacaacgcataaatacttgtcatttagaatgagatttggtcaaaatttgcaactttaataatcaataacttatccattttcatattttttatataaaaaaagagagaatggtttgcatatatgtcttgaaaaatattgggcctgttcactttggtgtcattttcaaccttaccaaattttggtaaagttacaaaaaaaaagtggctacatttagtttgctgccaaattttagtaactatataagaaatcctgccaaaattttagcaagttaccaaaattttggcatagctgctaaaattttggcaatgccaaaatttggtaaggttttttttgcaacaaagtgaacaggcccattgtcatactatcacagatttatcagattttacaaacttatcattacataaaatcaatggtcaaagtttgactaaattttatcctcggcatcaaatatttacaacctgatgggaaaactgagctacttcctctgtcctagaataagtttatttttagcccctcccatttgccctaaaataaatttatttttaagtaattattgtatcaaagttttttaaaatagaggataaatgaattgagagtatataaagagaagaatattttttgtgggatttgataaagtgagggttttcttgtctttttattttctatattgatacgtgtaggataaatgaaaaataaacttattttgcgatagatggagtagctatcctttttaacacatattttgacacttcacgtagctaaattgcacctacataggtaaaaacaaaagaaaatgattcctaactataaacacaattgtgaaatggcatgtagcctagtggttagaagcaccccgaggtcttaacttcaaatcttcataggaatgaaattcagtttgggttatttgatggctaagttccctattggtaggctaaatttctaatttaaaaaggttgcatatatctggttggatgtagaggatgggtaaaaaaatacccttctctaggaaaaaaaccctataaacacaattcaaaatccataactttggagtacaaaattcggtgtgcatttggcggtgcaacatagcaaaaaaaaaaaatccccacacaaaccacccatgcaaacaacaactacatgacacatgttcttcattcccttccctccctccctttcgcactctcctcccacacgccaactcgcaaatgccgacgcccggctcgtcgccggtggcgacggcggcggcgcaccgccaccgccgtagccgacgccgccaccctcagggccccccgccgcgccagccctggtgctgctccttcgccctcgacccgctctccgccgtccaccgcagccccgccgggacgacgacggctgctcctcctcctcatcaccggcggcgaagcaagcacgccgccaccacggcgccgccgctgtcacgccgcatgcgctcgcccggccgcgtctcccccgtcgacgacgcgactgcctatggcggcgccgccgcgtcggcgtcggcgtgttcctccgcgcgtctgtcgtccgtctccgagtgcccgccgccgcctccgcctccgctgccgcgtccacgacctccgcctccggcggtggaggcgctgcggatcaggctggtgtccaagggcgtgatcctggaggtggcggaggtggaaagggtgcggagggagtgcagggtggtcgggaggattcttgaaggcgccggaggaaaggtggcggtggaagggaaggtggaggtgaaggcgatcagggagccggtggagatgatgctggaggacgccgacgaggccgccgcgatgaggcgcctctcccgcgccggcgtcgcccgcgccattgccgtgctcgaggtaattaacctctctcatactgctctgcttctccaaatcatgaaattgcaatttgagaatgaggatgaatggtgatttcttttttgtagttgatttgttcgcaaattctgcatcattttgtcgattgtacatgtgttctggtcaagaattgatcaggaaagatttgcatttattttacttactttggtcaataatagttaacactgttcctgaggtagacaggtagttgaggagttgaggtttggttgttggtggtcaaattgggaggatttcctgtttcttggatgttcatcagaattccgtagtggtttacttctgttccactcaatatctgatgctaattaatttggttgtcgagctatatatgtggttcagtaaattttaccacccaccaagatttgtttctcagttttccttattggcttttatttttcttcttacatagttcgatgagttttccaaatctctactggttttcttgattcgtttgggttaattggttaaatatcccagcatcacaagccatgtagcagatggtaacaaaaatatgagaagggaacagaacatgaaaataaaacaggacaaaaaattggtacattgtacactgtaaagaataaatcagaaaatcgttggacttcatattttgttctagtttttggagttgagtaaacttttttctgtcagcatcttcaattttatataaattgaagctttcatttttatgcccttcatttcctgttctttttttttgcagtttatatctaaatatcttctgcataaatctgtttcctctgtttcagttgtctcttcattttatttctgcttttgtttgatatattcccttacatgtgttaggttcatattttttgttaatgaaatccataatactcttgcatgttcggcacttactggcacacttcttgttgtgttacttttataaataattaccaaccttaagatagtactagtattaatcgttctaatttctagttgaacatgcctatgttatatgaattcattaaaaatcatcagattaggatttttgcttttgctgatcacaataggaaatacttgactcttatattagtgttgatctaaatttcttagacgaaatttagttgcttgctatgctctaaagaacatagaaccaggcaatgcaataagttgctgttttgcaatgattgcaatagctgcacgccaaggcagccgtttgatcatacaatcagctgtatatcaccttgtcttgaattatttatgagaaatcggcatttattttattcaatcacagtgcaatgagttggttcacttgtttggatttggactcgttatgatgaatgtaacatctgttacagtattttgagaatagccccactacctttttaagcttggtggttgcacgtaaagacatgatcatagcaaatactgttttgcaatcatggtattattgctctattagaagctactgctactgttaaaaagtggaagattccatgcttatgtgaaaattaaaggatcttgtctacttcatgctggggatctacattacgtgcgatacttcataggattgttaatttattaagaaggcttttgcactgtaaagattgagctcctgtgcattacagaaattagaataaagtctacagtctacactgcaaaaatctgcagagacaagttcatttcattattttaactccctttatatgtactgtaatatatatctcaaaatgtaaattggatttaagccggttcttaacatttttcacttaatgcctaatcgaatttctcaggtatccttctcccttatgtttgacagaggagtcaccaactgtctaaaatatctcgaggctgtcccatggagtgagcccgaggaggagaggatcaagagtttgctgtcccagtatccttgcaataaaacggtttctcaagatttgcttgcaaggttacagcctcaagaacccagttcatcagctgaactggttgttgaactcatggattccatcacaaaggggaccaacaataatgcccgtaaagatttgcggactcttgtcgacggtatattatccaggacctctatctacataaagagtgataaagagctggacatgatgaacatttactcaatctgccatacttgcctgaactgtctggtggaattatttggggaagcctctgacctgggcccttctggccaaacaaccatttcagttggaaaagggccacacgagagaatatgcaagcaagttgagaacctcacctggttgctgcagattctgatagacaggcagatgggtgaggaatttgtggacctatgggccagccagaacacactcagtaccatgcatgaacgtttttcgcctatggtacgttacgagctcagccggatttcagccacaattttcattgccatggggagtgggaagctccactgcaccagcacgtcgcggcttggcatcttcgaagcatggttcaggccattgctggtggattttgggtggctcaggaggtgcccaaagggcctcaacatggcaaccctggaggatggaattgggcaagctttgctgacactcaccttgaagcatcagcaggtgctgttcatggagtggtttgagacattcagtgggcaaggcagggaatgcccaaatctgatgagggctttccaggtctggtggagacgatcattcgtaagatccctaggtagcagcagctgagactgttcatcttcttgcaaattcctcacctgagtcaattgtgtgtaagcttacatgtaccatgtatgtttgatattgtcatatatatatagcttgtttgtcagattccctgacgaagcctgtatctgcaattctttagcactgctgagatgtaacaaaaggaaagaacaattctttagctgttgttccattggcctgagctgaatgcatttgcttttggtggttgataagttgatccatgattatgctccattgaatgtgagctgttagtagtagtacaggttcatttataatcggaattcctttataatccagtagagatccaaagctgcgtggtccagtgatgcatgggttgcaatttgcagaagaaaggacaacttggagtattgtagtagtacgtatgcaggtgaaactggagcttccggtgtttggtctcttggttatcatgggcaaatgatttctgtaatgagcttgctttgttagcgccaggaagaaattaattccactgaaatgttgctctatctcactatctaaatgaaaaacaagtttgtcaaaaaaaaaagagtaaaaggtagtttacaaaccaaactgggatcagattgtgacattctgttggagatatttattaaaaataggatgaatcaggtaaattccacagcctgccctttttatggcttctttttttcatacatgtcatcttctttacccaattacccatataaatggaacaggacgacaatggacaacacacatttcataaacactaaacaaagatttgttttaaggttagcctggtacaaatggacacaacagcttgttcagttccagtaggtgagattctgtgaagtctgtgagtatatgtgtctgatagaatgtcatagtcccaaggaaagaaaccaaggtactcaaccattcctgacttaggtctcttggtggcttcctttgatgcctttgtggtcaccaggccccttgcttttggaagctgagatcagaaatcagaatttgctccgatgaaatatacttggagtggaaattctgatgatggtgctgatggatattcctacctaggagtatttgtcactgaattattagcaaactaattaaatttcaatctttttccgtagctgtgcttgcatcatggcaggtattcagtctaatcatacagccaaatggccaactgtacgtacgtctcatagtcacaggcatttatgttcatttctcctttgtttttttgtttttttgaagactatgcccatctctccttgagcttcctcttctttttttattgagctgattctcaatctgtctttgatccacgcatgagaccatatgggattatatgtttatattaatttcgcctagaaaaccatgtctgttgtggtgatgtaccagtatgtgtgtcttttatgtaatccaaaaaaatatttattatgcctgatgacacataggccattggtgactaagtatcaagagatcaacaataccactttggtgtaagtataaagacatggttggtgctcaataacaaagctatttgcaataccaagggtggtccctacaaggaaaaaaaagaagctaggatagtcccttgcattttctagcaaataatcctaagctagctcaaaaggctgtccatgctgatcttagccaagcttgctgagggacatcctacccctgcttggaagaaaaatgatggtgattggctgctgcttttgtacttatcccaaggttgtgcagcagtgtttacagtaatattataggttgaatattttttatttcacaaatacaaatttacaatgcatgcatctaaccagccaacttaatggtgtcctacttcccttgaatccaaatataagagctttcgttttgaactagtgtagtaatgtttgctaagggcatttactctgttctatggatattatggggtctgattatgataaccagttcacctgaaatcttaaccaaatgatgaataaggtctctgttctcatcatttgtatcgcctttactagctagaacatccaatgttgggtccctgctcagccggtcgtcgtttgggaatgggggtgctggccctagtccagggacaatgcagggtagtccctgctctgtattgttggtgatttggttggctcaggaggatcagattcccttgcatttcctttgtcctcccaaggcagtataggcaatcatcttagtactaatatcatgcagaattaatagctagatgcatcacaagattcacatcaacaactgacaatgtcctacaatcaacagcatatgttaccgcaaactccccagcagccccagcaaccacagcataccatggagcagcatatgggacaacctgatcagagtggcccagggcagatgttgcatgcttctaatgttgtgaagctcgaaccacaacaactacaagcattaaggagcttgggtgcagtaaagatggagcaccaaagctcagacagtcagacccatacatgttcttgcagtagcaacaataacatttgctgcagttagcagagcagaattaatcctcacacaccatcatgtgcacagttaagacttgcatgcgtgtgatcctacaatctccgcgagcagtgcacgaaattatgcttgtggattggttgttatactctatccatcccaaaatgataatcatatatgtttatatatgtttatgcactaagagtaaggataatttaaaacgcgtcaatcaagacaccatacacatattctcccacaatgcatgtattaattgtattatgatgaaattcatgttcatgcgattatatgatgatcaatttgagaaattttagatttcattatatgatgattaatttgggaaggaggaagtactacctctgatttctttttttttaactagaaaaaatgcccgtgcgttgcaacgggtaaatgttattttaattttattattgttatacgattcagctagggtaaaattcaatgtgggaatttgattggatattttttttcagaaaatcatgagctgcaattaggagtctgtatttcatctgaagttagcatgctgggttttttttacaaaagatttttatacgactccttttatatttccaaaaggaaacaataaaatccaactcaaacatgattttgaatttccaaaagcgaacgaacttaaaaactgactcaaatacggatgacgtatcgaaattctaacaaaaacatcttcaatttttatctctcctattataaaaaatgaagatgttttttaccggtattttggtacgtcatcttgtttgaatcggtttctaagatcgttcgcttttggaaatagaatatgtgtttgagttagattttaagcttctttgcttttgaaaatacaaaaggagtcgtataagaaatctattttaaaaaactctgcatgttaacttgaaatgaaagtcggactcctaattacagctcatgtttttcttaaaaaaaatctaagcgaattcccacggtgcattttgagtcaatccattctataccatcgacaaattaagcgcgggttctataatatgccattaacaaagctcggttctacaatacaccttcgaacaactcatttacttccttatatgccatcggtgttagtcaaccgttagtcatacgccgttaagggaaaataaatgacaattttacccttaggataaaattgagattttgcagaatgccatgtctcattaaataatcttggatgctaaaaaagacatgtgatttctatttttctcatcaatgagaagaaatagtggatcgtgaccaatgaaatctatgcatacgcatgataccctaggggtaaaatggacattttcttcctcctaacagaatttgactaactgttgactagtggtgatggcatgtaaggaagaaaactggttgttcgatggtatattatagaactgagatttgtcagtggtatattgtagaatccatgctttgtcaatggcatagaatggattatctcgtgaattttaccctagctaaaccatacaacaacgataaaattaaaatagcattcacccgttgcaacacacggacatttttttctagtaatagtagagatttgaagtttaagacatacttcgggcctgtttggtggagcttaaaattctgagaagcaactactgagaagctagctggtgagaatctggagaacctaggaaacctagcttctgacttttagttcatttttcagattctacaactatagattctcagaatttaggtaaaaagctaaactgtttggagagcttctggtaacttaagattttaggagaagctgcagctgctagtagctcccaaaatacccttcatccggttcaaaatacacatacaacgatgaaaggtaagaaaattaaggaatgtgcgaaatgactatcctgcccttcatttcttcccgatctgtcccgtcccgtcccgtcccgtcccgaacctgcggcccgccgcgagagcgctccacgccgcgcgccgtcgctgcctgcacagacgtccgtagatgccagcggggcggcccgccggatgtggagcaaggcggcgcaagcggccatggcggcggccacacatgctcgtcggccccgccgtcccctccaccacctcacataatttccgtccacacctttcgaggctgtgcattgggtcggcgacagtagcgagagctggcggccatggatgagatgagagtgggacgagcagccgtggccgcggctgcggagtcgcttttggaggctacgtcggcgagccgtgctctcgactctgtcaaagacccccgcatctccccgaggttcatcttctccacactcctagcactagtacttccgtcagaactcggaattacaaaattcaggcttcaattcaatccttcctcacttgggaatgagaagaagtactcctagcactagttatgtagtaggaattcagaaatcttggagtaacttgatcttggaatacccctagcactagttcattcagaatttagaaatcctagcactacctactactccttcaacccggattcagaactcagattgcgttgtactccaaggatttagagtgaattaacatgtgattgctttaggcggtatgatgcgttagatggtaaggcagagagttgattaggctacattgttaccaatttgaattctttttttgatggttattcaggaaaacaagtcgtaagcatttcatttatgacatgttcatactcctgaatttcagagtatgattgtagcatgaaacaagttcagagtattcttgttactcctgaatttcttttagagaacaatgcaggagtagaagttctttttttttattattcttgttagagaacaatgcgatacaatttgggcatttggttttgtccaattggtgtgttattctgaaatggccattaggttcagagtacttgggttttgtctgttattctgaacttgctgaagaactaatcctagagatggtggtctgtgtgaattttctgagaaatcggagtaagatgttttctcgagtagatatcagtataatccgatttacagcatgcatagatttttttttttgataacaggtaatttgattacccggcttttgggagaaagccaaacaaaacaaggtctgaatacaaaaaaaaacttaaaggaaaaacagagtaaaactggggctgccagtacccatcacgcgctagaaaactaaaccccaaaaggcttacaaaccccgccaagaagtatccaaacgactaggaaatctcaaacccctaagagcaacatcactggcttaagcactaatattgtccggtagcacattcacaggacgtagagactccagcttagccttcagcttctcaagcagcgcgttcaaagcttcgcgatctctttcttttgacagcagcaccttccatctctgcatcaaggaaattgccttgtacactacctacaaaggtgatctcactaatttattctcaaaaacaaagtcatttcttaccaaccacaaaccccagcacagactagcacaaagaaaaaggcctaaattcacccccaatttattatccttaacagctcttataccatcccaaaaattggttgaaattaacccccccccccaattacctccattacagagcaccaagcaaagcaagcaataggacaagtaaaaagagcatggttagtagattcagttctcaggcataatttacaaaatttagtacccccttccaatttctctgaactaagagttcagcacaaggtattctccctctcccagccaaaaacaagaaatgcttgacttttaaaggaactttgcacccccaaatctctgttatctctttgtccacaacacccccaaactttaacaacctatacatagatttagtagtgaacttcttattcttctcatgaggccaaattaagctatcaggcaaatcatctagcctcacatgctgcagcaaacttttcaaaacgtctaattgagccttgtcagactggtccagatttcttctaaaggacaaatcccaattaggggcacccataacctccctaaccgaaagatgttgttgattattcaccatatataaggaaggaaacaaaattcttaggggaacatctcccaaccaaacatcctcccagaactattttttttctctattaccaatcttcttaactacaaaatagtttaaccagactttgcactcatgaaggcctttccaaaattgggaacccccactagcagaactcttaaaaaaactgcccctccttaagtacttattcctaaaaacaacacagctcatgttctgagagttgccttccaacttcatgatccatttactcaacaggcaaatattcatggtcctagtgtccaagaaacccaagccaccaaagtctttaggtctacacaaaccttgccacttaataaggtgatatttcttcttctttccattcccctgtcaataaaatctcccccttacagtgtctaaatttttgtaaaactcctcaggaggctttaaaaaacccatagcatacattgggacactggacagacaggtattgatcctgatctccctccccccataggagagatgaccactgtgccaagattgcaatcttttctctattttttgcatgattggaagcaagtccttttccctaccttaccaacccccataggcaaacccaagtaagtaaaaggaagagaacccactttacaattaagcatgtcatcatacgattcctcctcatcctttggaacccccaacacataaacctcactcttctgataattgattttcattccagacatctcttcgaaacagaacaacaagaatttcaaggctaacacattttccttagtagctttagtaaagagaatagtgtcatcagcatactggagatgagtaagaccccctggaaccagattaggaaccaacccctccaaaaccccattactgttagcaccatccagaataactgacaaagcatcccctattagattaaataagataggagacagaggatccccctgcctcagacccctaaaagtcttgaaaaaaggtccatgttccccattaatatttatactgactctaccccccttcagtgatcttcttaatccattcaataaaaatgctgttaaaattcttcttctgcatcacctcatagagaaaccaccactgcaccctatcataagccttttcaaaatctatcttaaagataacacctgattctttctttttatggagctcatgcaatacctcatagagaattacacacccatccaaaatataccttccaggaatgaacgcagtctgtgtccagttaataatccccccaatcacactagttatcctcatggttaaagctttagttagaattttcagaatcacattttgaagacaaatgggtctatattgctttattgtattagcatccttaatttttggcagtagagaaatcaccccataatttattctatcactgtctaaaattcctttctaaagatcatcagagcatttctttgatcaaacccctaaattcaggcaaaagtttctttataaaaaccccactgaaaaaccatcaggtcaggggcagtattgttttcatgttnnnnnnntcncccaatatgacctgatcaatttctgacaattcaaaaggtttcatcaagctttcattatccctctcattcaaacttaacctgttagcccaaaccccctgctccaaatgaatgtttctcagttcttccctcccaaacaactgtttgtaataatcataaatatgagtctgtatttgttggaaatctgaaataacctcctccccttgctgtatagagaaaatgtgacttttcctattcctaccattagcaatcctatggaaaaaagaggtattgctgtccccccttaacaaccattgttcaccccctctcctttgccaccacagttcttcttgtagatagatctgctctacttccttttccagctcatatctgacctcccattcttgaggaaacaaatccctctccttagcaatgttatcaatttcagtcagcttttgttctatctctttccttctctttttctgtttgctcaccatattagcactccacccccttaaccatctcctcagataaggcataaggagatgccagtaatccattattttgctctgtattctggcaggccacttctcaagcaattctttcttaaaaccctccagctcaaaccaacccatctcgaacctaaaattgtttcccctaactctctccccctccctagtgtctaacagcaaagggcaatggtctgagccaaccctcaaaagagaactaactatggccaaagggtataaatgatcccaactagaggtcaccaggattctatctagaacacatctgatgggattgatttgcttattcgtccaggtgaatttcccccctaacttaaacagttcttgcaactcataatgattaataaaattattgaaagcctcagttcttctcacatccaccccaccaccaccagatttctcatctagatatcgatacagattgaaatcaccccccagaatcataggataaactccttgctgtactttgttgccaatttcagctaggaactcccccctatgtgcctgttgagcaggaccataaacgttaattagctcccaattctgtccatccttcttatttttaatcaccattcttaaagaaaaggccccttgatcccaatcaacaatatcaaacaacaactctttaaccccagtcataataccaccagagtgacccacagctgccacatatctccaagtaaagttatctcccaccagattcctcaattccctatcaggaaaactttgcttgattgtctcctgaaggcaaattatatccactttttgttcaaaaaccatctccctcaactgtctttgtctacctgcagcccccaaacccctaacattccagaacaccactctcatgatttagacttctttctaggacgccccctctttttcggcccagaccccttttgcacagattgtttccctttctttttcttctgtcttagaccctcatggtcatgcaagtcaaaatcccccaggttatcaaaactctctttatctgcatcatccaactcatccctatcttcctccttcagaccctccatatactgatcattctccatttctatcacaggaacccccagaatcgcattattctcattggggtacagcatgcatagatatcagcattctcgtaagatgtttttgaaatttagatttccatactccctaattgtacatgtaaaatgtatttgaaaatacacactaataaaatgtctgcttggattagttctcatgttgctttcacagaaaactagagtatcaatggcttgagtttctgatatctgaatatttactgtaactgtctattgtctgctcaatatgtcttctgcagagtgcgtaagaaccatctttatctttaattcgatcaatttcatctcattcagagttcttgcttggaatgtgctattcttgggtcaattgcattcagtcacattaagttgagcacaagcacatgccatggaaaaaaaagaaagaaacttgaatggctcaagttgtcacagagtggaactccaataagtactccaagatagaatttcaggaatatcatcctcatgtggttttcaacccaagcacaaattgaaagaacattgaaaccttaagatattatcactgaattattgccaaattagacaaagagtacactattttgaaggtgctaacttcagatggagtacacactattttgtcaaacaagctttgttcttggcacaagcacaagcttctagtgctgttgaattgaagtgactggagcatcaatcggcttctactatggtagagttcctaagctgcttcaaaacttatcttaaaaacttgtatggacttcacttctgcctaggcacctgaactgccgcttgattcaatggatagctgttactgttagacaacacttgcatctaacatttgtatctgacatttgcattggtagtacacactctctctctctctctcctttttacgttggtatctgacatttccattttctgtcatattttcagctgttctgaagaatacaagtctgaagagctactttcaggtcagtgaaaccacactgacaaccattttagaaacagaattgaattgccctgattaccgcttgatgccttgaagcatatacaatcaaagttcaaacagatgtggccatcatatatgtatatgtagcacagtttgattcctctttgctagtcaaaagatggtatcatcaatcaataatagttacagtattgattccatggagtagtaggattacaacaattaaggacgatgaagagaaaggggtggctggcgatacacatagagaggcaaagcagggggtagcttagttacaacttacaaacgaagctctgatcgatcaagtctgatttgattgatgcagctgaagaagaagaggaagaagacgacgatgatgatgcaatcagctgctgacgtacttgtcgatgatggtggcgagggtggtcttggggacggcgccgatgacgctctccttcttctcgccgttcttgaacatgaggacggtggggatgctccggatgccgtagttggtggcgatgtttggtgagtcgtccgtgttcaccttgcagcacttgatcttgccgacgtactccttggccagctcgtcgatcaccggcgcgatcatcctgcacggtccgcaccacggtgcccagaactccaccagcaccggcgcctcgctccccagcaccatgctgtcccagttcttctcgtccgccaccaccactgccacgaccccacacgcacacatacgatggttttcgttttgttttgcaccagaatatgacgaatggtcaaacatgtgttttaccttcgtcgacgacgttgctgcactggcaggcgaagcgggaggcaggtcggagcggtgacggcgaggcgacggacaaccttggcttggactggctgctgccggcgccggagaggaggagtctgtccctactgccgccggaggacggtggctgtggggcgtgcagagtcgcccaggctctgaagcacgtctccaacgccattattttctcactctaagctacgctcctcacacgcagtgacacagagagaagagaaagaggaggagaaaattttttgtgtagaagagaaagaggatagggtttgttctccctgtggcattggataatcgggagctttggcgttggtgtggcatcgtgaggtgctcaggggttgtgcttcctgcttgtggatgaggtggttttgcccccctaaacttttggcccggtgtcgcctgatcttttcgttgcctccttcgtgtgcctgactcgaggatatacgcgcctataaaaatgaatatcttggattcttcaagttctctgcaagtttacaacacataaatttctagaatactaggaaaattgggcaactttatgtgaaaacactataaaatatttgttgtacattaaaaatatgtaagatgtgttttctagaggaaatccggtttgtttatttctttattattaaacaattggtatttctttattttttttcagttctctgcaagtttttcagcccactttttcttccaagatgatacgaaaatcgaaccattttatgtaaaaatatgttttcctaaaaaaattggaagtcctgcataattcatgcattccaaagcctaagaggtgctctagaggaaaagtcggttcattccttcgtttgtttaacaatgcatatatgatagtttattagtgtattcagtaatataattgcatatatgatactagtttattagtgtattcagtaatataattttgcattagttttcaaataattaaacatgatgtttggagtactcaaatttggggaaatcagtgaaataaatgtgtggcccatctccaaatacgtccaccggcctcaactacaccgcaaccgaattcaataaccacaaactttttattctcatttggacattcgaattgtgtcgataaaattatttggtctacttatacctctctatatatatagccatacatgaaaaattcaccaactattccatcataattgttgaccataaaaaccactttactttgtcctaagactggaacacttgcactccataacgctaattttgaaatatattttgtcaagatgatattccaatacaagtgtgcctgtagtagagtatcttgccatttataagagaaagtccattttacaccctcgaactcttatgtctgtccaaaatacacccccgaactataaaatcgggtataatacaccctcaaacccttatgcttgtccaaaatacacccctaaactacaaccgggtataatacaccctcgaacaataccagacacttaacccccgccctatttttaccgtggtttttgacacatcggatccacgtcagcccacaaaataatatgagccaagcccatattctctctctccttgccctgttgtgcttctctccctcatgaccgtcggcggagtggagctgcgagggcagcggctgctgcggccgcgtggcgcggctgcgagggttgcggctgcggcggcggcgtggagctgctgcgagggcggctgcactgccagggttgcggaggcggtcgtcggcgaaagcctttgcacgcagtcgccgacgaggagagcagcaacggcggtggagcttgctaccccgcgcggaagagacggacctcgccggagccacacgcgtccccaatcactgtcgcctccgccgaactctacatccccaagcagctctagctctaccggcgagctcgatcgatttcatggagaagatagagctcctggaggcggcaggagaggcagaccttgagctcgggctcgccggcggtctgcgtggaagggaaggctggggatgtgcttgagcttcgtcgccgcaacgagtcccctgctccaccgccaccgatctcttgctctacgagctcaagaatgccaccgccgcttctctcctgctctgagaggaagaaggatagagagagaaagtgaagaggagatgagggaagaagaagaggtggctccgtggttatagactgacatatggtcctaatttttatttttatttgctaactggacttccacatcaatgccacgtagataaaaaccagctgaaaaaccactcgagggtgtaaagtgaacggtattgaaagttgaagggtgtgaaatatcctgttttagagattttggtgtattttatacaaaataaaaagttagagggtgtaaatggacttatccctatttgtaacttgggacagcatacataagagtgcaggaggaggaagctaagggtgttacccaagttaatcagtatcgagatatgaggatcttctgttttgcagtatgataggatcgggatactactatattttgggatactactatattttagaaagtacatatttttatataaaatataatatgttgtataaattaaagcatataaattggttttgataaatttaattggttttaatgtaaacttaaacatatttattcatattattttcaatccaccttattttaaataatattttgtaaaatcgtagaatcgaaatactatctaagataggatcgtatgtaaatgaatagtaagatcaggatactacgtgggattagtatcgcggcttggtaggattgtagtattgtaagatactagaatacaaatcgggatatcagtgttaccaccttcgacaaagaataacatctagtaataacaagtagtgtggcctatcaatgacacgtcgccaaaccacctttaaaattggttaggggtgatattgagtatctagaaaatcaggttaactcaagtgtttgggtgaatactttacggcgtagggtggacattttcttcacactctgtttatatagatgtgttatattttaaacaccattagcatatatagtttgccttgcaagtgactgcacaactaggatagaaagtattcaacaaggtttatataaaatcatgtattattaaagacttaaagcggccaatatttgcgagtaaacgcggttgtgaaaaataagagatttgaacgatactcaatctgttaaaaaaaatgtaacaccctagcatccaaatttgtattagtctgctctacgcgttgagtgggcccataattatgtaacacctcacttatatctttatttttgtttcgtgtaaaagagttaatccagagaaaatatgtttggagggagatatatatatatatatatatatatatatatatatatatatatatatatatagtgaatgggcttgggcctccatatatatatatatatatatatatatatatatatatatatatatat

SEQ ID NO: 27159 - DNA, 43655 bp, Oryza sativa
accccaacccccaccgtccctagcttcgtggcccaccaaccgccgcgctgggaggcgccccagccctaggtagccaatgccgttgtcatcgagagagtaagtccccgtggccaaacacatccacgaccaccacatccgagtcacaagtgttcgccggcgaccacaacacgcagagctccaaccacatcgccgctaatctccagctctcgccgccgccaccgcttcagctcctgttggccgccgccgctctagcccccgcccgccgccgctccagcccatgcggcggcggccgaccgaaggggagagaaggagagagagagaagggaggaagaggggaggaaaaagaagagagagatgatgacaggtggggcccacatgtcagtggaccccacaattttttatttgtgtgaatgacaaacgggtcccacatatactttttaattcaaatgccagctaagcgctacgtcaaccctacagactaggtcaaccatgccacatcattgccacgtcagcgaaaccgccctccaaaaccactaagggagtcaaattgtaccggtttcaatatttcgggggtcgagatatccggttttgcggtttagggtcatgaattagatttgggtcacttttaaggaagtcgaagtggacttattccaactaaggctgattcagcaggccatacagatgcttgggctggcccaccatgtaaatggcccagcggcctgcagccttctgcatctgtctcccccccccccccctccgcatttcctttcccgtatcccgcagagcagaagcacacacacgctcgtcgattcccctccgccggcgaccaaccccgccgcctcccaccgccacgcccccgttctctgctgctacatctcgtcgcctcgccggcgccatccgctatctcccccggcggcggcagaggcttcctcttctctgctactcgtcgccggcagcggccgccgtctcgagtgcgacccacggcgggtggccgcggccgtcgtctcgacgacgaacggcgagttcgtcgccgccgtcgggcagtgctcgggcctcgtcgcgtgccgggcccgcttcgggaaggagcacgatgggcccgtgccagcccggcccgacccggcccaagtccagcctctactccccttaacatggtctatttacataaaagcccctttcatcaccgcggtaatacaaatatttctcctagtacaacgctttcacgaagttgggtgaggcctccacaaatccgaggtcttccctgcataatcctccctcctccgcggcaaagccctagaagcgccgccgacgcccacatggcggcgccctccggctccggcgaagccgcccccgccttctccacgtactacgacgtctacggacccgacgtatgttctctctcccaatctttctgttcttcttttaatcggttccccttttgatttcgggatttcggggtcttaagagtgataaaaacaggggggaggaattggcaatcgattatttgtggtaaatgttgcggttttattattttcgggtggtttttgctggtgggaacatatcgcattttgtgatttccgtggcgtcgaaagtgggaagcaactgtgctcttctatgttgttaacgcgttattatgattagatttttttttcttgtaaagctaaattcttgctaggattaaaacggagggcatccctgtttgtgtaatgatggtctctgcgattcttattgttaatggcaaaatctgagtgttactactgatagcgctgcgcttttgctggatactttgttcagaggggtgaagcgcggatatactactgtaacatacaaagatcctagttttgaagaacacactctcatggaagcatacatgcagttcattccttgattcattttattttaacagaggaagcattcgctactaaacaagtgacccgtcctgatttttgcactccaaattcctaatgtgaatatccctgctaaagataagacagaccagatcaatagaataatatactgctgctgtccttgttcatatcatcatttgtgcaaaatcaaaatactcccaaagtatcggtggactattaagtgaagcagcaaccaatttatctagatagatagttggctatttgttctgctgaatttactgatctatatttcctccttggctctaatgaaccaaaattctcataccaccgattctttcatcatgtccaggctaaacctgatgttgtttttaaggaggccacttcaaattctacgttaaatttgcaggttcttttcatcactgagcttatgaaattgaggtctgagaacttcccttgtaatgtgacattttgtttgttctttttagtgcaggatgttcaggggctagtaacttgggtcattggtgatggcatgctgccttcttgggtgtttgttaaagtacatattctcttccctatttcctcctaagtttcaatgtttagcacgtggtttacttttccttatctttgtccttctcaatgaaaattgttagtcttttttggggtccatatcttactgcatacttcctctgattctaaatataagtcattttagacttgtgaacaacaattaagaaaatagtttaaataactttttttgccctttatttattcatattggaaatatgattcattcatttgtgtgagaatttagttgccaaggataaaaagaaagaaaatatgaaaaagtgcccagaaattccaatatgatttatatgtatgaaagagttaaaaggctagagtattgccgaatatgttgttcttaaccactcagtttgatgttagaacatgcatagtatacctgacagcaagtgctttttcctgcaactgaaagaaaggtctgtactttgtttctaattttatggggtgtggcaattaactctgtctgctctacaacctggactacccaccatgaattttaaaacttgtaaaatactttatgtatttcatatctagagagatgttgattcacagtgagcactgatttttgtttgacgcatgtttgtcttatgttccaattttagattatttaattaatgcttcaagaaagatccccttatcactaaatttgttattcttttctgcgcagaacaagcctcttataccaaaagtcgtccttctatatgttcctggccttgatgcagctttatatatgtcgcaatcccgtcacctttcttctttgaaagaattttgtggcaatccaaaacctgttctagcttcaaggttggtgcactaaactggggagatggatgtttttgcccagaaccttgtggattattttgtgtgggcaatttaatgcctccttcgtataaatacactgtaccatgtattgctaatgatagcttttcttgcagctgtataccagatgaaaggcataccatcgatgcactcctaacatgcagagtaaagcgaaagcgtgcgttgaaaacaacggaccaatctcatgaatctgatggccaaggtacaagattgctgagggttatgtttcttttatttttaagaaaaaatgttgaattattcttcttatttgagttcttgctatgaagttgtttatattatgatgatagaatcactgaaaggacatatgattaccatttctacttttgggagatcatgttaattatcaccattctgccttgtgccatttatttgcaaagagatttttattcttgaatttacagcagacattatttttcattcttatcatttttttccttgtacctactacctagttgttctttctcagccttatttctgtaaaaattaactgttacatagcatctgcattgagatgcaatgatcataacagaagcaccagctcactgtattgccatacagcttttatgctggcctataagtgcacctacagtctctagatttacttaatcaatcttttccatgagaaaatggtacttatgtttttatacctaagatattgtattatgtgcaattttttaactgttttacatattccagaaaagttatcaagtttggacgatctaaaggatataccgtttcctattaaatattacacgctttctgaaaaagacttggaggacaatggatacaacttcagtttagaaggttatccttttgtttttctcctctcccgcttgccctttcatgctctcagctgaactcatatattattgccacataggttttgtccctactgtttcagctcctccaggctcttcgccatatgcaattcttgcacttgactgtgagatggtaatgtgatgttctgtacaatatgaggcccccttttgtgttttctgaaaataccaagtacactgactttcaactactatatgttaccaacagttttgcactgtgacatcacttgtacattatttgtgtctgagtttccttaagatctatgttttgaaagtttgcgaccttttcagtgtgttactgcagctggatttgaacttacaagagtaacattagttgatattaaaggagaggtacctactttgcgctcaatcctttattgtctcactattctccctgctgagtattgattttgttataatctatttcaggtggtgctagataaactagttaagcctgccaatccaatcactgattacaatacaaggtacatgccatgatgcctctaatctcctttgatgtagggctgttacacatctatgcttattctttcctttacatagataatagggtttggtgcctttctttcaatcatatgtttgatattcctttaggaagataaattggatctgatacctatctttgaatcatgtgtattgtattatggatatgaatgaagtgctcacgcatcatatgaatttcattgtcctaatttggccctttatgttcttcccttgtgatattctaaatgatatctccagtgggctctaacctctaaatgattaatcggaatatccaacagaagatgtaattattcttgaattgtgcaggttcagtggaatcactgctgaaatgttagctgatgttaccacaaccctccaggagattcaggtaattgttgtgtttttgtggccttgaatcttaattggtcttgatactgtgccaactctttataccattgtatatttgttttcaggaggagtttgttggacttgtgcacaaagaaactgttcttgttggacattctttggaaaatgatcttatggcattgcggatatcccacgatttgatcattgatactgcagttttgtacaaacataatcgtggccatcgctttaagatcgctttacgtgtcctggcaaaaaagtttcttaaccgggagatccagaacactgggtctgggcatgacagtgtggaggatgctaaagctgctctagaactcgctttattgaaaatcaaatatggtaaatatgcactttttaatgacttcaactgtcatctcagtaatatcttttagttatttttctgttaaaatgtaaatttggataactggttcaccaggtcctgattttggctccccaccatcaacttcacgacgaaagttggcttccatactgcatgaaagtggtaaaaaatgctccctcattgatgacgcctccgttcttgagcggtattcagatgcttcttgtaattcaatagcagttttctcagatgatgatgcactatctagatcaatgaaagaggttagtactacacattttaagtggcccttgtctcttccctgagagcttgaaggctttcattagtatgcttcttgaaatcttactgcaggtaaaaaatgacaaagttagttttgtctggactcaattctcgaaattgatctcgtatcttcgtacaagggcccaagatcccgataaggtgaaatcgtgtgttgcagaggctattgcattgcagacctgcgacagaaaaactgctcagaaaagaaaaaagcatcaaacttgtcctgaactaaaggaaattctgattgggttggacaagaaaattagaaaattatacagcatcttacctgataatgcaatgcttattatatgtagtggtcatggtgatacacctttggtgcaaaggtaaagttacctggagccatacaattatattcctcctcctagtttgtccatacagttcacgttctaaaatcgttgtgccaacttttcctaactgtacttcatgcagattacggaaaatgcttaagcaagaagaagaaacagtagaaagccgcgaaagcattgttaaagcattggaagatatacaagcccaggcagaagttgctctatgcttctgttgtgtcaaacattagctgtaagaagccttcttaccaatctcttttccctcatgctttgcaggctgaataattaaggctgaatttctttgttggcaggcattattcagacgatatacttgcggactctgtttattgtaggaaggatggagccccatgcatcccactaacattagaacttctggctaacatgaacttctggattcaattttgaaagctgacttgccagttttagaaggcttcacatatgctcatgctgctcttttgctaggctatgatgggtggcatgtttctatcatatcaatgcatcatttgtaacaagatgtatcagtagcaaagctaccagggatatattagcagatgaaaaaagatattctttttctctcaaatgtatggtgatgaaaacagctttggtaacaaaagaagctcctagaattgttctgaaaagacagatttgactcattgctgattcttggatgtttggatgatcattttaacattggtgcatctgggaaaacgtctagtgacatcatttacactattttgagtttcgtgtgcagacgattccacccgaaggtttgtgctgacaacgaaaggatgacaatatatatacctaaacgtgtatggttccgtcattttgagccatacatatattggttaaattgtcgaaatggtttgtacgtagcttttcatagatgccagacagtcgagcagataacgctgacgctaaaagatggttgcatttggttttctacttcgtcaatgatgtcatcacgaactgataaatatgaaattctttctatttttcagaggaaaaaaacaaggttttgcttgttccgtacttctactgtatattccgacaatagttaaacacttcccgggctgtaaacagtgtgttttatataagttctctatctaagttttctatatagtttctactcccttcgtccctaaatataagggattttagttgaatgtggtgtattctaatacaacgaatctggatatgaagcctgcatatatattagtttcttcaaataaataaataaatgaattaattttcaagttatagactgataagctcgcacgaagagcagagctgattcgaacgcagcttaagcatttgcaaaagtgaagctaatatcaattctgtatcttaaaaatgcagatggatgtgcacttagcagggtggtaggggacaagggtcaaatgaccaatggtaaacaagaactaaaagacgaattataagagctgcctatcaaacgattttgagccaaacttgcaatgacaagctagtctatggtccagacatatctgaaagcaattgaaatataccgtgcaatttaataagcacatgcgctctaccaacagacaaccaccggttggcagaacaaatccatcagtcctttacctataatgattactgactcattaaggacatttccacgttaattgaaataaataataaataaataaatctagccaagtgactgaattatagcaattccaaataaaactgctttccatatatatcagatccagtttgttaattatagcaaatttcacagttataataataagggctaaaaaaactaaatggagactctaagacgaagtacaactttctacttattaataatgaattatgaaaaagctgtatctaagactctaataagcttttgtacttactactagtagctataattttagaatcaattaattgctgaaaaactaaaaaagactccataataaagtacacaattgtatatttactaatatttaaattcgagattatgaaatgaagtaaaacatatagtactagaaaaaatgtattttgttggattttagacgttcatactaattgtgaaagggattgctagaattatggagttgcatttttcgcttaatttcagttacttctttttatgtgcttgttctctcttctatatgtaattatgattttatctctccaatcttctcatttaagtagataataaattacttttcttaattctcttatacgtttgtattaaacaaaatacaatgtaaatattgaaacttacagagttggttttaaaagttacatatttatggtgtaaaaatgatttgataactttttgttgaaaaatatggcaccataaatataggtactcccaattttgaatgtagaagctattattaaaattgaattttgttttgcactacttgaaaagaagctagatttgtttttaaaaaagggttaggttacataaatcaggatcctccacattattgaagaagaaaatgcagaggagctactatgctgttcctagcgacagtagtactgcatgtctgcatcattgtggcactagacacaaacgtttgtttgcacagtgaccctctgcattaaaatggatgatctataacttctaataaagtttaggtatagagcatatataatacaatagttcgtacgaatatatttaagtacataacgatcaactgggctttgtctaatccaaatcattcgttactctgtaattatcgcatcatctgtttcttttctcataggagttgtactttaattctctatattcaataaaatggacacatccttatgcgaattcatttaaaaaaagaaattcactaaaattggcagcaaatgagattttgcccaaatgacaaattgtactatgcaccatggcttggcctaggtaggtggcagaagcaatactaacttattatgcctaaaccaaaatgcatggctcttttgttgctttcatccaatctaaagttggtttcttgtccaatatgtagcaaagttctctggttatatatgtctgtggatagtacacatatggttgtgttgcacgagcgattaattaagtgttctctggctttgttatttaataattagttgaggatggttgtatctcctcctttatttggctagctttgtttcaaggaagtatcattttcttttagatggaaagattaattagttgaggccggatggttgtactctaaaacgtactacttaatttagctagctttgtttcaaatgaggtatcatttttttagatggaaggaaatacaaattgttatctatattctaattcagatgcaaagtcagaaatatctatattttgagatatagatagtaatgaggaagtaatgattcttagtgaaaacacatccacacatctactctaggttgtactaataaataataataaacatcataattccataaacattttgttttgtaatgaggtcacacagcccttacactagggactgccaattaataacatatccacaagggcaaccaaacatgaggaggcaacccttgattataatagtgacatgtacatttgttattgggttatcttgttagatagattttgcaattgcacgtgtattaacctcctgtgtgtgagaaaattgtatatctaccatagcataatattggatttgctggaataccaccctgaattaggcttcttcgtcaaaatgccatcctggatgaaaatgcccctagctcttcttctttctccctccaatgcctaaagggcttgccaacggccaaccccgcgccacctgtgctgcctcgccagcgactagggatgaaaacggtacggaaactatctttatcattttcgttttcatttcttttcagaatcggaaaccccggatacgaaaccagaatagaatattatcgaaaccgaaaacggagtgaaaacgaaccggcgcgaatacggtagcgaaaatttatcggaatacaaaacccctcaaactgataaatccaattctcaagtctcaacggtcaacaattcatcataaaacacaatcatataagtctaatttttaagtctcaataatacatcacaaaacacaatctatgaaataaattatctacgtttaagagagtaatgctgttgataaatcctaatgctgaaaaaaatattcttatgtaacttcaaatttacataacaaatatttttttttaaaaaaataaaagccaaacaccacggtattcactattcagtacttaaaaaaagaatccagggtatttcagtcaaaaaatttccgtaaattccgagaaaatttctagaaaagttttcgaccgattccaagttccgatggaaactgcccttatcattttcgattccgtttccgagaatatttccgaattcatttccgtttccgaaaaattccgaaaaaattccgatcgacagattctgttttcaaaaataggtccggaatctgaaaagtttccgtaccgttttcacccctactagcgactatgggggtgctgccctcactatcgtccgtgcctcccatcctgcccactctacaaggcattcggcctctatgacaccaccgttcctgttgacgttgacgccttgatgcgccacccctatcgctggtgagttcatccctgtcgacacactccatggctcattcgtcgtcaatgtcggccagttgtataccaaccactattctcgcggaaatttgtcaccaaatacacaaacgacgcgcgacctccttcaaaacatggaatggcggtggtgacagggcacggcactagcgggcatgacgaggagccagcaccgacatccttctccatctcctgcaccaccgatctccttcaacttccgcaacgccgcagcctcctcaagccccagcatgacaggcggaatgggaagccagaacagtagggagggtagcatccccattgtggctagtgaggtggcatcggtgatgcggcggtggagctaacggttggtgccggtgagctcttcaggcattggagaaaggaacaagaagagttaggggtatttctgtttaggatggtattttggcgaagacgtcctggagagtggtatcctagcgaatcccatttaagcgatggtactctagtgaatccagtcttatgtgatagcagatatgcaattttctccttgtgttctgttgtcgactgaagcattcaaaagcagaagcatgattcttagttgagctagcttgcttatataaaaacatgcatttattttgctaggtattatgtctagtcatgagttccctgactacaagtaacaccacatttttgtgtaaagctccacaaaccaaactgctgagcttgcttaagacataaagcctttgcatgattcggttaactagttgactatattgattatgaatttcatccaattaacctagttcccagtacgaagggctagcgaaagctatcttttcatgttgatgatgtggaattataacacatcaagatatggatcaaaccaccacatatataagttgttgatcattcagttgtttatacaatagattgttaagattgaataagtaatcatatatatggttgtcgttgtccatttgcattttggttaaccaccaaatttaacatgtactctaatttctttattgtttggccatttgttgcatgcgtctagctatctgctatcaattcacccatttcctttaatttaaatggacccttatcgtcttgaccatttttcatacatcatcctacccattattgtcaattgactgttagcttggccatttacatgtacagtttgtaacaattaatcaatgaaaaaaattacaagccaaaaaattaaccatagtaccttacatcattttagctcggaagctatcatgcattctgcggtagaatctagcatcaattgcaagcaaataaacatgacgtaacagagcatattctctctgcatatatagctccgatgcaaggtgacccacctaaagtgttatcaatcaacattgtctgtatatgtctttgtccagttgtattatggttaaccaacaaatttaacctttcctgctatttacttctcgtatcaatttaccactgcctttgaattggatcaagacctttttttcttttgacatttttcatatacatcatcctctgtacaggttctttattcttctatttaattaagtcaacttaccacttacagttttgtaacaattagtcaatgaaaaaatgcaaaaaaaaacaaaatctatatcattttagcatgaaaacaatcattccacggtacgaaatagcagcaattgttagcaaatagaaagggcgcacagaacatgcatattgtctgcctacataggtaccaatctgaagtaggagtatctagcaacaatgtctatattggattcaagttattgtatcactctaaagagataagacacttaatttgttgctatctctcaaaatgtttgcttaggaggtctctctctcatccaccaattttaggataggatcgagtacacatgtgtacaccgatgttcagtgcacttatgagttctaacattgtttcaagtgtgtagtcatcggcttatcgaaaaaagacgtgtgtggatatggtggtgggagtgtggtgtgtatgagttgtatatgttttgattattctattaaggaaggttgctaggttcatacgatagagttatcctagttacatttggtgtgttaacttagataaacaaattttaatggttgaaaatgctagcgtcttgccctttactgatttgccaacctcttttcatttgtcctttcactgattcaacaagaatattatgcttgtgaagtacttcattgatttagccctccgatattaattgttctatttcgtaacgccattagctcttaatcattttttcaaagtctcatcacagtttcaactttcatgggcacaagctaaagcggcattcagagatccccaaggtgtggaatagtttttagaatatgatattactatttgagttatgattatgtaagaagaaatggcttaattttataattgttgtggttgaaactggttttttcatgtctcaatgattgccaacttgtcatcaacttgcatgggtaaggagaaaatgacctgtttctctagaaaaaaaatttttagtctttgaacaatgcaaaatctatttgttcatttgtctttagatgaaggtaaaaatccatggaattggtgaccgatctgttcattgctgttaagtttagtcaaaacatgcagtgctgtgatgtgatgtttggttagttacatagagtacttgtctagtgcttcttttttcttttatttttttttgttttctgttgacatatatatgttacttttgttgatgccaaaaagtttatcctcttgatttgcactagtcattataatcggaaggcgttgctcaagcgaagttttagcgtcgacatttcaccacttatgttttactagctacagtaattaaatatcaaggagaaaaatattactagtggttgaaacataaggagaaatggttgtgtgcatctgtttggatgtagaggcctgtttaattcattattaaaaaaagtgtatttagatgacacaagattagaatagctaagttatatgaagaaaaactactaaatcagcccaattctttttttaacccaccccttacattttgtagaacaaaaaaagttgaatccattaccatccctaatcgcgccacgacctgtcacatgtaagctgtcatcgatccgtaaacataggtaatttttgtcctatagctaaatggagttggtcttcagacgacttaaaccaagaagaaattaatgaaaccaagaagtcgtctgagtcctgtcaaactaaccatgcattgtttatttccttcattagaaagataattaattggtgttgtcattgtcagatagatgaacacgttaattaatttgagaggaggcgatcgatcaacacactcaaagtcatcacatgcgttgcacctcgatcgatcgatcgagatcttaccccgcgttatcacttatcatcatcttcttaattacgttcttcttcgcgagaagaagcggtgtcggaaggtggccgcgccgccgtacgaccggccgtcgtggcgtgcaaaaagaccagcgacaacgacgacgacgacggcgacggcgacgataccacggtgactagctaattcagtggaaggagatgcgtttacgcacgtataccatatgatcgaataatgccgtcgtcaatttgtcgtcgtcagtgaaataatccaaacgaattaattgtacgcgagaattcgagatgccacttgtgttaatttagagcaattaagagaggcaaccactacataaaattcaagacaaaaagagagaggggaagagtagattagccaaacaaacattgggactactgtattagaattagtatagatgtgatatattgtatatgttacctctatatttattagttgatgatgtggtatgcaacatccacctcttttataaaacttgcccttagtcctaaacatatcccctcaacatgtgtccaacgttgtaaacgtgtctgtgattggctgggcgtgcagatcgataaccattttaattagtaataatgaagagacaatctagaagcacattgttggcaaggtcatttctgccctcgttttaggtgcaatattagatttttgacacataaccacaatcgatcacataattttggaggagggcgatggtagagtcgtatatgtataactctatatatgggtgtttaaatcttggtcccgataaatatgactctgtgaatccaccaggtgcagaggctgtgtgcagttagtgaaaatcttacttgaaatcttaagccacaaagctctatcgttcactctttaacttatcaaatttatactttaaaacttaattttagagttttttctttaatttttttatcatagtttatttttatattgaggcttttacgtcgctaagaaataagaacacatatataagtagtttaatgtataattcctttttattaatgtgttatgtacggcttatattcagttgtatgagaaataatttgactgaatgagattgtacaatagaatcttagtttttttaaggaaaacatgtttaattatgtacacaagaaattagaaacaaataatcagattgatgagcttgcgaaaaagtatagcagcaaaggataacagagggaagtaaatttaatcttgtgttgtttgctcataatttactttaagttggtgtacttaattactttgtttctaattctcaatctaactaactgtgggagggaagttgggcacgtgctccgatggtatgccaatgaaattaatgctgggaaaaacgttgcgctcatcctgatagaagcaaattaaccaagctattgcgaccacaactagatcctctgatctacttggccatgaccagtgccacaatttctgtatcagagagttctagctaatttgccttgtccagtaatcaaaagaggctgatttgtcctgtccagtaatcaaaagagggggaagaatgtatagtataattcttttgaggggaaagaatgtgtagtaattaatcaagttcttaattttccttttagtgtacacttattttttagttttattttgaatttttgaattttaattttatttcaatgtacacattatgctactatcaatctaccaccatcacctattgctatcatatgtatcatatttttttcatcaatccagcgccaggttacaagtttctgagagatccttatctttttttgaaaaattactctatctaattgaaccaaaaataataaaataatagctacgatgttatcttagaaattaccagttttggtagatatcctaccgccatggaacgcttttgcattgcccactagtattttacaaaactaatattctgtctttgtactaaagtctgagggtatttcctttccctttcaatagctactgtaaccgcgagagcttgtgcatgcgtccccactttgtttctccaagtccctctcgtctaaaagctaaaaattttggaaatttcaaaaagaaattgttcaccgcccaagtataatacataaacaaaaaaaattcaaatacttactaaagaattaatgatagttaagaggatactgcagagcataaatgcaatagatattaattgtctccaaaatctagcttagagcaagtttaatagtatagccactggtagctccaaatcatctatagccaatgtaatagccaatttatacaatagttgcttactgtactattaatatctggccccacctgtcatacacacgttacgtcttagagtccgtgctgcagctggctaccgatatatagcccgctgctcttctctctcttcctttatctctttaaaatatgtttatagctggcttatagcctgctattgtacctgctcttagtctaatattccgatcgaggtgcaggtagtaccccacttaaatttttattcccactgaagttaaactatatgattgcagtgccaacacttaagctgacatcacttacccatctactctctctatccagaaaaaaaaaaactaacccgggtatgaactctatgattagatttttttttacgaagagagtacaatttatagtggcactaaaccatccattataagcagactgagttcgggctacatggaaaacaatattacccattaacatgtgattaattaagtattagcctaaaacccttgaaaaataaattaatatattttctaaaagtcatttttcataaaaataacttttaaaaagcacactgtttaatagtttgaaaagcgcgcgggtggaaaaagagggaggtgagttgagaaagaaggagaaagaacacaaccttagtgtctcaactctacaattagtagctaaggccaaatgggcaacatactagtactactaaacaaaatgattggggagagagtgcagaggaagccaatgcatggggagatggtccgtgtaagtttagcaaaatactatatatgctagtagtagtagtaaacaaaatgattagtggctggcccaatgctcccacttgcaagctggagctctcaacactcttgtcctaatgagcttatcatcgtcaatgagacaaaaaaccattcaggtcgctcttatcaaagaataattatttgatcttatcgttggaatcatgctcatttggagaggaattccatgataggtcttccttcctctctttgttcttgggaaacatactcaaaaccattatcatgttcactttttttctaaagaaaatcattttttgacgcaaaggtagagagactctaccttaattagttaatggcaagattgagaaggcagagagagacaggaaaaaggtaaactgaaagggatgagaagctagcaaaaaatagagagaaaacaaaaaagaaatcagggtaaaattccctgagcctagtctattttcgccgccaagaggcgaatgtgtttcaagttggctgggcttgacgcgaaattcaaattcccatatgccaagacattctttgatctggtggatgtgcttttcaaagttgaggtttgtttggtgaaaaactctggcattacttgcttttcataagttgcgagaatcattgttatgttcatcgtcactagattcactttgactgtccatttcttactcaatctacttcaatgttaaggttgcaccaccatggaatgaaaaaagaagttcaaaaatctacagtaccccacaagttctctgaatgtgattactaacaaaaacacttaaatttttaaaactgaaaggaccttaatgcatcttctaggagattaaaataatagaatgaacctggacagtttcatgaggtttgatcagtctattctgaagatggaaaatgaggccgtaccgctagctacccccaagtttgaggaactgaatttggcactccctccatatcaaaatattttctacattcctcctcatctcaaccaatcataacctttccctcatttaattttttatctactttctaatcttaataaatcacaactatttctcacctcaacctttatctctttaaaaaaaatgcataaatagttatattttgagaccaacggggtagctgattacttgtaatttgtttttagctatgttagactagaaggagatttttatttccttgtgtaataaattctatgcaaccgcatatatatttaccatattaccatgtcacgcaaaatcctcctcaatccttctgtcacacatgcatggatggaacttcaaattgatcattccaagctcaccttagcataagaaatcgcaatgctaagtaatacggagttcatattttctttgtcgccattgactcttacatatatgtttaccctctctggttccataattctttacgttttgaacaatgacacagtctccaaatatatttttgactttattttttgttatgatatatatgataaataaatgcatgtttatttttattatagtactttgaaagacaaatatacatatatgttgttattattcttttaagtttaaatatttttaaagttattgatgttacattgatctctggccaccgagtcagacaattgcgcacataggcttggcctatcccacgcccacgcgcggctaacgttgagggccgattccctcggtctcgagcacacgttgctctctctcgtgcaatgatcggacgcactatctacgtaatgggctcgcccccgatcccttcagtgctcacatatatataaagggaatgctacccgttcgttggtggcgatcgatttacggcttagccaaacccaaactctcaaactatcgatcttaaggcgtgttgaaggggaacaaagggcgaaatccattgccactgctgcacggtgatcacatcaccggtggcctactactgcaacaccgacgccgacgccgacaaaggattaagtgtggtgctaatggcttctccaaacaccggttagtacatcaccaaatttcacataagcttaatggggtgattatgcatagcctgagttcatgattttaagaattaattccaataattgataaccttgcctaaaatgtcaagaattacgaaaccggagtgagtacgtttgatcgtttatcttattaaacttttttctataaatatgaaaaaaaatataaattatgcttaaattaaagacattcaatcaatgataaaataaatcacaacaaaaacaaatgataattacatagtgtttttaataggacacatggttaaatgcatgcttaaaaaatcgatggcattgtacgttaaaaatcgaagtgtaacatattgcgagtgatagatgaagttctggttggatcaattatggcattcatctccttccattaaattcttcgtttccccaagtcgttcggattcacacgcatgatataagatgggaaaagcttattccccgatcaatgcatgtcttcttttacttgacacgtcagcttgctgtaagaaaacagtaacaggtcaccattatcatgcatggcaattattatgctggaaaagagttagaccttcaataattagcacaatggttgtactcctagatgagatgtcaccaaaggattatccatatggtctagtactatggcccaaccatagttgtcaatttgattagctacacatagaagaaaacaaggtttggctaatccaacctaattgtaactagtggataagaaagcctgactatagctgaacacagaagagaagaaggttggctaatccaacctaattgtgactggcggataagaaggcctgactatcttatctgtgaatttgttgttcatatatgtttgctgtttgtacttttcaacttttttgacatttctttctgttactttgttcaagaacatatataagtatataacgtcgtttagaaatgtggttccggaatttacatatagctctacatcatctgcaactttctattatcaattctcaaaaaaaggaaaataatatcaaaacatcacatacaagcaggcttttgaattgaaatggatttcaaaattggatttcatttgtgagcaagtaatgttaattagttgaaccatcaattccttgtatgcatccaattcatatgcaaggaaccaaacagaactcttggtgtcctgtaccatttgccagctacctacattactcaaagccttttaagattcattgttaacttccaaaaagaacatgacataatgcagttaggacaagaccaccacttgattagtgaaggattaaggaagaggatgatagatacactgtgttgacgcacctgaaacagagattgccatagctttgcttttagcagaatcaggtaccctgaccctgctctgctttctagcagctaatctcctttcttttcacactttttaaaaagttacatgaccacaggggaatagtaaaaagcgactacaggtcaactataaatgtcctacctgtctcaactttagaactctcaacttcggtctctcggtgtgagacataggatgtgtttagttcgtatgccaaaaatcttttaattatacggacacacatttaaaatattaaacgtagactaataacaaaacaaattacagattttgcctgtaaactacgagacgaatctatgaagcctaattaattcatcattagcaaatgtttactgtagcatcacattatcaaatcatggtgtaattaggctcaaaagattcatctagcaatttacagtcggactgtgtaattggttttttttgtcaacatttgatgctccatacatgtgtccaaacatttaatgtgatgaaaaagttgaaagtttaaagaaaaaagttggaatctaaacacggccatagtctttaataagatgataaatgtgctgcaccgtttggtagcttatattatcaaacaataatttgatcttatcattaggactatggtttttttttgcgaggatcattaggactatgttgaaaacgctactagtcgtccgggctttacggtgatactggtttcaccgctgggctagtactaaccagacatttttactcgagttagttataaatgctttgcaactgtgtaaccacttatcacatctggcaaattaaatcccttcaattctccagcctcgcgtgcatatggatatagatggaactgcaagattgtctccattggagcattccaagaagctcatctgccacctagaccaaactgatcgattactaacatcagctcgtgaaacatgcatcacgttgtgtcggtgccagatcgatcagtttctctgcttcaattctgtcggccatctcctgcaaatttaggccatgtcacatcggacgtttaacacatgtataaagaattaaatataggttaaaaaataactaattatacagattacaactaatttgcgaaacaaatcttttaagtctaattgctccataataatttgacaatgtggtgctataataaatatttgctaatgatagattaattaggtttaataaattcgtctcgttgtttactgacggattctgtaattagtttttttattaatgccaaacaccctatacaacacctcatataatacctgacgtgacacgctaaaaccttacaaccgtggatctaaacaacccccttaactctgactcatcgtgtgctcatatcaaccgatctgtggctcctgctgccctatttgcatctgatctgacatgcactatatatcgatcacacacaaaatgacacaaacacagacacatgggagagcttcaggccctgtctcctctctgcttatctacaattttattctactacacatcctacgccgtgacacatcagctgctcctactgatcagctagaatcaatgtacgtacccagaatacagcgacgcctaaccttctccattgcagagcaacaacgacatccaactgtacacgataaatgctcatcagagtaagagaaaattagtgtctttagctattatcaatgtatcattatcaatcgataggagctgggatttatcatcgatagctagctggattagtcactgaaaagattccttcgtgtggtcctagttaatcttgggccccaaacgtggctgtcaattactcaagccattgaaaaaaatgcatcaaattaaatcgaagaaaaggagggagctagatgctgtagctaatcctccaaacctactgaatctgagtggccaggtataaacatgaataataatccgagtagcgtataagagggcccggctatcttatcatcatatgtgtgtggagaccatatatatgcactgatcgatcgaattttgtctgaataacatcacaaatttcgctgtcggaaaacctgtaggggatcatcatgtcgttcgcctataatttgatctgcagtgttcagtagtcgtctctgcgtatatataatatgatctcactggttggatgcaattatcagtagcaaattgcatgcatgtactgatcacacatcgacaacttgagtgcactgatcgtatatactccctatgtttctaaatatttgatgtcgttaacttttttaaatatgtttaaccatgtcttatttaaaaaaaataagtaattattaattctttttctatcatttgatttattgttaaatatacttatatgtatacatatagttttacatatttcacaaaagtttttaaataagacgaacggtcaaacatgtgctaaaaagtcaacggtgtcaaatatttagaaacggagggagtataatttcgataatagaatagactgatcgtgttactcgtgggagccatttgaattttgttattgggatggtattgtacatgatgagtagatccgcaagaaacaaaagaaaaacatcgtacgacctactgtacgtaccattggcatgggcagatgagatcaatgaaggaacagatcagatcggtctaagctaataattgtgctccttggctaggttttcaatatattcagatctcttgtaaatttttttatacatcgatctgcatctgccaattgcgttcgattgagcaagattgcttatctaccactactactgcaaatatagtatataatgcaattattgtcagtgagagttgaatatatattgccactcaagatgaggttgacacaaactctgcatgcatatctgataaagcgaaatagtactccctctgttttcggataactgatattgttgattacatacgtctcactttaaccacaaattacttttaaatgattgtgtcatatgatgaatgcaagctttatgtgtatcgataacataacatattttcaagtatttattttttaaaaaaaacaaagctagaggtcaaattaacttgaatagttaatttcatcgtccattatttgagatcgcgggggagtaacaatttacacacactagagtaggatatatatgtgtgcttctaggtcctttttgcttgctgtttggagagaactaatttgaaatgtcacaattgtgacctttcaaggcttattcctatgtttcttgaagtgtcgcaggatgaagaaatttgacttgatctttcggaaagtatcagaacatggagtgccttcacatattttactggcacgtaaattaaaattcttggtgaaacttagtgcgtgtgtcaaaaaaaaactgtcgttaattaaacaccattattcttgtaaattaatatattgtgccaaataatgtcaatatatacatagtggtctatacccttgtcatatccagccgtatggaaacaaattaatacataggatgattggaaattaatatgggatatcaaatatatatttgccctaatcccttgtagtcagagcgggagcaaagttgtagtttaagttttgagttggagcagagtacgtagaatctaaactccccaataagagcgtgggtcccttgttaaagatgccaatatagactatgataacataagaatatggaaaaaagttcaaatacccctctaaactttagatgaaagtctgtctaacaccctaagctttaaaaccggacatccatcccactgaactttgctataccatccatattatctcctaatgtggttttaaatggtggttttgcatattttggaaacttaaacgaataattttgaataactaatataacatatttgtgtatgatcagttataaatcatcaatttattcttcatatcatgctattattatgttggtacttgtttgtaagtgagagctaataaggagcacaaataaatattcaggtcaaaaatttaatatatatgtccaaagtgtatgacatatgatcaaactcatccaacttatatataaattagataaaatccactatgcaaaactatattatggggttatataaacggtattgtaaaatttaggagactgaatgtccggtttcaaagtttagggtatgctagacagatttccatccaaagtttaggggttattggaccttttcctaagaatattaagaacacaaattagtccataaataattcactagtagataaagtgcaaatcattttttatgtgcttcatgctaatgctgcatgggattcctcgagagatataaacaacacctacattatcatagtatattacgatagcatgctgtacgtactaagagttgtaagcccaaactatcctccatggccacaattaagcttctatgataatcttcgtcgtctagccttgaatatgaacttttgtatttttttcaccgaagaatattttcgttggtggtcatcttaagaatgcgcttgtgaaaattaattttcgctgatgaccctcttaaagaatgcgcatgtgaaaatataggatgttcacttgccattacttgctggtggggaactcggccgcctgcgcaaaacgtttttaggccgccagtgcaaacgcttttttaagtagtgcctattgtctcttctggttcttcaccatcgatcgctactagtagtgttggtcacaatcacatatgcctctccaatccttgcactaattgactgtgcttgccccattgctagtgctcaccttaatgttcacgctggcctagtgcatttgccgtttatgctgtactggcccaagtgcccgtacccatgctcacctacactacctagaaaaatcgttttttttttgggatggccaaaaatcgtttttccggatggatggaaagcccgcctagacgcgtaagcctaaaaaatagatcattttcacaggcgacatcaccatctttgcaggcgtcatagccacacgcctacgaaaatagtttaggcgaaaaaaaaatgccgccgctgcagcccctccccccctccggccagatctaggagggaggaaggccatcgccaggagctggcgccacctggagccgcgccggcaccggcgccgccgagaggaagggaggggagggaagccgccaccgcttggacctgccactgcagtccttcgccgccgccaccaccgccggtagccacagttgccctcccccctccccccttcggtcaaatctgggagggaggggagccgctgccgccaccgcccccctaccagcggagccgccgccgccgccgcccttcaccaccggctccaccagatctgggaggagagaggggagccgatgcctctccaccctccgtgccgccaccgcctggagccgccgccatcaccatcttccggcaggtgaggaggggagggagagatgagggagaggagggagtggagaggagaggggagggagagatgagggttgagagcctgataggtgtgatgatttagcgattttggtgggtaggtgtcgcttttaatatatttaatcttttttgcaggtggacaacgatcttgtcccacggttgtcattttcgcaggtggccatctagctttgtaaggcccacctacctgaaaaaaataccatcgtctggaaaaatggtttttctagtagtgctaatgccgacattggtgtactgcatgtgtcatccccaattacaatgcatgttgtatacgtccttgtgaagttttgcacatgtgcccttgctggtcacgttggtgattcctctggccttgttgtctatgttagcgaaccacacctatggtcttatatatcctaaggggtaaaaatggcttgaaaatagatggaaaccagctctatcatttctgtttcactttttttttcagaatcagaaaccctggatatgaaaacggaatcgaacattatagaatacggatacgaagtgaatatgaatcagggcgaatactaatttgaatatttatcagaatatgaaaacaactgtaactaagtttctcaaatcaactgagagatgtagctcattatatttttgtaaaacaatataataacattttaaatttttatcaattaataataatacaactagttgtatactccactttctaggagaattaaaataagcaagaactacataaaatagtatgacatagcctaatgaaataagaaatagtcattaaacaaaagaaaaacaagtcaaaagcaccggactagaaaaaaatatctccattcaacaattacatcaataatactcagtacaaatctaaacatcttgagtagagaaggatgaaggtaatcagctgtacatgaaaagtaattcgtttccgattaaaaaaatctgaatttgtttccaaatttatttccaaaaaaaatctaactgattccggttttccgacagatggtagccttaccgtattcagttccatttccgagaaagtaattccaaatttgtttttgtttctgacatttttcgaaagaaaatccaaccaacactttcatttccagaaacacatccggaaatcagaaactttccaaaccatttttgttcctacttatcctcctgacaccaccagtacggtgatagcctagtggatcttttctaacaagtttcatgctgattgcttgttgcagtataaggctttataattgactttaataatattttcagttcggtggtcaagcatgccacttttcgcacaatacttaccatgatgtgaaaaacatgttccttcatgacactctaacaatgacatattatactttttttcatccttttgggtttgttgattcatctcaacttgatcttgtatgtcacctcaatgagtcgttgtatgggttggagctcgcccctcgctcttggtatagtcattttccgctttgctcactctgataccatgaaagtggaatacctcatgcagtagattggttgcatactataacatgaatatgtatataaacccagtcttgccatatccaattgtactatgacttatgaaaacaaataccaaggattataaaggcatgcacggatatattatgctaaacatatggggctaatagccacataatccaataatgggagttaggtattcaattaatggtactatcaattgtgataagggaggccgatacatcacatgcaaatgtggcgtccatgtcatcagaagagtatagagacaaatcaagtgggaccagctcgatcacttgctagtgaaagggggaggggacgcgttggaaacgtgaggatacagctcaccgtgtaatgtaagccacattttattcttaatttcattgaaatttatagagataggcgctggatataaatactttggatgtggatacaaatccaacttattcaggcaacagattcgctctgaaaagacaaagaaactagagggccaaatgtttccaactcctccaaaaatttgtgagatcttggtgcttggtgggaatttttgagatgtgcaatatgctggaccaaatggacagggaactaatggcgataaccaatcctatctatatatatcattctaaagatatggagccacacaataagttcctattgattctgttggcaggagagaacgaacggcccaaatatggcgcaagcacagaccattaatcttcttcccttcaatttgcataccaaaaaattagttaccacaatttgtggatctcctacaattgcaaccatgcatttgatgcatatgcatgcacccaggagctccacacgacactccatcatttttgacgaccttacattggggagccagccagtttgtcaaaccattgggaactgcatgatttggaaattggataggccaacttttatacacaagagaagttccggacaaattaaacaactaattaggacacatgatcaatgtctagtcagtgatccaaaataagctcacctaccattctcaatttctaattccacagtccatgcatgcttaatttgcagaccagctaattaactctcatgccattccaatcaaccaggcttttgttagctgatcactctccttaatttcgttatacacttggagaggcacatcacagtattatgtaccatacagtacttgtcccaaccaaccaaaagagacagctagcttcacacgctgcacctactacattaccaatagtgaacaaatgcatggctgcccatgacttgtagtacatgggctaaaatttctggctcaaatgcaacctatggggcgcattgtgtgtgcacaataataagtttgtgatggtaacggagaattgccgtggtcccaatctgaaattaacttgatagagctagctagcaacaatgattggaatccccatgaaacctcgcctttcgatcgctatatgatcccatcatcgtcgcaaaatagggattactactatataaaatgagtgagatgtgagaaattaccataacaataattcagcgtcgcttataatcctcgtgtctatattaattaagttaagaaagaagaagcccatacttggtgtgtttggtaggaagaaattgttctccctcagttgttgaactattttccatattctattaatatatatttatagaagagaagtggattttatattaagccctataatatatgttcccttgtttctcatgtgcaattaaataatgttttaaaaaaatcaatatagattactgtatcaccaattattcaacaaacttttgcatggacaaaattaatatagaaatgaagaaacaaaaataacaaatttcattgcaaaataatttgttttgttttgttttcccctatggaaaccaaatttaaccttgcattttgcatattaacagatgacatcctaatctaccttgttccattttccaattattattttcagtaactatttaaatcacatgaagaaaacgtccatgtacgatcttgagggagtattttatttctagacactgggagcagtttaatttattttatacatgtagtagtacgtagtgcctaaggctgtgtttagttcagcccaaagtttggattttggttgaaattggagatgatgtgactgaaaaattgtgtgtgtatgacaggttgatgtgatggaaaaggactgaagtttggatccaaactttggatctaaacacagcctaaataattgttgcaaatctggatgagattcttcctcagtgatcatcccctcgagctcgagctcgttgcttaggctgtatttgggagtgctggcacgcaaaacggagcaacgtttaatgcgtgattaattaagtattagctatttttttttcaaaaattgatcaatatgatttttttaagcaactttcgtatagaaactttttgaaaaaaacattagttggaaaagcgtgcacgcagaaaacgagggagaggggttgggaacttcctataccgaacgcagccttagggattaccagtactccattttaagtgaggttgtaggtttctgtttcaaacgtttgaacgtccgtcttgtttaaaaaaaattaaaaaacttaaaaaaagtaagcattaaatactattcatgttttaattattatcgaataacaataaaaatactaatgataaaaaaatattaaataagacgaaaggttaaacgatggacaccggagcacacaactgaaataggatggtgggagtatataggagtactgtatcaatacactaataaactacgatcccgaagaagcatcttcccaagtcatcctcgttgcatggggattaacatagaaaatctgaattttccaaaacagttcggccacacacctaaaccaaaacaagaaggtcagatcgtgctagctagctagatcctgctggagtagtgctatacttcgatcctttgaagttaggggatcgtttttcggcacacaagggcggagctacatatgcaagggagagggtgtctaggaatttggttttaaaaatttagcaatagtttatctttttttattatatgtgtattcctctcactacgagtttatatatattcacatttgcctaaacttaatcaaagatgagtaaagtaaatgaggggtcctctagctactcatgaagctaagtactactccctccatttctaaatatttaactccattgactatttagcatatctttgaccattcgtcttatttaaaaacttttatgaaatatgtaaaactatatgtatacataaaagtatatttaacaatgaatcaaatgataggaaaaaattaataattacttaactttttttaaataagacgaacggtcaaacatgttatagcgtcgaatatttagaaacggagggagtattcaggaacatgaactgaacatgcctactctcatgaatcgtaatatacgtacattagcttataatttctgtgagggtgatctatcgatcgatccccgatcggatcggcctgcaggttaactataaccactttcgcattctctatcgttttgaccacaatgtatattactgtttattagttaattactaccagtaataagtaattaattaatcaatcaattaatcaattattatccgtgaaacacgcttgcatgcatgtgcgctggccacactcagctgctaccttggcgcgagacgcacggagccacacgtgagaccacccccaccccaccagcgtggcgtgggccccactcccggcccaccaggcccagcccgcgcgcgcggctctatataaatcctcctcctcccctcctcaccatcaccaccgcccacaacctcagctcagctagcaaaagtacaatatcccttgtacggacgcctagctaagctaagctaattaagctctaatttctcttttcttttttcttcgatctccggcgaaaaagtaagtacaatggccgaggtgaacggagccaataacggcaacggccaccacggccacggcaacggcagcggcgctgcggcggcggcggggcggtcgacgagtgtgtcgaggaagatcgagtcggagggggcggtgctgatgcccggggtgtacgacgcgctgtcggcggcgatcgtccagaagaccgggttctacgccggcttcatctccggctacgccgtctccggctccttcctcggcacccccgacgtcggcctcctcacgtaattaattaacacacaattaattaatctcatatatatatacacacacactctgtttgtgtgtgaattatttgctgacactagccgtttctccggcgaggttcatgcaggccgccggagatggcggaggtggcgaggcggatctgcgcgtcggcgcccaacacactcttcatcgccgacgccggtcatctctctctcctctctctctctctctaaaaatggcactttaatatatataagaccaagaaagaaaagcaaattaacaaagaaagcatcgtataatatatgcagtaaagttgacagtgcatgctagatttggaatgctaatgattcagctgggacatgtttgtatagtaatttaagtacaaacttgtgtgtatatgtatgtatgcatgcatggtacccctcgagatataattatatgttgcacatgaactttgctggaaagcacaattatatattagctgaaagggggaaattaaaaaataacactgtcctataacgctgttctggggtccatcaccatgcacaccagaagcttggaccagggatctgcaagtgaaaacagtgggtgttaaaatatatttcttgttctccaaaaaaaagtatatatgttggtgcatgaaactgtttaagaagagtagtttataaggacaaaattatatttttgttctcctggagacatttgctaggtgatctgtttccttcagtgctaaaagaatgttgacacaagtactgctacagctttttttaattatgcatgccatgacgatgattactgttgagatgacgtactttagccctttttaactttaaataaattgtattttaattagcatcacttactgtacatgattaatatgattttctgttgtctgatgcaaaatgtattctttttttccctccagacactggtggtggcaatgctctgaatgtgaagcgtactgttcaggacctgatggcagcaggtgctgcaggctgcttcctcgaggtgatggattcttcttcaccttgtcttgctcgcactgtgcaccacatgttccctttgcaactattaatcaatagtagtggttttgattttgacaaccaaaaaaatatatatcatattgtcactagtaatcagtaatattgattctgtcttctcttttgcaaattccaggaccaggcatggccaaagaagtgtggtaaggaactattcatctgtcacatcaggaaaattgttttttcctcaggattttcttctctcttttttttcgattgctaatttacttttgtgtctgtttgttcatcgatcgtcaaggacacatgcatggcaagcaggtaaatactgacaacacactgtttttgtccctacatgttctagacaaacatgtactactactgtatagtgatactaattctgtttagcactctgttcaccattgcaaatccatgccaatttatagcttaagtacgtacacttaatgcacacctgccaaaatctaatgaggaaataaattggtaaccgatcctgtcgttccgtgacatcgaaataataacaggactaatgtgatgaatcacaacttaattatcacaagttataatgcaaaaatagctagctaggatggttcaaaatgaccagaaaattcgccctagctatatatatttaccctctattatttcacatagcggagatttgatatatatatttatatctactttgaatatatggtgtcactttcactaaacatattgatattggaaatgaagattctgctgaattaattcagtgacacgtaggccccaacattttataccatgcatgcactgttaaatatggaggacccattacaactttgcttttgtatgtataaatatgtctctgatgtattaatggcaagttctagctagatccgatcgatccaacattttgtgcattaaacaaaaacaaactaccaacaacaatcaattaatgattttatcacagccattatatgttgtctagctagctatgtagtagagtggtaataagatcgagtgcaccatgttctgcatcttgtcaccatcatcgaggattacaaaattgtggccggcattaattaccttgatctctaactctccttgtgttggttaaaattaaattaggtgataccagcagaggagcacgctgtgaagatagctgcagcgagagaggtcgttggtgatcgggacttctttatcgtggcccggactgacgctcgatctgtcactggtcttgatgatgccattaggcgtgccaatctctacatagatgtaagcagatgaccacttcttttttctagagagagataaatcatgttctagagaatctcttcagagtcaaactctcgtttaaatttgatcgatctcaaccaccaactattaatcttaaacaagttcaagtctgtcaagaatcaatgttttgaaattaattagttctttcattagatattggtcaaagttgcattttgaaaactgatatatgtgaggcgaaaacactttctttttacatgatgaaatgaaaatggtttgtatctttgtcttctattatatattaggctcacaaacaatgtctgtggtatatttttctcctatataatggaatttaacccattggtgtttttacattggtctttactggttgtagaatccaatctaaaccgttcattttcttctaatcaaataaaatcctatcaattatattactatacgtacctcaactacggataatacaattatttcttttcctatttactagtaggatatattcataccagtagagatcaccgtaaattaagctattattattcaacatcatatcatatctaatatgaatatatgtaaaaaaaaaattgtaggcgggagcagacgcgtgcttcgtggaggcgccgcggagcgacgaggagctgatggagatctgcaggaggaccaagggttatcgcgtgtgcaacatgctggagggcgggaagacgccgctgcacacgaggcaggagctcatggagatggggttccacctcatcaagtcccccctcaccaccgtctacgctgccgcccgcgccctcgtcgacgtcctcgccgccctcaagcgcgccgagaccacccgcgacgagctccaccgcctcaccaccttcaccgagttcaacaacctcgtcggcctcgactcctggctcgacatcgaggttcgcttctccgtcaactcctcctcctccgttcccaagccgctcccggcaccaccggcgctggagaccacgacggagatggagaaggccaaggccaaggcggccgccgtcgtcgccggaaacggagctaccaatggggtacactaagatcgatcaagatcaagctaccaatggaataaattatcaatcgaaatgtggctgtcatcagggagccatgaaatatggtggattacattgattaattctcctgcattattggtgaattttgtgaggtatgtgttattattgcatggtacgtagctatatattgctgtgtgagtgagtgagtgattatgttgggattgggtgcgtgattccgcacataaactgtaaggtaaatatgtgttgagtattcttcgttttccaattttttcgattcagtacagtatatgcagctatgcatctgtctgaattttgagtcagtatgctcgtgtgtgcacggtccagattgatcgtcgatccatgaagcatctgtactgtcagtcagtgtcatgttcagtgtaccttcaaatttatttggaataaatcggcccatggaccgtctaccattgggctgttcgacatcttcttgtggactgaattattctgttgtattcagttatttggaaataaagaaacttgtgaaattttggccaagtttgatggccactactttgtttgtggaccagaattgcctattaattttctgctgctatgagtgcttctgaagatggaatttatgatttctatagattctgtggtttatcaacaagcattgcagctagcaacctgagcaagggtaattaaaaattaaattaatggtgatggttccctccattagtctagcaatgaatctgataaggaatatatgtgatgaatacttcacatgttgaagtttgcttggccctatcttctttctgctattgcaatcttcagacaagtccaagtcaggatgcgagctatagtttagcttttgatatctgtagttcctctgcacattctcatcgatatttgtagcttttgatattcatctatcaatcttgtaaatttgtaatagggggtgatctccgttggttctcggttgcagagtttccttatttaaaaacagttagctattacttcgacactagaatttcattgagttgccttggagtaaaaattctgggaatattaccatgagtagagcaagtcttggtaatcagtcattcagttgtgcgatgtttgattatggcaaaattgcaaaggagggtcataattgttatgattttattctagtttttgaccaatttgactgattcaattgaggaatcgtataaaatgataaaagtttaccaaccttacagactgctacttatgatgtatatagtatgattttttttccatttttttattagtacaaatgcatcactattttttttctgttcaaatatatgcatacaaaccgtaattatgaatgcatagaaaattcaaacacaggtattaaatgcaaaagacagatggacacccatgacattacccacaaatttaactttttttacatattttgggcctgttacaattgccgagtcattggaattcatctagtttgagtgattaagttgggattgtgcgtgtgattccgcacataaacagtaaggtaaacgtgtgtgcgtattttttttcaatcatttttttattcagtacattatatgcatctgtctgaattttgagtcagtgctcgtgtggacggtccactatgatcgatccaacatctgtccctgtatcttgaaatttatttggagcccatggactgtctacccattgggctgttggacatttacttaattattgtggaatcaaacctgtggtgttgtatattcagcaattctgaaacaagtttctgaattttgggccaaattttgatggccactactctgtttgtggggcagagttgcctcctaattttgtgctgctttgggtgcttctgatttctgaagatggagtaacttgtacagattctgtcgtttatcaaggacaattgcagcaacccatgaacaatggtacttgcagcaaattattgtggatggttctctccatgagtctaggaattaatctcctgatataaatatggctcttctttgtgccttccatattgcaatctctgagaagtcaggatgcaagcttgttgagctttagcttttgatatagtagggtaatatatattttttccatttctattactagaacataaaagctaaagctaaagctcattcgattaaataaactgcttagttgaacggtgcataattttatttctttcttatacaccgttcaactaaccagtctagttaatcgaatcgtagagttccagttaaagagaaaagaaagaaaaaaaaacttgatgttatatctattttaaaagataattgcttgaggtaggtagtattagagattataagtaagaataaaaatgtttagaaatggtcagaaatggtatcgattttttatcattatttcggaaaaatggatataaacaattagggaatttctatatttattatgattttaactatttattgtccacttcaatacgatgttaacagaaattttaaaaatggtactatatttattttgcgtaaactgtatcactgctattaaaaaaatttcataccatttccaccccgtatcggaacaaaggctgtgttcgcatgcttaggttgggaacatagtgcctccgcacagaaaacggagcggcccattagcgcgtgattaattaagtactccctcctttcaaaaatctaagttctatttttttttgcaccaagactaaaaagcaattaattagtcaccatgtgacaaaaccaattaacatgcaaccaataagcattaaaatagcttcttggattcctatcaacaatttaatttagcacataatgactataaataggacttagacttttgaaaaaaccaaaaaatgaaataggtcttacacttttggaaggagggagtattagctaatttttttcaaaaatggattaatttgattttttaaagcaactttcgtatagaatttttttttaaaaaaaacacacattttaggagtttgaaaaacatgcgcgtggaaaacgaggggaaggggttgtgatcaaggggttacaaacacagcctaaggagaatagggagacatagtttgatagggatagcagtgaccagtgagctacatccctggatgccacgtaggcaaggaatgcccacctcgagatccacacatccaaggatagccatccacgtggcacgtgggacccaccatccggatatagcgcgccaccacgagtgccaatggcagccaatgagatggcagcaagcctcaccctatccacacgccaaccacacccacaacattttccctcccaaatccgaatatccccaacccaactctcatcacacacaaaaccaataaaccatcaccacaccgtcctggtcgtcgtctccaaccaaccaaattcttgcacacgcgcagctcgagccatggccggagtgagcaccagcgtcgtcggcctcaagcccgccgcggcggtgccgcagtcggccgcctcgccggtgccgaagcgcgtgcacgtcgctgtgccgcccaaggaggagcagggcggtggcaggcgccccgcgctgctgggtctcgccgccgtgttcgccgccaccgccgccgggcaggccaaggccggcgtgttcgacgagtacctcgagaagagcaaggccaacaaggtgagaatgtgaggtcgatcgatgattcgttaagtctcgagttataattaattcatgatttcattgctgatcgagctcgagctagagctgagctgacgaggcgattgattaatcgtgtgcaggagctgaacgacaagaagaggctggcgacgagcggcgccaacttcgcgagggcgtacaccgtcgagttcggcagctgccagttcccctacaacttcaccggctgccaggacctcgccaagcagaaggtctcatcacttcattactttcacaaattccactctcttcatcctatcaaaaaccaaacctcgttcaggatgtatcacatctatactagattggttttttatggaacgaacaagagtactgcatgatttaatctgaaacctcttgtgttgttgcgtgcagaaagtcccattcatctcagatgatctcgagatcgagtgcgaggggaaggagaagtacaagtgcggatccaacgtcttctggaaatggtgatgatctgatgatgatcatcgatcgattggccagccatgaaaacattcctgtacctagaacctttgtgatatgacacaactgcatgcataattgaacgcttgtcgtgctcactgtgtatttgtatcatctgagtggagatttgtagcgaattttctctcgattcgtcgatctcactttgatttctaatcatgcatcttatattggttcaccaagaatagattcaatcaatgtgatccagaccaacaagggaaagggaaaagaacacttaatttactaatttgaaagaagtgagtatatatctgacacgtacaagcacaaaaactgcagtttatgttcgttggaatataagactcacctttaaacatgagatttttctaaaaaaaaattcctggcaaataaaagttaaagaattacagagaagtagagccatatgcatccttcagaaattcaattaaacttgggtgactcgggaggtgacaccccaagcccccgatcacctccccaccatgtgcgccaacgatgctccccggcactattggcggctcctccttccacactccacctctctccgccaatttatcctctcttcttctctttccccccttcttatttccttcagatatggtaagcttagaattccctctgccgctgaccaccttcactgtcggtggcgatgctccctgccagcgccggttgcacctctccttccaccatcgacctcccaacagccacccctcctcctctcttcttccctttcccaatcatgttttcccttcatcttcttggatttgaagagcttctcccccctggcttaagatttagtagcttctttgcttgggtcgtccctagacctgaccgaatcgaggttgaaacaatgcccaacacgtgtgtgctgacatgggtggcatccacatggagattgcactagccgatggccagtgccaccaaactccaactgacctccccttcactgctatgtcaagtggtagatggtttccttcctcttcctctctgttggtatcctccctctccctctctttctctctttgtggcactctccttgttcatattggaattagtcaacctagtctcacctctacgacactggtttcaccgcatcacatcttgtcctcgtagtcaattgcctccaatggaaacagtttgctctgccactaaggcaaagcatcgttcaccatccatggatgtgataagtgagggctgactgttcttagaactgccaacggcgggctttggtgtcaagtcttcttccatccactttatttaagaacaattaatactagttagaacaacaaaaagacatcaacatgtatttgatagttgtgcaccgggttttgaattctctccacgatgaaaaacttggaaaagtatttcgtatcaagtatctacacacatcacaaatcacaattcacatgatttctcacatgaagtacgtgcgtgtgaggtacataggattcaaacataggatcaactatatctccacagcctcccatctcaactataatgctctttttgcctaaatagcttatgctattattttcggtcttcaatgacaaatctgtagatctcatcgatctccacaacttccatatagagttcatgtttgtctgaagtcgttgaaaaattttaaaatttcgtttatccaaatagagccaacacttctaacatatattcgggcatataaatgacttacaatgaaaatattgtcaactaaaaattaatagatcgtgtcgccaatttttatgtagagttagtctcaatccaaggacatttgggaatatcaaaaaatttgtccgagtagatttgacaacttgggcatgtaaacaatctcaaaaatcaaaaaatcatcaactacaaagctgtagctttggttaaactatatacttttacataatgtttgtcttcacctgacttatgaaaaagttaccattttctttcaaattatcatttgagtactaatgacatatagtttgatactcaatggacatgatagtcttgaatatgatccgatccattgaggtctggtccattgaatatcggtgctggttgttgttatgaactaaccgtgatacattagtggaaacttaagtatcatagtaatttcttgttaattaattacgaaccatcagtgatatcagtgtcatctctaaaggaaccgatagtgatgagtcatctggtaaaaacaccaacgacttgggctcattgacgaaatcagtcgtgtttgtgttcttgcaacttagggcttgtttggttagtgacctgagcaacatgattgataaaaacgtatgtctgagagctacttgagaatttggtaaaatatgcttgactaggaaagcctgagttcaagattacacattggtaattaagatatgtatcaacttaatagatacatattaacgtattcattgattttatgtatagccttatccatgaccaagaaaaaaagaatttgtaagtagtgtgaaaaagagttgtaggataccaggaatccaaaagaatgattttttttcttttttgccttattcattcaattcatttcaaataagatgtaccttgttcaagccaataaatagagctagggttagagttaaaggagcaaatagaaaaccaaattaattagttatagtaagcacgaaagggttgaattcatttttttactacactacatatgttggtaaaacacttacctaagttatggaagattcatcattcatcgattatctcttgtctatcagtaacaatgaacactgataaactcgtactcctcaattatagcaattaacaagtattaatttagaggaaaaaaactaaggatttgaatcaaaatcaaaacaagctcatacttccgatttaatcaatatagatgggactattgccaaattttttattccgaccacaatgtcgcaagcaactgcatgcatggagttgacgtgcctgaagctcgggccagctccaaaatgggaagccggacgcaggctaaaggatgcaaggcagtggttcaagtcaggcatcctgaaaatcctttaggcctttgaaccaaacaacactcaaccatgtgacagggagggattaggccaggctccttttcaccaggatcatgaaccaaacagccccttaaacattgagtgatttcctaacgacaatttaacactataatcaccatcgctctggtcactcttttatccttgtctatctcttgatttctctcaaataaaagtacaaaacaaaaccaactgtggtagggcttcggtgactaattttccaattgggcgagtatcagttatgttttattcaagcaacatattctatgtcatttggatatatgtaccattgttgttgagcgaaacacttgtcacgtgatacatccacgcacacaactgaatatgacacagagaaataagcactaggtcactcgcttattagccatctcattagcttaaactctcatgaaaaagacttcgtacagttctgttaacgaccaaatttggtatgtttttttgcatcgacaagttctcttacaaagacttgatgaacaaaagaattaagcgtcttttaattagttagtattgtgttttttagttgcgcccatattgaacttgtgtcacatatattttatgcttctacaaagctgaacttgcatcaggtacatatgttaagtcctgaagattatgcaaaaccataagtgggcgagagacctgagacttcagatgcaacttcacgcactgtaatctcccttaggctcagctcacaggaagtgccttcacacattatactctctcgggtgctaatctcgcatcttggtggcacgagcaacctagccagagcactaactatgactgcatgcaatctcatccatcttattttttccagtaatgggccaggatcaaattattcaggtaattgaagaacaatggttgttctgtagtggaatgtgtatcaacatgctcataattccaagaaagatagtcaattatgtctttcaatgtattgcagtgttgttctgaccttgctacctacaacaaggttgtggtactcaatatatatctcagtctacaatgtggcttgttagtgttattgcctcatgccattatgcatattgtccaatgctttttctatattcatgtatcaagcattgttgttcacccaaatgtggaggacgaggctactcaatcttaccaccaaagccatacacttcattgctttgtctacctcaagttgcctcactcatcggtatgtactgaacagcccaattatcatgcttcttgtactttccgcccacaccgcaagtacacaacaaacacatcctgccaaaggccatgtcctattttcccctttttctagcacttgtgagccaatcgacgaaggggatgacctttatcactaagccagtttgacatggccaagcggcggccgagagatggattatgttgcctactttgccaagtgaaaaagacaataatcgccatctttggtcaatggttcaatcacatacttttttgtagtaattgtgtgctttttcttttttgaaatttagttcattcctatgaaatagggaaaagaatatttccaaatagaaaaataaaaaaggtgttacatgtcttagtatatatataggtctttacctcgtctcagtcgcacctaattcttagctaggggcccatccttataggtcagtggtgcaattttggacatttgtcgcctatttttagggctaataaggaaagaaacaccaaaaaaacttattttggcctatattgagatgg

SEQ ID NO: 27160 - DNA, 55660 bp, Oryza sativa
  unsure (1)..(55660): unsure at all n locations
cccaaatagacatactactccctttccaaatgtcagtgaaaataaggcataggattgaaaatgaattctttttttaaaaaaaaaatctcccttttaggtatgttctaacttctaagtaatctatgatctctactattatttagtattctccataatgttgtgttattttttagaactccatattgttgtgttgagttgaaataaggaacaaacaactctaaagagcatttttttttcataactggagtggataaaggtgttactggtacagaaagggcaatccttgcccactgatctctatcggttcggtgtgagccaacagggattgccaatctttaccagttcatggcgttggagtgaattttcccgcctaaacagccatgaaccggcagtgatgctcaacttctttcaaaagggcagggcgtcactggctgaacaactatggtgccgatggggggaggagggggtatgatttagagtaggataggtaatacaggtgtgaggggaggtttgacatgagtttctgattttatttttcatggatccaaacaaagggcttcacacattataaagaataaaccacatattcatgtattccagcaaagagctttaaataaaagctcatccaacatgtcgattaagaaaatataattatttaaacaactctggagattgcataacatttagcttgcttcaaacataatgtaacattaagtacacaccactattgtagaaggtaccacaatactatttgataggcatcattccagtgcaaataataattagaatggtgccatcaaatctaggaaggccttgacgtcattagcaacgtttttggcgtcatgagcaataccagataatcctctcctcgcaaacccaacacagtagagtccatttgaacctttccagtgatttgggaagtccttcttgggcatgccttctttgttcatcatatcctcaccattctgcgtttttaatcataattattttattaacaaatatttccacagaaagaaagaaagttaaatatgaagatagcaccattgtcttctaattataactataattttataacaggttttatcactaattttgttgagtcaatcacgcaaatgcttttctttctaaatctgtctaatagtattgtaggcactcttaatttgatgccccacttgaggtatgcaggagagagaaaataacaactaaatctaattgcaataatttttgtatttactatttaccatatgagcaacatattacataccttaagccagttgtttgcagtacttgtgtagcctgtagcaaaaacaatagcatcaaagtaactttctttcccatcatcaaattcaacaacatttcccttgatgcaagatattgtaccaaagacctacatgccacataaattccttatagaacctgtcaagtaccaaatagaatttatatagacttttctatgttgtgtcaagaattttgttaccatgatatcacctttctttattatctccacagtgccaacatatataactgctgaccgaccagtattggccttaagaagcaatggccccttattgggcctcacgatgccatactttgagagattgccaaaccagagatatgcaaggaccacaagaataaaatcaacaaatttcactgggaggctccagcttgcaagtttcatccccatgtgaatcagctcctttgtcatcacatgcagctttagaataattcaagaatttgtggtgtaagaaaatgatttaataggatacttacaataacttgacctggaaaacagggaggcaaaataaagaaaggaaacttttatgcaaatgtattatttacttacagggctgcggatgactatggaggtatttgctccatggcttgaaagatcataggcaatctccatgcctgagtttccacatccaacaacaagcaccctttgcgcagcataggaatctgctgacctaaagcttgatgagtgtatgacatggccagagaaatcctctagtccagggatgctaggaatgttccctgcactattttcaccacttgctacaactaagaacctagctgcatacttggacaccatgccattcacttggtcatgtgttgtgacaacccaatatttttgcacatcatcatacaaacatgactcaacagatgagttaaatttgggacaaatgttgaaatgctccacataatcatccatatacctcaaaaattgaatcttggggatgtaggttggtgtgtcttccggatatggcatgtggggcatctcgcagaactcctttgcgaggtgaagcttgaggcgatcatatgtgtgcttacgccacagcgacgcggtacaatcctcacgctcgataataacatagggtatagagagctggccaaggcacgccgctgttgcaagaccagatgggcctgctccaacaatcagaactagagccttctccatgagaaaataaaaggaaagggaaggaagtgaaactaatgttgggacactattctgtatatgttgttttttctcttggtgagatgtataaattctcggagagcacatgctatttatacggaaatttgtccgttactattgactgtaatgcatatccctcttacatgtattttggacagattcacttcacatgtattaagtacattatttatgctaccggccaagatagaatgacacatatgtagacaaaagtacaaggtttcttatttaatatgtcctctcaattaaagagcatatacaaatgatttttttctacattaacatgatcattaagtggtacttgtatatttaattattgattaattcatactttaaaatacttatcttgtatataatacttatcttatatgtcatgattattgggaagtgttgaatacgacataaaagggggggcattgtgttgtgagtttcccaaaaaaaaaatccaaataccttttacaatgactggaagagcctctgtttgcttttttcagataaaaccaactttattatgcatggatgccttgtttgaggaacatgtctctttataagtactttcggtgggagatttgttttatttatcttcagttactaccacattagctagcaaatagagcacgtataccaattggattctactaggttcttgtctaaagtgcataaagtgttgtaatatggcatgaagctgtttgaaaagttcaacttattgtatgcagtggacacgaatccaaagcatttcactactgaaatgtggtaaactgtgaatttggtttgcattttccccatctcaataacagtatcctcaaaatcttaatttatatatgtatccattttaaatatatatggtagtgaacatatatggttttagcaatcttaacattatatcaacttattactctacaagcatcactactggaatctagaattttcttggtggcccgttagtttttttggcggccaaatcccgacaactaaaagtgcttgttacctttgcggttatccgccaacaaaatgcaaaatggactttccctcgctctctagacttggcaggtattccttttcggttagccgacaaaacatattaatttggtggttttgatactatccttaacggtctatacatgtctctcaagaaaattatggaatatggtaaggcatacacatttgaactccgtagattttctattagttctaaatttaattaattagtaatactatcaataaataaataaaaataaacaatattaaacaaagtcttgaatatgtatcctttaattattttaatgtattagtaccattgattatttgtagtttcatgtgaatgtatgagctattatttactacgaattgatgcactaattagttataactccatgcatgcttggtgattttaatccgacctaatttaatgagatgacgtactacttgtaatgcaaaacatgtttgtgtatgttgttctaattattgtatcatctgcctactgcacaaaaacagaaaatctttatcttaacaactaaatgtataaaaacgcatggtgagttgtgataacatattgcttcatttttttaggcaatattagaaaagtggagggggtaggaactagataatacgcacactgtcctgcttttgtttttgcaataccttgtttttctaaatattatgtgcaattcttgaactaattgataggacatacactaccttctactaggacaatagattgctccaagtgagagctagattcctttccatttttaagtatattgtcaaacatgtaacttgggagctcttagtcatcatactttcgtgaaagatacatgtttgacaatatactaacacattccccagaagttaaagaggaaactgaacttaattttttgagaaaacttgctttgggcctggaattaactattaataaattaagttagaaacttttggagatgaaaattagaaaccgaagcttggccccacatgttagttagatgaaatcaaccatgtctggatacgtactgcttaattaagagtgacgatgcatgttgatcatatttgttgtgaaatgataatgcacttaagttggaagttttgcagatcgagtcatttaattttgtcaatatgtgtacaggtgtatggttagctatcaattataaactgaaacggaagccaatacctagggatgtttgtgtgaaaagtaaaatgtttgctagtaaggcttttgcttgtttgtttgttccttctttattcctacatatcttcaactaataacaacccgtttttccttagatacattctttatgaatatactattcaagagcgtgccataataatggaagataggactgagcttgtgtttgcgtaaagcatacgtgtataagacagtattaatggtgtgatttttttggggtatgccaactaagacaaattcatcgttttctttaaaagaagcatgttcaactttttcatgtgattacatgtgttctttctctaaattaaccctgcactgtgggccatgaaccctaggaataagtcccctttgaatcccttaatcaaattaatataggtccaacctgattcatatccgaaactacatcaccggatgttttaaccactaactattaaaattgatataatttgactccctcgatggttttaagagcggttttaattggcatggcacatcgactttggttcacctatgctggcatatagcaacccagatacaaaacaaaaatggaccccacgtataattgacaagaaaaaaatataaaaattgtggggcctacttgtcatacgccttctcccctctctatattttccctaaccaccctgatctcgttggcttcttgctgccaccttgctgggtcccaagcttgcctgccactgccgccttgcctaggtcctccgagctcacctttggtctaccaagatactccggcctgtagctctatgatgtatccgaacatggagggatacaacggacagacagggctatcaccacctgccgctaaccacacttttcgtggagaacaaaacaaacgaaggcaaccgctaacctaggcaacacgcctaagttattgattactactctagcctcgcgtaagaacttcattcttcatccagagtcctagtaccagaacacttaatataaatactaaacgacaaacccacaacgataagaatatatctcacttaaataagctaattaaataacaaaggaaatcttgaacacttactttattgaagaagcattctccgaggtacaagagaggatagagcaccgacaactcgggcactcctccggacttcccctcactctctactcattttctccatactactaaagtgacacccaatgtatgaaagtgagatgtactctactttgttgtgtgctataaagtggcttgagctcctccttttataaccgttaatgatggttgtatgcggtttgggaggtcagtgcgctagcaactgccattagagagttatcaaggatgaccatatggaaggccaggatgagaggtggtgatggtggtttggtcgaccccctaggttggccgacccatgggccccacctatcagctactccttttgctaggaggctgactggtgagcccctatgcgggtgcaccatggataggcttatttttagtcggttttgactcatgcgggcccttcaattcttgtgctcgcgtacgattggctagaggtacatttcgtcgcatggcgggtgtagattcattcaaaattacctgtatacaaatatttaccaatactcgtaaaaacggttagtaataaacctctaccattaagtttgatattacattttgtttcttttatgcaggagttgacagttaaatagtgcttaatgtccgtcaactgagaggcggaagcagactcctacttgggttgttcacttgttggtggagaacaactcgtggtggcagtaggggggtggtcattcacgagctcgccattgtccatccgccgtggaaggaattgcccctttctttgccggccagcttgaggttgtcatggatttcgtcgagggcgggggattaaatccggtgaggtgggcaagagcccggcccaggcacaccccttcatccttcctcctgtcagcctctccacgccactgccacacaatggagaggggagaaagagagagaaaagagacaagaaggaaagaggaagggcaatgacatgtgggcccgaatgttgactcacccagttaaactagtcagcaagtcatgtcaacgaaaaccactctcaaaatcgctaaaagagttaaattacactaatttaaatagttggaggtaaagacatctagtattgcaatcgaggatataaacattgaacttgctcctgcctaagaatgcatccgggggcaatgagccccacattgggccatggctcgatccagtccagtgctttggcccaacacatcaacgttacatcacgggctttaacgttacatttgttggtggactgcaattttctttctcagctttaattctaccatgaatttgaatgttaagttcctcacagtggaacctgttcatcaatgtaaactaggtcaaggtcaacgtgcaatttaaatatgagtttgaatgttaagttcttatagtgaaacttgtttatctaaatttcaatctttaattcgacacgaatattcgtatttatagttagttatctttttagtggtaagcgatatgacagttgatagcgtgagtcgtttatggtagtttcgtccatatccaatccagtctcatggatgtgtttataagggtatgttattcgtgcgtgcattcattgaaactatatcgttcataaaagttagggtgtacgtgtgtgcagttatgagtgtttgaatataacaattaagaaaatgaaccaataacctaaaaaaacaaacatgcgattggattaaatatgtttagattcgttgtaatagaatatgtcacattcagtattaggttgatttttaatgaggcagcgagtatataatatcgtttggaacgcatgcagtcagtaataattaatttctgagaaaacgacaggtcattttacttatttcctccgaattaagcctcacatttttgtgcagcctctcaagccttatcctcgtctcgcctcgtgctctccacgacacctccgcgcgcgcgccaacgtacttggcgcgcatgtgacccgcgcgaacgcacgcgcctcgtcgtcgtcgtctcgtcccatgcaaccgcccgtgacgccggcgagctcggccgccggcgcgcccccgcccccaccaccacccaccaccacctgttccacctcctgccgcttcgtcttgcccccgacgaggaggcatctgctcgcgtcgtccgcctcctccctgctcctcgccgccgccgccgccgccgcggcgccccgcgcggcgagcagcgaggacgacgacgccgtcaccagctacgacccggtgacagcggcggagcgcgcggcgagcgcgtcggtgtcgcggcgcgtcggggaggcggtgcggctgctggacctggggcgcgacctgcaggcgcgcggcgagttcccggcggcgctggcgtcgttcacggcggtggcgacggagtacggggacctgtcgctgtcggggtacgcccgcgtggggcgggcgctggtgctgtacgaggtgggcgaccgcgacgacgccatcggggagatggaggacgcgtcggtggcgctgcggggttacccggagatccacgcggcgctggcggcggcgctttacgccgacaagcacgcggcgctgctcgccgagaaccagttcgccatcgccacgctgctggacccgcactacacccgacctcgcctacgtcagggacaccaagcactggccccccagcctcgtcgactcgctccgccacttcatcaccctctcctgatcattgcttgatcaattgagctttgatttgattaattaatcaagctatagctgttcgtaatccacaccacaatttgatggactcttatcgtatggttttggggttcatctaaattatgtatctatacgtgaaattgttcatgtctgaacgatttttgaacattggatagtgggtatgtataatgggcaggaaatgaattactagagaggagaatcaaagagttttggtgtttggttataactttgtgaatgtataatgggctctcatgatctagcttgattgcttgattaatcaagctaactgttcataatccacaccacaattcgatggactcgtaatctcgtatggttgatggttttggggtccatctaattctgtatctatacacacatggtgaaagtgaaattgttcatgtcttgaacgatttttgaaacttggatatatatagtgagtatatgtataatgggcaggaaatgaattattagagaggaatcaaagagttttggtatttggttttattactttgttagtagaagtattatttaactttttttatatcgatgcgcttgtttgtattgtttttccatttttaaaccgatatttgtaagggagttaacaaacagaactggctcgactgttgaaacaaattaactgtggcaaatgcaacagttgagctagtacgtgcttctagacagtcgatacttagttttctttaatttgcagccagttagttaattttcttggcggccgcatataatcctgatcatcaaaattactcgttgttttacggttatccgtcaataaaataggcttcttcttgctatctagacttggcgtgtatatatttcttatcgtttggctgacaaaacatattaatttggcagttctgatgctattcctgacggtatatgcctctcaagaaaattgtcactacaacaaacatgtcttgtaaaggcattttcctaatacaggcatttttaaaatgcctttacatcattgtagagacattttgaataatgtctcataattgtcttttggtgaattgtattcactcttgagttgatcatttttatcttcaatacactaacaacctcaacctcacataattactttaaatatgtgtttcatgttacttgtatctagttacttttatatctagttacttagtatgtattaatattcggaaaagtgtctctaggtttaaatgtctaaaaaaatgcctttacatataaagcaaattttaaagtttcgaaaagatgtctatacaagataaattcagcaaaatatgctaaaagtgtctttagagtaaaagtattttaggtgattttgaaagtgcctctaaaagtgtctctagactatagaaatcgcctctacacaagggttttttcgagtgtctagaaatgataaaatagttaaaataataataataaggtaataaaggctaagccattaatccataaaataatttcgtgagcaccaaacaatgtgtttcttccttgttgggctgatcgaaattcttttaattaatagatcgattgtgcttcaggaaggcagtggtgcaattaatggcggagtcgtgggtatgtgatttcacccatcggagtttaaatcaagatgccaacaaatatttttgcatatgtgcttatgctatatatcaaataggaatttcgtgaggttgaagatttgccgttatcctccttccgtctgagcatgtgctggaggacgtatttgatacgtacatagtgattgtgtactacatgtttatctttcgtgtaatcggggaaaaaattggttctacttacttgtagccatcattctctgttcggtggtctggatggccctagtgagcttcgtatgagtcattctggattaggctagcttaattagataaaatcataaaggaatgcaaatgatctttttggttgtttgtgtgcaataaatatggacaacacgtgtaatcgatagtgtttgcttggatcatggatggatagcgagagtgaagctcctatgagtcattttggatgaaggaagctagcctagataaaggtgcagatgttgcctctatggatggagccagtataacatgactcatgagctggtgtttggttaattagttgcatgaaaagcatgatggagttgtatttactgaagatgagagattattttggtcgattttggtaggtcacatgaaccctgagtcagcaagcccccaaggcccaccgcagcacaatccacccaccggatttcagattaaagttcactctagttccctcatcatctaagagttagtttcgactttataacgtattcccatctttcgaaaccagtgtaaatatagtcccaaaacaatttagatgatgatttcagctaacatgacaccgacacggcatgttgacttgggctctgtttacaagacatggtgtaggatcgaacacaagtaaccaagcctaccagaggggggtgaatggtagggaaaaccaaaaacccaaaaacttttagcggaaataaaagttaccctcaaatcgatggaaatctcgacgtagtcctgtcgccgccggtcggatcacctccctaccgcctgaacctggagaaacacaaatcgaagaactctcaaagtagatgacaactttattgcttctctctgtgtttacaaagtgcaacaacagcactccttacaaaaatctcgactaaactcgaaaccctaactaaactatcaactccacgctctgaaaaacgatacaggaaacctcacactccctctctatttataaaaaaaaaactcctacttaaaataagtgtagaactgctattttcaacaggactcaatccaaaatttccaaaacacacagccgcaacctacccgtgcgcctgccatttcctgctcggggtcggacatgccatccaaccgagccgctgctgctcctcccagtccaagtcacggacatgcatacaccatgcacacatgcatgctatctgcacacatgtacatcacgtacatgcaaactacacgctaagtacatcgagtatagcaaccatgtactccaccgtacatgaacatctctatcttctctcattcctcctcgcgaacacccacgcttgcacgcacatctcgtgaagcccgttgcgaagatctctctcacatggtgtccatccaccgtataccatctcgtatccaacttcgtcacccggtatccttgaccgtctggatctcaactcctccctaagtcttgtcccgatccccaccgttgaccgaagttgacctccaagaattctgactctagtcaccttctcacatggtatcccgaccgcactagacctctgttcctccctgaacatagtcccggtcctcaccattgaccaaggctgacctcaagtcatctgcacacaatcagacaaaaaaaccgtttctgggcacagatatcacaacctgacccacattagtcacacgcactcacaccaacatccacacatcttttcaaaccaattcattgataaaatcatttgcacagccaattgttcatcacaaatattaatcatgacaatgatttcacacatggttcccaactccctactctcgcttttcgcatgcacgcttttcaaactcataaacggtatgttttttttcaaaaagtttctatacaaaagttgcttaaaaaaaccatattgatcctttttgaaaaaaaacgcaaatacttaattaatcatatgttaatgaaccgctcagttttccgtgtttactatttgggttggaaacatattcatgcgaacacacccttgatcttcatctcatgtggtatagtgggacctacatgtcactcaaaagggggaaaaaccatgaatccacatgtcaccgacatgggaaaagaataaatttagacggtggtttcaactaacgtgacactgtcgtagcatgttgacttggtcttcatctcacgtggtggcacttacataacataacaatcaaaaaataaataaatatagtggaacccacgtgtcactcataaggaaaaaataaaaaccatgaagcccacatgtgtcatcctttctttctttctttcctcgctatcctctcttcctcatcctcttatctagttggagcaaacatagcgattgaagcgctcggccttcgcctctaggatggccaaatcgcgctgggagaggacacctggggcagctagcgtctatattaggtagcacaccacggcgtcgcgggtgcgttgcaacggcggtcgtatgctgagcaacaagaggagcacttccgtagctccgcggccttggcggctggtttcgcaggagcggcgccacttccctctgcagccgccggagtcagagagatagagagagttgtgccatggagtcaggagacttggagggtggggtttgatttggtttgcttctaaaagatttcctaaaggggaacgaacatgcatttcatcatgggcttacatccaccgcatggacccgctgctgccccatggttaacctcgagctagagacaaggagcctccttgtagggatgcagctcggggataacttgtagtggatggcacttgtctcactgatttggaaggatgggaagctcggcgtcgaggtgcgccattctataggaggtggtggggagggtttcgtgctcctagcctcaccttcctctcgacctccggcctctagaccttccttccacgtcttggcagccctcgtcttggcggaggatggctctaaggagaggaccgaggagacgagtgagctctctcagccaaattggtgggtttcccatcatcggccttcgcctcctcctgcgatctcccccgcagtcgagcttatgctattgttgcttcaccgccgctgcctcctcttgtcaccccacgccacagcgatggtctaggaagcgagaaggccatgtgagaagctcctcgcttgccacccactgctggtcgccacgcttccgccttcccatcgatgagctggcgagctcgaccttgccggcctccaccgctaatgtttgtgcacacagaaaaaggagagaggaggtagggaaggaagaaatgatggtatgtttcactaacacgtgcagctcactgtaattttctttttctaattgatgtgccacgtaaacgccacatcagctaaacccaggctccatgctgccctgggatctcgttgacactcgtattagaacgtgaggatacgttgtaccaggttttgagattaagggacccgcttgaaactgactctaagatgagggacatgaactgaacttcttgttcctggactaattaaaatctgctcgagggagcccatcatggccagaaaacaattagctcctcggcccacgtgggacacacggcccaagtcgcgggcgataccttccctcccccttcccgccgccgctgtcccttgctcccacctccgctcctcgccgccgccgccgagagtagtagtgcgggtctcgcgctgccgcttggcttggctcccatggacgcggcggcgccggaagcgacgggtggcttctgcggaggcggcggcggcctctccaccggccggaagctggtgccgtggtcgagctgggcggagtggcggcacgtgcgcgacggcctcttttacgcctcccccgccgccgctcttcgtagggtaacgctcttcttcccccatcccccacgccgcaaaatcccccaaaaaatttcagcaaacggagtgtgatttgtgactgtctcgcttgtttttttttcttttttttggttcagatcgcggcgtggaggagcagaggcaccctcccggtccccgtcgatgtgaccgcggctttcgtcgagatacggctgcgggatcccttcttccggtaatgttattattatgtttgattggtgcaaagttctttacccttgtgggttttgtggctgtgggagttggggatggtgtgtttgtattgtaaggtgatgatggagtgatggttttgtttcctataggagtgtaatggctgtggatgatgcgctggagtcggaagagatgctgtcgatgctgtatagtatggcgatcatgaggcgagtgcattcctaccgcgatctgcgcttttgtgatgtatggggaagaactctcaaattggaaattgtaatgtgtcaaattgtttcgtagcattgttatgctgctgaaggaaagactactattgtgtgggtgggtttcaaatgttgcatggaacaacttattttgtgcaaggaagccgactttttaagttacagtggtttccgcaatagcatattgcatggtttaggagattgctaagcaattaatagtgcacctatggataatatagaattagagcttaacagtacttaaggtggcaatatggcaatgagaaaagtgagtctttttatagcacagctgaattgttgatcgtactagttcaaagctcctttttgttggtttatctttataatgtatcctattttcagttgttacttaagttggtttttttatgaaagagaataaccatagaattttctacttccaggctcgtaaatggttttgtggagaacccacataagaaaactggctattcaatatctgaattagctgaggctgttggaataccacgagttcttgtcgacattcgtcatggttagaagattttgtttgttgcatcaacctttgaagtggccctgttgcagtcgagctaataaaattatctgtcccttgtagagagttcacatcgcactcttccctctcttcggctgctacgattggcagccattaaggtataatttgttggttaatgtttagaaggactcttaattgctagttattttaatcctgctgagtgttgggttttggttattaggaatacttttcagtgttatttgtaagttttgtttactgtatcttgcctcaccaattgagattattttcaggcatttgattggttgaagtgtatttactgggattcccagactaatgctattcctgatgttcaagttgaagtaaggtcaaaattgcatgagatcaataactttatgaagggaaaagattcaatgaaagcaaagtcgggttcaaaaaggaaacgtgagtatcatcagcttatagtctgaaattgtgattcagttagatctgggtcttgtctgtttcttcaggacctatatagccaaatataggtttccctacttggggttgcattaagatttctctgcaggcaatgagaaatcggtcttttcatgccatgtctctgaaaacctcctgattagcattcagaattttctggtcggccttatgtttgaatattaaagttacaacttgtacatgacttttatcagccttttctgttcttggtaggttttgtttttcacacttcgctagttctcttaggcaaattaggaagtttgtgccttacatttttctaacaaatttaactgcaaataggcaaatctgttcccaattgtgtgatttagctatcacttaatgttacacttgatggtacgacaaaatcttggtcacatgtaatgtgatgcccaattcaagcttgttggagtacaatgttaccgtcattttattctgtatttgtgttggtttcatttacttatagttgcttcggttttgcatgttagaatgtcatgcttctttttatcgttgtactgagaaaaacttaggattatacttgataatgtggtcatacagctcatgaaattcttctgttgcatgtctcttttattaatcctaactgcactagtgcagaattattgaacatactatagaggattacaggtgtaactacaagcatcatcattgtttgttaccattcagtatctgatgtatgaacattattgaattagtttggttgctaccatttgacactgacatgataataaattatgacttagcattcatttcagatggataaagttatatgataattataatcatcttcatgaccctgtattgcaggttctgagaaaatgatttcgagaaacataaaatatgtacgccggctttactacgcatgtccttctgaggttgcctttgttatattggactttttccaacgtggtgccccagagtcctctgaaaatagcgatgtgttagaaactgataaggatgtagatcagtcatctgatattcacagtgaaatatcaaataatgatatgagaactatcataactaaattatcagaaaaggaaccaaggttgctgcttggcatactgaagtcagtaattgaaacaattgagaccatggaagaccttgaaaacaaaggtactgttcttaaggctagatgttatgttttcaaaggtactgaagtcagttcacttcatgcactgtttccaaagccataatccggccatggaaagattattgtttttttttattatttcactgttgttacttgatgctagcatttcattcctggctcgttttagagttgtattagcactactccagtatgaatctgcccttactgttttttgttatatttataggtgaatacaatgctagcctgccagctaaagtggaacttttaagttcccatgttctgtggcttgtgacaaagttaaaagaattgaaggattcaggttgcattggagttgtccatgagataggagtgctctcttcagacaggaatgcagtcccacgtttctgtctagcaaaacttctgcggaagctgttgagtttgtctattatagatgaaagatgtatcatagatgcagccctagtgctgattgagatggccaccaacaatgtgcaggagaaactgaggaagcttcctatgttatccctgggaaaggtggctagagattctaccctcccagagcccaccaaagaaacggaatcagttgaggaagcaacagagaagctggaaatgttcaagtcgcggttgaaacagaaggatttacgtttggcagaaaatgacaccggggcttcattgaacacaatcatgccagagaaacgtaacagatggtctacagcaaagtcttggaccccctgtccaataggaatgataccttgttcatttagttcagtggctgttcttccgacccttgacgtcgtagatcatgaatcaagagatgaaatattagagcaacatgtaagtgttgagcctgatgatcatactgagaggatcggctattattctgacccagagaagcaattggatgctgaaagaattccggaattatcaagaccatcacctgaagaatgtgagatttcagatatgccagaactggcatttcctctgaagggtaggttgctagttggtggggtgtggaagatggtgagcgaagaggagctactctttatcaagtcaaagatgaaaattttgttgtaacaacagctagttcagttttgtcatcttaaatcaacaatttcaggctgtaaaacgaacaagggtagtactgtgctagttaagagaaaaatgtatcgtttaccccccagttttgcttagcctcttctgttgaaaattgagataaagcagcagctttattagttccggcaggcagccattgctgctacctgctgatagatatattcagttctacacttctagtcatgtagtttcagttgcagctagtctgatactaaatttcccaatcgatgtatgccaaaatgccaatccaattcaactctgtttttcagatgataattatattgtaacatggccacttcatataaattaacaatttactcgcagctgtaaaggaacaaagaataggtgtgtacagtgtacgtcaagaaaagaatataaaaactaaattaacatcaatgacgcaaaagaaccccccacgacaaggtaaaacaagcaaacagatcagggaagatgtgtagttattaacaatgttcatcacattagatccagtgctcaacagcacaaacaatacaaacagtttcacagtttctctgcttaatatttgcagagtctgaatatcagagcagcagggaagggaggagcaagtagcatgcaggttcagacacaagactccaggcagttcgattacattgatccttataaaagaccagcaaccataactatgacgaagctaggcgaccagcgggtgaagactgaagaagactgatgagaagacgaaggcggcacagcgctttaccaggccgacaacctgttctaccgtctcactgaaggacgaggcagccttccgcgacagcaggaggggcaatggagacaggcgtgtaggtggcgtcctcgtcttcgctgacttcctcctcgtcggactgaaccagaccagcggcatcaaagatgtaggccttcacttcctcgaagcgttcctccgacagggaaacctcagcgaggagtctccacgcagaagcttctgatgcctcctcgtaatcactccttcgtttcagcacgatgtggccactgatctcccacacagctgggttaacctgcgtgtccagtagctcctggctcacttctcccagagcctgcttctcggcatagcactgtatttcggaaacagatgaagcttagaaagaaatcacaaacatttcacacaattgttgatagcatgctaaaactcatacaccatagttttttttgttaggaacaagtaaaagtttactagagcgaccttatacagatcagctaggtgacaacaagtctgagatatcaatgttagtggatagaactaagtaaatgcatgggcatatacagttcagtcaatattgaggttatatgcatgtatcattttacctgagggaagaggaagatctttttgccgcagtcagagataagaacattgtaaggcacattgttgtcctgcagccagatacaagcgctggaaaccacattggccagatcgctcagtgagttgcctccctcaaaaaccagtcccctcacagggtagttcatcagcttggacacctttactccactattcattgtgccctcagcaaggaaaatcctcttggtagctgccttctcaacagggaaaggcactgtcaagtagtatgcctgtggataaaagaagcaggtaatgatttagtatacaattgtaaacacaacactataacatacactcgtacaggtagctttatcagctaattgttcagatcaaatgcacacataatgggaacgctgtttttcactaaagaaaatatgactcctctagatgtatctgtatgggcattgggacaagggaaccaggagttttaacaagatcgacatttacatcaaagtaaattaatctagcaaccatacaaacaataagtctatttttggtttggtctgcagatacgcaaagttcagtgtcactgtaacaactgaaaatacatgtacccatataaaacacagttcgtgcaattttgcatgctggaagatttatgatttatctaacagctacaagtagatacaacagtaaacaaattccaaaaccatgtgaagagtacctgaaagtggaggtggttgatggttgcaaaggcacccaaactattatagccaagcctgaagtatgggcttgcggcttcagcagccatgtgcagtgcaagcaagaagctctcctggtcaatcctctgaggcaggcggtccagtacacggggaatgagaagaacatggccatattcaattgggcttacctgcagagtgtcaaatagaaatgttaacaccaagaatacataaatatcagaattaaaatagattaccagtgcgaatgtagcctacattgattgcaacaacattaggagcacgatcagcaacactgattggggagctctccacaaagaagctgtcatcaccaccaccattctcaaattggaagagcacctcctcctggccaactttggtgaagttgaacttggcagcatcaaatggttgaagcacacggtccacgcggaattcagtagggcgcttcttgaggtggcgtccttcattcagttgtgcaacaaacccaaggttgcctgggataaccttggtctcacaggcagtgacatcatatcggaacaaacctcgggccatcctgtcttcccactgcaataaacaaacaaaatttgaacttcagtattcttacataagcatcgtaacatggttacacagatgcctattataaacacaggacagattatatcataaaacaaacggagggattagttatttgttacttgcataatcagcaataccatctcgcaaataatgctgtctggtgtatatttggctagtaataacttcatgcatatattatttctattgcatggaaaacatagtaagagcatgcaaaagcaacaaaaagagaatatacactcaaacatgaatgctggatgctcaaaattgaagaacatttctttaatgcgtgcatgggtgctcatcataacttccatgcaggttatacgtcataaatatacgcaattgttacttcttgacaatatttttccacaacttaactagtaggttgataatcacaaaatataacgtctcacatcttagctcgcatgtaggaggaaacgagtcagaatcggtaagcatttccagtggatatatagggagcataacgatcttttggatccaattacagagtatccgatacttgcccatttgaaatttgaaacaaacacatgtaacaggcttggaccaaactggtgatgacccaaaactgcacaaccgaacgctactataatacatagggcaaatatcttatctaattgcctcagtagctctccagagagctaacaagatttcgtagttgtgcgcaatacagaacaaatacttgaacttctcctgtgcgaaatttaaagtgtaagcttctatttagtatttaccaggccgagcaggagattgacaaagaactcatcgttggaagcatcctcctgcgaagacggctttttcggactcgccttgaaagcatacagcggaagcttggaatctgctcaaggaaatgcaagaaaaaaaatgttaattcacttaaaaacaagtggtagtaagcctatccacacattttttttttgtggtgcctatattccctataagattttgaagcatctaagtaaaataatatgtggctcctatttttatcctaccaagttggaggaaaccaaactacaagtggtgaacccaaaaacattcccagtaggccagtaacaatattttaaccgcaggggttaaaaatagcaaaggtaaagcatccttcctactagtggtgacaggatcctccaactttcttggaagttgcaaagatgttcttattcttcttttttttttaatttgcgacgaaagatgaatttaatattcaagttatacccaacaaaaataagcacaaccatttttctaatcaaacgaatcaagaaaatcatcacagaagaaaactgtaaccaggatttcggaatccaaggtgtaataataagacaataaaataatctaagagtttttttaatcctgatttgggaggaagagactcaccgggcaagcagcaatccccgaggcaatccctcccgcagccggcgcgggggcgttcgccggcggtggcggcagcatcctcctggtagttggaaaccacggtgggcacccgcttgatggtcagcttcatctccatgattaaatctcaattccttcctctctctcggggtcagggtcaggtcagcgaaagatttttgttgattggatgttagagaaggtggatggggggggcgagcggtctcagaggcgaccgccgccggcgaggaagaggaggtcagaggggctgccgccggccgagggaagcgccccgcggccgccgtgcggggctgggctggacgccgtcgccggagaagcgatggctcccccactgggcgtgggcggcgcagctgcgtggccgcgcccgaccgcttcaacgctagccgtctttgccgcctttcaactcgcccgtctagggatgagagccctcctcacgatcacaacccactcccccccacctctcgtcggcggcggaatctcccctcttcctcttcctcttctcagtcggcggcggcggcgacggtggtggtggtggtaggcgaggaggggagagggtggaggaggcaataaataggcgagaaaaaaaaagaaaaaagaatttgcggcttttgtgtggtttgtgatgtgtggtggatctcgtgttgggattatctgtggacagactagctttactgtgtgtgtgttctgtgttgtgatgagttttgcttctgctattttagggtgggggtttgtgtacgaatttgtgcacgttgggggcatatggttgtggttgtgactgttgttgtttattactctcttcgtcccataatataatggattttaggtttttgcttacaaacgtttgatcactcgtcttatttaaaaaattttaaaattattaattattttatttgtgacttactttattatatacagtactttaagcacaacttttcgctttttatatttgcaaaaaaatttgaataagacgagtggtgaaacgttacaagcaaaaacttaagcacgtgctggggttggttactgtgcttgattcggcagctgtacccgttgatagtgagatttagtactaagaagtattaattgtgtttgtgtagctaggtcttaggtctatgcgcatgtataagagcaagtttaatagtatagcccactactagctccaaataatctatagccaatgtaatagccaattcatacaatagttgcttactatactattaatacctggtcccacctgtcatacacacattacgtcttggagtccgtgctgcagctggctatagatctgtagcccgctgctcttctctctcttcctttatttctttaaaatatgtttatagctggcttatagcctgctattgtacctgctctaatataccaatgctaaattttgagccacggtttaggagatttctgttatagaaatactaaaatgattgggctattcatataatatgttatttacgttttaaatgctacatgtatgtgcgaaggttcaaaccaaattagattcgtacgtcccattgcatgtaatcttggtttggttgtattccttgtagtacatggaacgttttatgttggactcacaaaggtattaaatttgtaattccttttataatctcattcctcctctccttcccactttctagcattctttgttgacatgagcatatgttatccaacactatcaccgactacaaggagatacaataatctgatgatccggtggagttgagctctcatgtagccaagaggaactccgatctaggcacaccaatctaggagcgtggaactttgatctgtgatgggcgcatcaattcatcggcgtggagcttgatctgacgacaagtatgtctatcgagcgataggaaccttgatccatccaaggagacctccatccggtagcattttttgtcctcgttcaccactacctcctcctatattagcgtctaccttaccctactatactttcacacttgatgtgaaatgacagaatataactgtttggtttagttgttctattgatcaaaccaaaccaagtcttcttctttgtgcttgcttcgttctattttgaggtaacactggagatatcgatatccttactctactttctctttcataattttcgaactactactgcaagtagattctacatctcccctccatggtacgttcatcttagcacaaactaaatttatgcctctttttttatcatgaggatcatattgaaacatgaaaacaccatgcgctgctagctagtgtcactctctattacatgaggggtgcacaaatttggttataagatgatgtgacatggagtccatacgcataactgtgtatgttaggcttgaaggtcgtggcacttcgtcaaccttccttcttgtgcaaaacaaggtaatggcgatacatggagctccttttaacctagtgttctagttggatcttagctttaattatcaactccgatccggtagttagatagaatttgattgtaacaagacaaggacaactcaatgtacatacaattctactacacatagtgtaacaaaattacgaaaccgtaaagatgatctcgatctggtgcaaacaccgcatgacagaggacagcataggttgattcattgagtgggttcagcgatatgcggttgatgcacaacaccttaacattagtatgcatcatgttggttgttagttgatagcatgatgtgagggcaaggtaagatcatgtaatcacagcggccctgccatgtactccctctgtttatatttgatcgacgcctcaacaaaaatgaaatattcaaaattgatcagtgcattaaccttaggtgggatgcatggctctttggtttgtatgctgatttaatgcttttgcatgcattcaaggaagtgctggtttcctagccattcagtttgcatgcaaggccttggttgaataaaaattgaatgcctgcctaccttaaaaatcgcatgcaagaaattgaagggacaaattaaatgattaatagaagatattttatttgtcttggtcttgctgcacacttgaaatatgacgatcaaatgtgaatagagggagtactattttggatcagcgatctagccaactcccagactagtcagccggctgctaagacttccccatcagtagaggtgggcagaaaaagaccgaaccgaaagaccgagaccgagaccgagaaattcggtcataggcagtgaaagactgaatttttgttcggtcaatttggttagtctcctcggttaaccgaaaagatcaaattaataaaaaatatctaaatgcaacctacaatttcactaaattcaataggattaaactctaatttttacatctctacctcttctaggcatgcaatctaataagagtccttactcatacgtgcttatgatttttttggtgatttttgtgttcaaaatttttattatttctttgcatatatgaaaatattgttgaatttcagtcatgactgagaccgagaccaatttatcggtcctgatattttcgcgttaaaattcgatctttactttttaaaaactgaaataaacgaaagaccgaagatcaaaaccaaaatttttggtcagacccacccctacccttcagcaaagctcttgatcgttaaagatcaacaatatcactggctccgtacctattttggacccatgacgtgtccattctatatacacgctatatatggtttggcatgtatatatacgtaagcatttacaatgtctcttcttcaccggcaaaccaatatttgccttctcaagacttgaaaggcaaaattggctcttttggatcagcaaatgcataagtttctcccgtacatatgtacattaatattgttggccttattctgggtaccgtgtcgcactgaaactagctgatatcagcttgtgcaatttcgcacacatgcatgcatgcacgctagagctaagttttcatgacttcatgagataatcgatcttgtgcatgatgtaactgtctcaattattcaaaacttaacactagaccgatatgctacctctgtttaaaaagacaactcctgattttaagtctagacatgttctacgtacatattcgtgttgatatggagggtttctttttattatgggagaattggaggaggggttaacataccgtggcccagcggcaagcccggtaatcacagtaatcatgtagttatcatagtactagaataaaaaaaagatgaatttatcaaaattaaaaattgtattaaatgcccttttaacttaggaagctacttagcctctatcgttagcacacttatcctgatagtaaatctggttatcattaagaaaacattatattcgataacaagaaaaaccaattcttatggtctttttttattaagatataaaaattttacatcggtattttattagcacgttttttaaacggtcaaacagtgaatttcgtatgaaaattttcttttatttaaattgttttaaaacattggttaacttttatcaaatttataataattaaaacttaattaattatacgtaaatattgtttttccgtgacctgattttatctccttgattactgcaaagaacaccacctcacgttacatgaaaagtaactcgatcttaggaaaatatatggtggaaactacaaatattatggaaacttgaaaactactattggatagaaatagacgtctgagattcatctacgtcaccatgagtaaaaattttactcgtagattcactcataataatatggatgaatctcgaatgtccattttttaatcaacggtagtttttaagtttttcctgtacataggatttgcactgtatatttcccatcgatgttagctcgcaagtaaaaagtagtggcgaccatgtacagcgggcggccaagtaagaaacgaaagatggcgacacggcaaacgtggtcgaatctcgagccgtatatacgctcctgtgattcgagtggctgccgtaccttcttcttctctcaaatcaaaatccaagttagacccgtttcgctgtcgacatctctacagtagtcgatgtcaggtgatctggtccacacagcaaatgacgcactggcacgacgccacgtcatctcgcctcttgtctcaccgcatgctgcccggtttccttttgatgctccggatgaagtactccctattttctaaaatataagtatttttttagctacgaattttgacagctgtagctaggaattaatatttggttcgatcgactccagtagctaggaaccttcctcttttggcctcacctactttataattagttaagaaaaacgtttgcaggttatactcgaaagtaacattagtgaattatcaaaggtttttttttcacggtttctctgaaagagtatcatattttagtagggatgagaataagacggcattattttgttattattatttttagaaacggtcatgaaatttaaatttaagagtcacatcgttgacctaataaacaaatgaaaataccaaaatttgaatttttgaatttgattttgaagttgattttaagatattttctacgtaatttcgttttggcaatggcttttaagtcgctacgaacaaatatataaaagttttacctatgaattaatttttattccctaataagctatttagacttgttaaaaaatatgtgcaaccgataaggcactaactatatcaacttcaataagatgctgatataaattagaaaaactaaaagttttaaaaagtaacagtttataaagatattattattattattattattattagtagtagtagtagtagtagtagtagttttatgaaaaaaatatcggtacggttgagaactttccgtaccgttttcatagtactattttatatgcatggtattagtttatgatatcgtctgtagtatctctatagtatacacactcagaatcgtaagagccaagagtttattattccagccacaaaaccaccgtaaagagactattggttttacatttttttatgctgatctcacttggtttatactaccatttcaactagctagtagtagaggaataatttttcttttggtaatacaacttataaatcaaatgatttcgatccaatactagtataatacagtaatacgtactaggtcaccgtacaaacatactccgaaaaaattgtatccctttatataggaatacatatccgttatcaaccataaaaatgttaaaataattaaatatttaaaataactatatggagcttgactcattagggatgcaaacgcttgactgataagcaagcctatcgatcagaggaaaactatctatactcccatatgtcctaaaatataagaaataagaaccggataggacatttttactatgaatttggaaagacagtctgttcagattcgtagtattagaaaatattctatctggttctagattattatattttgggatggacggagtatatagacttctttattctcatcactacaaagagcatcagtcactgttaattcattcattattccaagcacagaccagctgccaaaaaatatgaacagattgccaaattttgatgatataaaatacggggaaacaaattaaactatgttttcttgatctgatatggcacaaaacactagctaggatcggatgaaagatctcctatatggagtatcaaagtatagtcaactctgccttttctttttggccaatgattgttgaaaattaagctaggctgttggtccttttgacaaaatgccaagagagcgaatagtttgcactgtgaacataacacgcacggtccatacacacacacacacacacacacacagttgtttataggacttgatctttagttctttaatcagtagaatactttaatgtgtgcacataaagaatcttgatccaaaacttccatgagaataatatataagagagcaagcacgcacattctctccatgtcaaaactacgtacaagtatagatgacttctcttttcttttgtttttttatttacacggaggatataaacgtaaacactgctgcgtgcgcgcaccatactcttacaacacaaatgcatcttcaaacgcaggctcaaattaaatagatggagatatggacaaatccctgaaagtgtactcatgtatgtgttatgtttgtggacagaaggatttgcacctgggcccccatcgtttggcttattcatggaataagccaaatatttgcaaatgaaaaagtaatttgctaataaaacttttatataccactggtggagaaaggggctttactcccggttaggaacccccctatagtcccggttatataaccgggagtacgaatccgggactaaagatacccatctttagtcccgggtgaaataaccgcgactaaaaatccatctttagtcccggttgatgttaccaaccgggactaaagatggtggagcagtcccggttgattctttttttttgttgttgtttctttgctcaatcgatttgctccctaaatatcccaaatcatccacaagcatcatagatctgggaagaaatacatcacatattgcaaagaaatgcatcatagatcataaatacatcacatcaccaaatctcaaacaaaaaatacatcacaaatcctaaaagaaatgcatcacaactcaaatacatcccagatcagatccaatatcacatacatcacagatcaaatccaatgaaacacaaaatcaaaaaaaaaatcggcagcaaatgggtgggcgccgccggcctcccggtccccgtcctctcggcgtccgcgccagcttggccgccgacggccggccgctgctctagatcgaggggaaggggaggaacggcaggggaagtggagaggaaggggatgaaggggagaggaagagagagtgaaggagatattaatgagaggggaggagatcgagaggagatcgcgcgtggctctcgggatagtctttgctcccggttggtataaacaaccgggactaaagatctatttttagtcccggttatttataccaaccaggagtaaaaataattgggatctgtcttgaactcgacaactttttgaaccgggactaaagataaaaaagtaccactcaacttttcaaccgggactaaagatgctttttagtcccggttttttttagaaccggcactattgtggaatttggccaaccgaccaaagatggtttctccaccagtgtacgtgttcttagcgatttaaaagtaaagactgaaaaataaatttcgatgaaaaaaaaatcccaaaaacaacttcaaattttggctgataagtataagcgaaaagatgaagcataattgtgcaccaattactactatcatactatctgtgcttacccaatataaaagacctctcttgtgcaatgttgcaatcaatatatcaaaatgaatggagaaaaagaattatactggtatcctatgttcatattcgtagcctccgttttttatggcacggaaggtgtgtactacataatatgaagcagctaggcagtttccttctagagttttgttggggaaatattcgtagatagtcaactgtggaaaacccaatggctctcaagtctcaagcctagtcttgtccctgatggggcacatattgcaagttgcaacggataaaattttgacgatattcatgttattacaaatctgttatactccaagctttcttaggtcctgtttcttttagcttgaaattattataatccagattattaagagtaaactgaaagaaacagacaacttattggagtagcttattataatatggagcccagcttattataatctgataagctcatttaggtgagttttttttccagattattgggtgaaaaattacccaccatgccaccccacttcctctttagatttacaaacccaataatctaggctctaataatctagaaaagaaacaactaaccgcttattctactacagattataacaatctagcttatagtaatctgactcaataatctagattataataatcttaagctgaaagaaacagggccttaattgtctagatattcttgtaagaacagtgctatacatactaaaaaataatccttacaaaattcttaattagtaacaaatctcaactgtttgatctaatttggtggtatttatgtacagaaaagttaagattaaatcacaatgtgacatcagcatttgcaagaaagaattattttttatgtatatcatttcccttcttataactttcacttataattaaatttgttgattttgaagataaaataatatcacttagtggaacattattttacaaaacttactaaatgttgtatatcatggtgatatatgagaatgagatgtagatcctctgctactaacatgtgagctccattctcctctagcactatgcccatatatcggtggcaattactactatataactgtaattacactcccgttcgttggtgatccttatcatgatcttaacatattgctctttttttttaaagtaaagtccatcaccggtccctaaacttgtacagctgtgtcatcccgatccctaaactcgtaaatcgaccgtttaggtcctcaaacttgttcgactgtgtcatcccggtccctaaacttacagatcacttatgtcctctaatttgttcagttgtgtcaccccatccctaaacttggatttgaatatcatcttgttcaaataggacggtctaaggactttatatttaaaaataattcataacattttcatgtaaactctaatgaagataaactttatatcaaacttgtagccctcgacacgatctacaactttgtagttgattttttttttattttaagtcattttttgtcccaaaatgtaattttaaaattaaaatttcaaaatctataaacgtgcaacaatattttgggaccctaaacagttttaattcaaaaaattttcaaatacaaagttgtaggtcgtgtcaagggctacaattttgatatagagtctgtctttattagagtttacatgaaaaaattatgaattattttttgatataaaatttttagaccgtcctgtttagagaccggggtgacacaactgaacaagttggaggacctaaacgagtaatctgcaagtttagggaccgggatgacacagtcgaacaagtttgaggacctgaacggtcgatttgcgagtttaaggaccgggatgacacagcggtacaagtttagggaccagtgatagactttactcttttttttcatcaatcattaatatatccggccggtcactttgccttctatacgctttaatttcaacagtacaatatttacgcaacagtgaacacacgccgtttaaaaccgagaaaatgtcatttgacagctataaagcatgaataattcaccgggattgcaattcgatcatttgtactctatgtgacaagtgattgttgggaccaaataaaagtgtgggcacgttttgtcttcacctatattgaggtgcccccacatgatgggatggtttgtggctgtgaaaaatgaacatggccgtaatcctatggaaaattcattgtaataaaatactgcgtggctcaaatttgcttttgtgctagaatttcgtgcagtcatatcaataattttgtcaaaagttatatatttgaaaggtatcagttgatgtactggcatggattttggccgcaaaattaaacataaagtgtaatcgttctctatgaaggagatatgcaaatgccttttggccaccttttgatatgactatcaatttcaggaggggaaaaaaaataaaaaacgattccgatcggcgatattcgctgaaaatggactctgaacttctgaaaggagatgcgtgatgcatccatatcagaccatctgtttagtttgttgaagtagctgacctttttttcaccgtggagtattagttaattacctctgttttttaacaccaaatcctttcatgcctgagttatacaaacacaaataccattaacgtcgacgatgctcaagatatcacatacggccggagctgaggaagaagctaattaagctagctatagctagcgatgtcgtcagccatggcgtaggtgatgacgtacgcgcgccacccagcttgtcgttaactatctggtgagagagtagttactcctaaattaatggttgattaacattgataggagatctagactgtggagatgatgctagaatcttttccttcacacgatatggtgagatcttgcagcagaaaataacaatacagagtttatataacatcatgcacatgcaatacctagcttattattctatcctttttttaatataagatgacgtttcctttaaccatagtcttattaactttttttatataaattgcaaaaaataaaaaatgtacttaaattgcttctaacgcatgataaataaattataaccaactaaataactgataattagattttttttggtaagacgaataatcaacgtttgtaaaaatcaatcagtgtcatatacgtacataaataagagatatctatgatgatgcaattaagctgcattcgccggccagtgatgagccgatcgatctagtgagctcatcatatatatattatatttacatatgtatgcagatataaataatctttggacacctacctgctacgtaatgtggatgatcttagctgctagaagaccaagagaggcggccattgactatttgactggctaactactacaaagcatatgcatgccaaatacaaatgggactttacgtttaatttttatttcaaccttaaacaaaaaagcaagtattctttgttcatagtctttcaacatttgacttaattagccgcgtcattcaccctaaaaaaaatctactgtaaaaatattataatataattaaccatgtaaaataaatgtcgcttagctttgcgactgataattaagccgtagaaaaataaagataacatgtgagtttatctttaattaatcacctcagtcatacggtttccaatattgcttcaatagtatatataattaactaaagagaaaatagtatatcatagttgggcgtatatagctagtcttgaaaaagtccgtagacctatggaatctaagtactccctccacaaatataagcgttcgtagcatttaaaacatacccataaataacaggaagtagtactgttatcctattagttactcactccgtctcaaaatatagtaagggcctgtttggcgtagctccagctccagttccaccccttctggagctggagctcagccaaacagtttcagctctaccaaaactaggagtggagctgggtggagctaggtggagctctctcacaaaatgaactagagttgtggagctgggtttaagcagctctataactctactttagacccaactcctgtagctaaatttaggagttgtagctgtaccaaacaggccctaaacttgtaatggacccatgtccaaattcgttgtactaggatgtgtcccatccagtataatgttgctatattttgaaactgagggagtacatttcttttaaccacccacctaccctcatccatggcaatgagtggcactaaaatcgacttttcttattgactttaatctatgagataaccaatttagaaattttaatttgttgaatgaagggagtacaactaattagacttaaactgaactgccatctactgcttatggaagctctaacaaatataattaatggatatccccccacaaagaatgtcttgattgaaataagcacgcttttgtacctttacaatataattccacatatgtatcttataaaaactgctaggaagatattcacacctttatataggttctctcatttaatagaaaaaaaaacttatatatatactccctagattgctcacacgcacccacctcaagaagattccatcaaaatctataggaaacaacccggacctcctaaaattcatgtaaaacagctgcatccaagttgccatatttcataaaggttccgaacaatcattgagctgtttcttgccgcttcttcacactatacttctctgaagctaagcatgtgcactttatgtaggaccacgtctatcatgaggcgagtgctctttcatttcgagcacgttttacacacgtgcacggtgcacccaatcgaccagaagttaccttcctcaaatcctagaattttttacgtttaattagtcctttttttaaaaaaaactatttataaatagatctccagaaaacttatttcaagaatgaaacaattttttgcgcaagtgaccttgacgccgaggtttaacgtctcagcaccaattacgctggtgctgagacgttggatcttggcatctaaaatatggttctgaaataagttttatcaggaatctattgataaaataagttttcaaaggactaaaatgtaaaaaatctcataaagataatctcgtaaagttttatgtggtttcttcgaaaaaaagtaatcttgacaaaagataatctcataaagagaaattggaggggaaacaagcaatattgttttttaatacacaagagatcatccaacatcttttctttgactgtcatgttacacgttttgcttggcgatgtgtcttctttgccttcaacattccccctccccacaatgcaaaagatattttttggtgactggctaaggggagtgcctagacccacaaaaaaatgattttgtttggagctagtgctttatgttggtcaatttggcgttgccgtaatgatatagtttttaaccataaaaaaatgcctaacatcatgcaggttatcttcatgtgttccaattggctccactcttggtgtatgatgttttcacaggaacaacatgatactatgcgcaatggtgctacatgcttggaattagtagccaaggaacttttattccattttggatggtgtagtacctacagaatttcgtgatagaatctacgtgattttgaaaaaaaaaattattttagtagatcatatcatcggcagaagttggggatttgtctcatctcgccttttttaacttttctgttcacgtctgaattttttggctgtgtgcctaccggcagaggccggagatgtaacacatttccattatctaaaaaaaaatgtaaaaaatctagcctcgaatccgtcgcagcatagctcgggaatttcggaacgggccaaagtccactaaaccagcccaccaaacagcaaaagatcagggcccaatggagcccaccagatcagcccatcaaagcacagctcctgcgcccaattgagcccaccaaaatcagcccatcaaaccgcaacgccaaggcccaccaaatcagcccatcaaggtttacgtgggcttctctcccctttgcctcctctctttctctctctcgcctccggccatggcgaaccctcgcggcggcggcggaggaggagcgcgccaccacctcccactccggccgcggcggctgctccggtcgccgatctcgcgctgcgcggtcctcctcgccgcctccgccgcgctcctcctcgtcctctccctccgccaggtccaccgcgtcggcctcccaccccgcgaccacccgcccgcccaggcccgtctctccatctctccctctgttgcattgcagcgtctcctcctcgccctaggcggccgcaagtgcaaccacggaagttgccttcgcgagtgtggttgaaattttacctcatttctttggatctttggacttgggaggtgtccatgaaactgatgatagtagtagtggtagaccatgatgaagttatctttagtagtgttattagttataaactttctaggaaaattacctcaagatcattgggagttttgagccggcgaaactcgagcatcgcgcatggccgtaaacttagatgcgtgtgtttttttgctttacttttagttagttggcattgcgatagtcctatgggcaccattgtgatgctcagtaatttttgactcgagctgtgtaactgatctgcaggaaccaaatgagcagctgtggggttctgatggttacggttctcatgcttgtgtcacaccaacatctagatatatgggtaaattcctttcttatgaagcaatttttcatcgtatatgcgatgactccgttttagtttactgagctggatatatatggctctttgcaacttgaaagtactagctgttgttaatttgaagtcagaatttggtggaaagtttctcgttgtctgttctgatattgacttcactaatatgcttgtagtaataatctataacttggtttaactacctttgatctccctgtaagatagtaaatggaatgttcgttcagtacgttacttttggttttaaaaaaacacgtgttttactgcaatagggttggcacaacaatggttaagttatagattattattttattgccgggccgacgatgagaagccggccaagatttattaaggctgaagaaaagtttggttacagtgaacagcagcacagtcgctgaaaagataatctcagtaccaaggtgctaagatactataaagcacagtcaaaagccgaaaagacacgaaccagagcatttctggtcaaaaccagcacgaatatcgaatataacaatggggaggtatggctatggctatgtgattggcgtgccaagcccgacaatcctccaagtctaccatttgtccgtaatggcgtcagcgttaagttatagattattcttgctgtctttctttagggtgtctctattggcctatccatgtttattatctacatactctagtatagtgctcaagcgaattcagtgaacatacatgcatatgtaataatcccttccttgatatggttccactgtatacagtcctaacaccatcatttgtattgtcagctccaaaagggtcagagcgctacatgacagttaggagtaatggaggactcaaccaaatgcgtactggagtaagtttgtgacacaaaagcttaggccttaggcttatatctgtcttacttttatacagttttgcatcaataattttgtagctgcccaataccttcatttgtctatgttattttattcattctaaaaataaaaattcggcattgcttttgcaaggttcatcctgcagaaaatttcttatgttatatttgcaattattgtcatttattcatcttttctttgtgatcatcctcaataaatttactgtaacatggttaatttgaggattgttcttccctctgcagatctgtgatatggttgcagtggcccgtttggtgaatgcaacacttgttattcctcaattagataagcgatccttttggcaagataccaggtgcctaccattagaatgtgcttggtgccttggttagttgtcatatactgttccctccatgtttagtgtgttaacaatttactctgctttttacagtacatttaaggacatcttcaatgagcctcgttttattaaagctctggaaggggatgtcagcattgtgaatgacttgcctcaaagcctgcagtctgttccaagagctcggaagcactttacttcatggtctggtgctagttattatgaggaggtgaaacaactttggaaggatcacaaggtatttcttcagttaagcagctctccttcacaatgaaccgcctcagcactgcagagttttagatgcccataaaaatgatttcttttgtttttaaataaaatagcgacctttctgtgcagagtatctttgtgctattagctcttaaattttgtacttcttgatattgaaatggtttaatgtagttattccgaaataggatcaagaatgctagagctgtagttatgatttacatgatatatatgaagcataatcatgaatttgcgtgaaaaaaatattactcatataatttatcatgatggtcgtttatttctctgtgctaccagcattattgcattgagcacctgctggcataaaataacatcagagattctcaactagatacaaaatttgttgaataactctgattttccaactgaaaagatgaccggagagaaaatatctgttttttttttaaatggcacttttgccttctttgaaacctgaaagccatttatgcgagctcacaccaaccatatttgttacaggtagttcacatcccgaaatcagattcacgacttgctaacaatggtcttccgattgatatccagagattaagatgccgctgtctttaccaagcactgcgtttttcagatccaattgagaaccttggaaaggcatgggcattctcttaataaccttatcctttctctaactcaggatctgtattacagttttcaatttgcatttggaaatttatggcaatctgtaaactaggttctgagccaacataacacttacaacagaagcttttggagcgtctaagatcacgtggaaaatttattgctcttcatctccgatatgaaaaagatatgctagcattcacgggatgcacttatggtctgagtgaatcggaagcagatgagttaagaattatgaggtaccaataatcaatgaaaatcagttcctttattttttccctatggttgtatgaatttgctttctccatctgaacagggagaaaacaagccactggaaattgaaggacataaactcaactgaacagagatctggaggtaactgtccactaacgcctgaggaggtggggatttttctgcgagccatgggatatcctgaatccacatggatctaccttgcagctggtgaaatttatggcggtgataagtatatatcaaaattgagatcatacttcccgaacttggttagcaaggtcagctgtgctacctttttttaatcacttctgcgaaccattgtatactatatttctgaaccaaagatttttttttgcaggaagtgttagcaacaaaagaagagcttggtaaatttaacgaccatgcttctcaagttgcagcccttgattacatagtttcagttgaaagtgacgtgtttattccatcacattctggcaatatggcaagagctgttgagggacatcgtcgatttctaggtcatcgtaagactgtcactcctgacaggtaaatattggaatattcacaaaaacgttattttttttcctgtatcatgcatctaccaatcttggcctggaggctagttgcttgcttagtttattttttttctctcacatctggattaaaatctttgtcacatttaatcttcaggagaggattggtggaactctttgatttactacaaaaaggggaacttatggaaggtccaaagttttcctcacttgttactgagatgcataaaaacaggtgatttgatttatgccacatgtactcttctgtttcacgctttaaggattggactgagattgtatttctctgttttcaggcaaggagctccaaggaagagatatggctccttgccagggagcaagggcagagcacgtctaaggaccgaggaatccttttatgaaaacccatttcccgagtgcatctgcctgaatggaaagcactgatgtgatgatgtaggtttgccacttttattttgctgtatgatattattttttagttaggaggtagaatactgttgattaaacaagtatgaagtaattcctgtaaatcaatcattgctgcatacactacatttatctcattaattctactggcaagctactaaaaggaacatgtgattataaagaaatggccagggtgcaaacgcattatcaataaaattgtgcgtcacaatcacatttgcttagttctcaagcaacttttggaaaatgtctgcttaggagtttggactacgttcttcttgagtgaacctatttgttccagctctcctttgaacgttgattaccctattttcttgaaattcttttatcaaagaagaaagctggtccttttccaattaaacgattgctaaatggtttgtcgcatgttttccatgaggtttttgcatgcatgctgtactggtttcttctcttgtagttattacccatgccatttctagccagtgtcgtacaaaccttagcatcctataacctattgaatgaaatggtgtatgttcttaatttcagctctgcatggcgacctaagtccatttgctctctgtattggtgtttctgtcgacgaatggagctccagtgacgcatcagaattacactggtactcgactcagtcatgcaagtcaggcaagggtatcattctttcagtgatctacatccaagaatcctgtagcctgcaggtccagaattcaagatgggaaaattggcaggtagagggaagaaattgtacattcatcggtttgtcacatagtcacagagacagaaattgcaaaggatgtgtgatatgtgtgtctgaatttttaggttccttagatctagaaaattttgtatctagtattaggcatttaggcctcaaaaagggaagtttacgtacaatgttcaaaagcttcagctttaacaactcatattcaaaagttatgttttcttactcattgcccctctgcagtctgtataatagcacctcattttctctaatggtatgcacataaacagatacatcgtgagcaatttatttaaaccctagacaacacgaaatgattcagctatttgcttcaggtcattgtaattcctcttccattgtagccctgcaacgatccatatcttttattcagcattcggagttctaaagaaaatgtcatacagttttgagataggaacagtagttttaccatttgcagttacattgaacaggtagagcctgtttccagcggcagttgcagtgatgaagatatgaggtggttccagctcaaactggtagtaagttcttcctgaatactctgctgttgccatggacaaaaccttcccttcaacattttcaccgatcacctctggtccgaaggcgtcgatcaccttctccggtgtaccgatcttttcaattgtcgcatcgtcgagttcttcgcacagttcatcatgtcagttagtagtgctaagattgttaccatcctaggaagatcttacagaaactgcattctcttcagaagaatgtgcttctcacctgcaaacctgcgaaccggtgctacaacgacgaacaaacgtccctgcttggaattcgcaaaccgcaggtcgatctcggtgccaccaagatcagcaatcgacaccgggacctacattgaaaaattggaacagcatcaattttgcatcggaaagattgtgacagtgttctataaatctgaatttgtgacagtagcttcagtttttcacctcttcccagccatcacgaactttgaagctgtagggaatgattgggctccatccaactccatgtccaccggacttgtcgtctggcctacggtatgttctccaacctgtctgaacaaactatatcatgaaaacaatccagcagttcctttttttcagatagcatgcctgaaagatgatccttatatgacaaaaaatggaagctactgcaaattttgtacaaagatattgaccatatatcacttgcatgttgcctatgtctcatattaaacatgatgctataattctttgacagcaaaaacatgtagtagtatttacttgtggaaacatgcatgatatcgaagtttatggctatgattcagcagttacagtattagcatctatagcacttggtttcacagtggagattactgggaggtcattaaagtatttttaatcatgggcaataggtagaccattttcaaccatgttcatttatcctgaactgaagggttctgaatatccttatgagcacaaaacaagcaacaaaactattgtctcaagaaaggcatgaagaacattagacaatctgtctctctgtctaaactgtctaaatggaaccttcaaataaacaaaaacattgtaaagcacatgaattaagggtcaaaatggtagaaagaaccaacctttttcatcagggtcagagagcccagggatccgcccagccagaaggccctgcttcactgccatgctctcacctgcaaaaccaaacactgaaactccacaggcagcagcagcagaagccattgcatgcctcctccccatcaaggaggctacaccatcctcctcctcatgtgcttctgacagattgggcccactgctgcacctaacagcagctgctgctgatgctctgcccttggttgcaggtaccagctgctttgtgaggaacagggatgagcttggcaagaacagcactgagctgttcatcatctctgcaagaagcatggatagtttattgggagcaagttcttctttctctgtgatgctctagctctggctctatgatgtttcttgaataatttttttgcttcttgtttttcattgagagaattatcttttctttggttcaatactccttaggctgttctggaccacaagccatgagtggacaggatgatttgggagttcagcgttcagacaaaaaacttctgtcctagattggttgagtgtggctgcttcacttttttgctttcatgtatgcttgttttgcacatataagttgaggtgttcagctacacccaggtttggttagaacttacagattaaatcaaatatcagctgaatatagaatatccttattttttcaggtaattcctcaccactattgcatgtgtgttcagttgtaaaattcagattctctttattttctctctctggtttgatactatgttaaaagacatcaaccacatggcaagaaaaatcattcttgtggcccatgattgatatccattagcttccagagcatccatgtcaggcagccttgtgaacaaggatgattgatcatttctcccaagctctgttgctggctcaaagttttcaaaggtaaaaaggcccaaggtacaagggcccaaaaactctagtttgatttttttttgcttctaccagtccaatataaatagtaattacttgaagaagtaattaaatattactacaagaatgatcttctggtagaggaaaagaaacagaaattgtgctgtgcagtgtgcacacacactacacaggagagacaagaccaatacagcgatcaaactgaattattttgtggtcggcggtgaagaggagactgaccaaagaagcttgcaacgactgactgacgtatatactgacatatttagtattcaccattgtgtcaatgtaaataagatttacaaagacttttggcatatcatcaaatgttgaattgctatatcgtttcgtcattccgcgtgttcgagaattaatagtcatgcattgttattctgtattgaacgtactactaatctcgatctccaaccccaggtgatcttttgaattttgaagtgcatatatatgaatactagctagctagtggatttcatttctgtggatacactatccgaaaccttcacgaattaaatttgactttattcttaaatattattcactcttaattataactttctagctcatcctgcgttaatttgtgatgttgaccatcacactccacgtgtagtctactgcgtcatgcagctaaattaattgattctgaggtgtacctaacaattaacgtaatccacgttgcatttctcgctaattaatattctgtcacgtctacgcgtatatatgtacgtattacgtatatatatacagtacttcactatcacagtatgtacgtaccatagctagcttagctacatacggtcagtccgtccagtcgtctacgactgtcacgtacgaccagaaaagtcattcttccctctgaaaaattaggaatggtttagtttgattttccatcatggatttgttggaatatactagtcttttctctgttttttttctcccctccggccgacaagaatagtcttaatttctgacttcaatatatatctatagtcatatatatgatcgatcttattgtgcgttatacggtgtataagtactatgaacctatatgcatataaactagcacatgtgggtgtatatatatattcaaagtgtgtacttgtcctattaatttctgatattttaaatgtgtgataggatccatccatgtacatccatgtacataagtgtgtgtggcaatgcatgcataggtataagtatgacgtgtatacatttatgtccaggacttgtccacgtacgcaagggtatgtccaagacccatccacatacataagtgcgtgcggcgatgtgagtagagatgagagcagtcgaaaacaatactagtttttattttacggcaatgttattacggttaggaatttttcatatttataaatttaactatttagtagcaacttcaatacaacgcaaatagaaactagaaaagctaaatttcataacaataggaagtgatattattttttacggaaacggtattggtgcagtcggtaaatttccgtaccattttcatccctaggtgttggcataaataccatgtgtatatgtttgtgttcagaatccatccacgtataagtacgtactccctccgtcccaaaaaaagtcaaaccctgagtttccgtgtccaactttgacggtccgtcttatatggattttttttataattcgtattttcaatgttgttagatgataaaacatgattaatattttatgcgtgacttgtctttttaatttttttcataatttttttaaataaaacggacggtcaaacgttgggcacgaaaaccagggtttatctttttttttttggacggagagagtatagtggtgtgtgggtgtaaatgcatgtgtcggtacgtttgtatacatgatccatccactacgcaagtgtgtgtggcagtgtgagcataagtacagtgtgggtacgtttaggcatatatgcgtgtgtacgtttgtatctaggatccatccgcatatgtaagtgtgtgtggcagtgagctcgcgttggctctgtttgagctcaccacgaccgcgcccctgaatatgccacgccgcttcgatgtgaggtcgcgtcgcaccaccaattattagtctcgccacgacaactacatgggtataggaacgatgatatgtgtatgtctgtgtctacgatccatcacgtgtggtggtgtggccataagtatggtctgtgcacgtttgtgtccaggattcattcacgtacgtaaatgtgtgtggctagtggtcaacttagagaaaaattaccagggatccaatacataataattatctaattattagctagtatattagtttaaatggcacattttagttagtattggataaattacctggtcttgtaaccccggtaattgaatgcatgtgggagcgccactgcatgtggcgttgtgagtataattacgaggtgtgtatgtttgtgtctaggatctactctatgtatgtaaatgcatatcgtagtgcatagataaatacattatgtgtacttttgtgtctaggatctttccacgtatgcaagtgcatgtgacagtgtgagcataagttccgtgtggtggtgttggcataacagtgtgtatatatgtgtgtccgttctttagggaaaaaacttatatacatactgatagggatgaaaacagtcagaaacgatcggataacagcctcaaccattttcataatcatatttttctcggaaatgaaatcgaatatggtaaagtcggaaacgaaaacgatatcggaaatatcgaaaagccggaaatggaataatacggacggaaaaatgtcggtatagatcggaaaccggtaaaaaatacggaaacattaaactatagaaaacatttatttaactttacataagtatgttatatgtacaaataaattcaagctatactacataaattataaattaactctattttagccatacactcaagttagggatttgattgaagagtcaatcaatctctaaactgtgggtcaagtagagacatgccctataaatatcgagatatttagaaatacggtaattattatattataagaaacggtaatttccacaagaatacggtaaatacggaaatgattagtaaaatagcaaaaccatttccgtttccatttccatttttttttctgtcgattaccatttccatatggctcggctggtagaaagtcagaaacgaacaccggtcggctgggaattaccgttaccgttttcacccatacagactgataattcattagttggagtatatcattgcctatctttccaattttccgagcataagttataaacaagtgaactggatttctacatgacaagaatggcatgcatatacatacattagcacaaattctatccaaagttgatcaaaaggaatatgtatacacacacgatcaaatcgacaaactataatacttattccatgtttattttttttgctaaatctcaaaagagaacatggagcgcctattttcatttaagaagaagagacttcacccaatttttaagaaaaaaccgagcccaaaatatatcacaaatgcacgagtaattgcagaaaccgaccaaaatcccacatggagaacaaactagacacttgcagtggcacaactgaagctagaaatacaattcatcattgcagagctcaaaagagcaattccgacttcatatcatcaagccacgtactagacaaccaattatatcaaccaagaaaccgtagtgcagggtcttctaaacgaagcctacaaggaggaagatagtgtccaagacgtgaacaatgttcgtctgagcatcgtaacaagattttcacccaaagaaaagatgagagcaaagcaacgacgtctttcaagatggaaacgatgcccataggcattgacatgttggctatagtcaaagaccaaacaagacttcttcctaggctctcattgcgtgtcaactatgaaatctaaggccgctgcagtgctgccaagatgaaagcagataagggatatcattgctaagcttgccatcattgtagagcaactctgattccatccgaacacaccaacacatagccacgttgggaatccaactgcacaattactcctttgatgctaccaggatgaaagagcatgagggttatcattgctgagtttgccacacctgactaagtagctcagtctccactctgacacaataactgatggttgcaccatgagggcctcatgcactacctctccaccaaaccaaacacctcgctaccgcaagaactttcaaaacacaaaaagtgttgatggccacatgatcactaccaaatagaacccttctaactgaaccggagcctcaccgcttgccatggaactccccacgaccagagtctggaagcaaactggtcaaaagaaggggagaagctccatggaatggaagaagacctagccggccagggaatgtttggacatggtgtaatgaccccttgcggtcgactaggccaccatccacactgttgttcactatgtcccgtggctttccaaccaaacaaactacattggcggctgtccatccatctcaactgcgccctggtggcaatctgcttatttgactacctcgttcattatctaaaaagaaaaaaaatctggctacctcgcaaaccacctccgacaaaagtgccaggcacctggacaccttgttggcctcctgcacatagtttttggacacttgcgcctccatctccgattggctttcacctccacctccaccagtcacctacacctccaactctgactcgctgaccatctccaccttcacctccattggccacttgcacctcgaccaagctgctcccaacttgttggatccaggacagggtgtagctagtttggtcttggagaggccggtttggccgtcattaacgtccttgcgcctttgccttgccattgccgttttcttcctcgctgcctccaccccgttccactttcgatgtgcctcgctgttgggtccctgttgtcagggctggccctggggctatgcagctgaggcgatcgccgggggcccatgatggtgggggggccaacacctaatactagtagtctagtacttgcctatggcctacctggaagcagaaacgcccgagagatgggaggagttgtagcgttggcaactcggcagatgacatcgtatcgcatagggcacaaccgcacaggcgcacatcgtcgtcgactcgttcttgatgattttgcatcaagaaatgcccgaagaagttcattagaaacaatggatatgatgggattctattcttcgttaaggtaatgaatattagttcttaggtacaaatatattgttattttggtcgactttatttttctcgataattaccagacatgttaaatttaatatatggatgtatttgttttcgttttgcaagtaaaattagcgtcaattgtatcataaaattttatatatagcttaaagggcccatcacgatgagttcgtctcgggctctcaaaatcagaggatcgccctgcctgtggtcgccaccatgcatcatcctcttctcccccgctgagatccgggcccgccaccatacggccgtctacaccgtgcttatgtgtacatgcttgtcttcatctaatctctcgtacttttttttgtcattattttccagttgcttaatttcttgtaaactaggttttccatagttagctagcctgcctgaatttcgtcaactgcatactggaatgatacatagtaattgtccactcttaactataactagatttctagcacatcctgtgtttgtgaagttgaaccatatgcatgcaccgatgaggtataatgcattctgagtacaccacgtgtaatctcgtgtgtcacatgcggcatgcatgctaattaaattaattaattctgagtgtatataacaattaacgcaatccacgttgcatttctcgcgagtaatattctgccacgtccacgcgtatatatgtatatcagtggagtacttcactgtcacagtatgtagctaggtcgtctacgagcagtacgtcgatcgactagcaagtcatacaaattctttcctctgcaaaattaggaatgatggttggtcagcttgttgtttgaaatagtcttttctttattaatttctgactaaattaatttagttctccataatctaactatacagtctataacgtgcataggcgctcataagaatatatgaacagcctataaacacatgttagttactccctctatttcatattttaagtcgtttgattttttttaatttttttaagtttaaccaaatttgtagaaaaatatactaatattttcaatacaaaacaaacatattattgaaatatattcaatgctaaatttaattaaactaattagtattataaatactgctaattttttctattaatttggtctaaagaattttaattaagaaaaaaagtcaaacgacttataatataaaacggatggagtactttgatagtagatcaaatagtattactacctccatttaaaaaaagtacgatgtcctaaaataaaatacatgctatcaatgcaaacctcgaaatcttacatcatttagaaaaaaaatcacgacttaaaaaatgtcaaagaatatttttttatgaaaaaacctttttataattatatatttaatatttttatagattaatacttttataaaaataataataatataacatgtatattgaatactgtcgatttctaaaacatcaacagtaaaaaagaaaagaggtatgcacaagtacacgcgcgcgggtgcatttagtaatagtcaaattgtgtactgccggcacgattttaagtcttttaaatgtgcaataggtataatatgttcttttcttgaaaaagaacatatgcacataccgagaattctcagtttggtaagttttcttcacacgacgcttgcatatgattgtatcattgcttgtcttttcaattttcaggtcataagttataactgcgtgaacggcatgtattttttacatgacaagaatcgcatggatgcatgcatatacaatcaggacgaattctattagatcaaagtctgcaaaaaggaatatatatacaatcaaattgacaaatcatacgcttacaccatgcttatatgtgtttgtcttcatctaatatctcatacgtttggtcattattttccagttgcttaatttcttggaaactaattaagttttccatagttaggctagcctgcctgaatctcgtcagctgcatgctagaatgatcttgatttttacaaaacatgtacaaatcaagacggtgtgccttgcaagtaagaaggatcacacatggcatgattattatacccatgtgtaccactatgctgaaaatatatttattataaaccagttaatcatttgactagcttgcaattattttggaattcaaatcgaagtacacgtcacatcatatctgtacatatatatatgtgccttgaaaaatattgttgcaaaaatcttaccttgtcttaattcctttcagacttactggccatcaaacaaatatatcagagatcgatgtcgcgatctttaatttcatacctgtgacaactattcttggttcagattgtgaaatacaacaagacagtgaaatctgcaagtacaggaataaaaaaaattaaagggacaccgtaccaatgttgattgcagaattgcaatcacatcgagatgacatactaattactcctattaccacatgccatatatctctcgagcatttagttgaaagtgttctcctcctgtaactacattaatccagctagctggttaccttcatatgttgaaaactactttgccaaaggtatgtgcagtgtgcatatatattacatccgtgacacttattttcctgttaaaaatttctagctagtcttttagtaattatttttcttcctacaaattttttttctgaagcatttaatttgcaccttgctctcggctaaatcatagcaatctgcaagcatttcatgagaactgaatttttttatttgattttttttcttgatctgataagaattgatcagccttaaatttatttgattgatcaaaaatgtttttatttgatttttatttcatgagcaactcctgaaatcatatttctgaaacttactttttagtttgcttgaacttttctctagtcaaaggtacgcgcgcagtatctgataagaatatagttagttcatcgttctgattatactttccatgaaactctccagagaattccggactattctgaaaaatcaagtacgcatgatgtgatactgatctatattgtggaataataattttaaaaagggatctcttgataattgagaaaaaaaagagctccatcacactggcacatggaataaaaatcaggtgtcgtaatcatgtcacgcctgtattttgacttgctgcaaccgtccctggttcggattcagaatcgagacagtgaaatcagctgtagttgaggcgattagtcaagtcactctatatgattgctataaatttagttatcatgcacaacattctgtttgtctcttgaattgttcgaccttttttttgtggacgcgactctccgtcgggtgcccgatgagaagttaaaatcgggcgctcttaaattatttattcaaatcatgatccgattgtaccattaaattcgttacaattaaaccttcaaaacaagaccacatatggatatattccgacgaaaaatttttttagcttattattgaattatttttaaatgttgcatgatgttccatcagatatatcggaattgtttcactaagtagatcgaaaatgtttcactcgtttaaatcgagtgttgtttcaccttatataaaaaaaatgtttaagcaaatagctctgcgcaataagtagatcgagaggtcgttccgccccttgtccccgaagatgggtaatatgttctcatacaatgttgctccaactttttcctagagggcctagctggtgagcgatcccagtccgcggcagagaacagccagaagcaactagtcgcctcctttcctccgccgaaagatgcttagccagaagcgacgaaggaggggagctggggaaggctgacgatggcaatgaggggggaagctgtcgtagaagctttgccgattggtttgaggaacgtcttgagattcaggcaattgcagatgatataactagtaaatatgttcctcctcatgtcaacatattttattgtttagggggaattataattacttgttttctagtacaagttgctaccggttttgctatgacttttgactatcgcaacggaaagaaaatccgctgcaccttctccacatctcattggtttctattctgcaacatgagatcagcaactaactgaactggatcatcagtcattctccctaacggcttcattgttcagatgtttcagttcactgcaacattagatctatacatagtgaaacattgtgagtacactatgtgaacatgtttggtgaacaaaaaataaccaattngtcttaatagagagtttccaaaatatgtgggtttttttgttgcaatagagttatctgtggataagcggcaggtggatagggacacgtgggggggcctaatggggagacacgtgcgctggggagcgaccgatccaggcggctggcggcggtcgaccgagcgtgggcattctccttttttttgttctgtaattgcaaccgtaagaactacaaaaagacatataagtcttcaactcttctgatttttctccaaaaaaaggagaccccacatgcgcacaactgtttctgatatggagttcaaagaacaattgatattacttcgatatggagatcattttcgtgggaggtagtattgttaaaaccaatttctaaatcaaaatacaattgatattacttggtaccatttttttggcacatttattttttaaaggtttacatcacatcctctaactgtgtagtcggctatcactattcacatatattatcatacaatgaatgtaattttctgtcaagctgtagcctaatcatgatatctaaaattcactatatatgaaaaaggaccatgtcaggatctacgccttttgggatgctgacaatctgctggttgatatttggcaaggaccgtgcaattttccttgcattctccaaataggtttcaaatctcatatggttgggctcaggcttcttgtccaaattctttgcaattcttgacttaatattttctgcatattgcacactagtggcaagggagagttcctccctcaaaacatggtatttgattgcctgctcacggaaagtccagttaccggtgatccagtcaaatttgtatagcgggagaaagcggtgaccatatgccgctatgaactcaatggcggaaaggatgaatttaaactcctcctttgagagatagtaagcaaagctcagcctagtccatccaggcttcagtccactgtacccctgaaataatttgaccgtagacagtagcactagttagtaccttgatatatactaataggtttaaatttactgtaggcaatctaatcatacctcaagaatagcagaacggatgcgaacagagagttcgttattaacatcaagcaaaatgtgtccataagggcctgcacaagcacaccctccccttgcttggatgccaaaaagatcgttaagaagctttgtaacaaatctcccatggaggggtagtctcttgtttgtcttgttttccaatgaattatagcaaccgggctcaacccgaagaaaaagtgaatcttccactggagggtagatgaggaacgagaagattggaagacgatcaactgttgtgttgcctaggacctttatattcagattatcaaggagccttttcattgccatttcagagtacactcgctcatgtagttccattgtttcatatccaatgtactccttgacccaaaatgctagggatgcacggatcttttgcactatcggtggtgtgccagcatcctcccgctcctcgatatcgtcatagtagagggtatcctacacatcacgtgtacctttgttcattagtatttatgaaatggccatgcttaatttggcacacaaatacttgtaatttctttgtctatatgctaacctcttcgttgaagccattgacataggcaactgttccacccccgcacattgagggaggctgagaattgagtcggtacaacgatttgttcatcaaaaggatgcctggtgtccctgggccaccaacaaatttgtgcggactcaagaagactgcatcataaccatcaacttcgccagacttcatgtctatcttcacataagggccactgcaaacatgggtaattgttaaatttaggtattcttttataaatgtacaagtgaagaaatataattaatgctagctaccaggcttaataatcctgaccatagctagtgaatttcaagtatgaggttgaacaattctgatcacggttatataattcaaaatgaagtgaccagtaagtttaagttgaaagtctccgtcaagaaaaaagagagttgaaactgtagacaaatgaagtacaagattgtagaaatttggaagaaataaaacattcagattaattgtttgtgccctgtcaaagtcaaaaataatttcattgtcgcaatgaactacttcactagacttttttggccgattaatttcctcaatcctccccaaacattagaatatatgcctcaagtagttcatcttggttcaacaagcaaacaaagatccacagagtctcagtactttagttcataccttttgcatatatagacaatatattcacataagtcaatcatcatgagatcatatgcttgaatgtttggatgagatagatatattgctgtcatatttaatgcaaagtatagaaaaaaactactagctagctgtttggtactgtcaggcaaattgaatgaagacattctgttgttcattaattaga

SEQ ID NO: 27161 - DNA, 10815 bp, Oryza sativa
ttcccgtagaagggaaggacctcgttgaggaggtagtcctcgatgtagcggaggctccggccggaccccgtgtggtcggcgtaggtaagaaggcggcggccgaacggcgtgtcgaactcggcgtccttgccgatgagtgcgaccggagccactccaccctttgctccgccgccgccgccgccgacccctttttctccgacgacatggcggcgccgagcaggctcatcatgctgctcaccgcctcatccaccgccgccgcttcttgcagttgcagagatggcattctccttaactagctatagcctaattctgtatctaattgtaattagcaactgattaatgggattagcttaattagaagctcaatgaaagatcaatggcaatggaagctaagcaaatctctcaatttatcaatggcgagtagtagcttcacttaggttgaaggcaactaggtaggttgcatgggcagtggtatatatagcgccattgatgtggaattaattaaatctaatgcaatttttagaaagagagaagggtcaggaagaaaaaagaacaggaaatggggaggaagaagagggtagctgtttgatttaattaatgcgccgggtcaacatgacacaattgcttcttcggctctcaaaatatatatccctcctttatttgtgacccatttattaatggccttgaatatattccaacaccttcttgttccatcatatatactccatgctaagtacatactctcttcatctaaaaaaaatcaacctcgtactatgatgatatattctattcagattcggtactactaggataacgaggcttttttttaagatagagagtatatatactccctccagtttcatatttactatcgttcaagcattatgtgagttggatgataatatatgttgtttcagaaagattaaagaacatttttttggacaagtttacaccttctagttaatgctgctgtggtttccaacgtgggagaaacactcagtttaatatggacgggcagaaaatagacatcttaattaattaatcaattaatattactcattggcaaatgagattatgtccaaaattaataacaggaaacacggaactggagggagtatgcaaaacctaattaaccggagatcattgccttttcttcgcgagtcttcggatgctgttgatgcattaaattaaaagcgttgggctgtggattttccggttcaaaaacatcgatctgggacttgttcatacacacgacacgtatatatacagtcgaacgcgtgcgaaattaattaatattaagaaccaggggttttcaattctgaattcgatcagagtatcatttaatttcaatacgggaaaaaaaagaagaaaatatatgctggcatgaaaatcacaaggatctcgtgttgtgctgtttgtgtgcgtgtgtgttcctgcattcattcattttattccaaattcaactcctcgtatcgtacgtagctaggtcggtctcttaaaatagtcagggaatgtacgtgtgtattaattgtttctatgttgacctaagctctcttaatatcttgttaagtataggacacaaaaatatatctcagggcttatccgacaaagatacaaaatctaagccaacatgaacatagaattaacaaataacacatgtaagaaataaataattgtgagcaataaataattacgactactgcttaaatttaagattaccgttttctcctctatatataatcaggtgcgacctaacctagaggcaaggtatggaccggcctatgataaaattttcaccatctcgagccactatgatgaaaagaagtcctggcctataggctttcaaccccatgccctaggctaacgcctggggtgtctggattcttggtttgtccttgtatagattattattgggtatttacttcctttatctaaaagaaaaattaaaatagttttatagtaactcaaataaatatgagaacgactgatcgagtgaatacaattaattcactcaattggatcaaaatcacgatgtagatatcctaaaataactataatgacttagtaaactgcagcatgggccactcaacttgccaaggttggtttaaaggtgtcaccaatcttccaagctagcatatatagtattagatattggtcaacacactcatatatattattagataattacaatatgccttataatgcaatgaggacgagcatgggttactgcagagagagatgatcgatgtttcttcttggcttgttccatgcatggcaacatgcagacatgggtcatgggggtacacaagtgtcacacgatgatatcccaattagtgaccatgcatgtctactgtattgttgttaacgttgtgaaagccagtatttaaatttagcccttaaaggtgttatatggtgagtgaaaattgttacatagatatagtagtgggagtatgttgtttgagccatatatacttggcccatggcctaatataagctacctgaggcctagctagcttggccactgattattagatgtttgaaacacaccattgtggtatatagtataaaatgtagaataaatttcacaaaacaacgtatactttaaccaaactataaaacaatatagatttaagtcgatatatcacaaaactacagagatttaacaaatttatcacataacttcatatttaattaagaaaaagtatcatagaactatagatttaataacaaaattattacaaaactacaagttagcaccaatttaatagcaaaactgtagcatttataacttgaagacaacattagtgctaaagatttaaacactaaaaactttagttttatgacaacatcaatattaaatatgtagttttatcatacttggtattaaatctatagttttgtgaaaaaaattaatgctaaatctacaaatttgcgatacaataaaagtatatttagttttgtaagatatacccaaaaattacatgctattgtccttatttataataataaggttggcattcaaatgaaatagagtgtcccacttaaagaaagtttagtcagataattatactgttacggtgtttgatgacttgcttcaagtcttcaactggcatatatgcgaaagctcttatatatgcaattcattcttgaagcccatactccatgtagcaccagttaatttatctatatatactcatatgggacttcatggtgcccgggctccgaggtataaaacacacaaattctctccaatttttaaaaatttacaaattgtaagtagatatctaggtatatgaatttgattcatacaaatacctaacaacaaaacaactcaaactcaactttattttacaattcattattacatatctaacgaattatatgtttggatgttatataccttgaaccaaaaactaacaaaaaaaaagttcaaactcagttcaaacttgtttgaacttgttagtaaagaaattaatgttcatatctaaacatgtaaaaaaaattcatactcattcaaattgggtatatacttaatttgaatcttgaagcccatactccatgtagcacaagttaatttacctatatatatatatatatatatatatatatatatatatatatatatatatatatgtctatttattttttcccatgagttgcatatacacatgcagtcaaaatatgatcagtttaaaaaagcacatgttcttattttttaagcttttttttatcaaatagttatcatatattatttcatttgcccaacaataagataatcaagatatgtttctttatataagtgagatcggcatttcttcttctaagttggattatattacctacgtaaaaaatgagtttttaatgatatatttaattttgacatacatatattttagaaataaacctttggcataacttatttctaaaggcctcttttttgtcacaccatgacaaaaacaacaacaataatagagtatatacatcatgttttgaaaatgattctttaattgtgcctcttcatttatattttactgctgtggcaaaaacaatatatgtagtcactccactgccagaacaaatttgttggtggcctggtgccaataatactaacattttaaaattttataaatatctacattaaatatactgcagatcataagcagtagagggaggtcgaagacccctcctggcctatctccagttctccacaagtcgaatggggagaaaaacaacgaccattctaacaaattgttgtggaagccgccagtaagtcattaccagaaaaactatttttacatgcggccaaaatgcattttcgcagatggccaaatactccgcccgtaacaaaaggcctacgaaaataaacacggtcataagtccgcctgcaaaagttaattttcacaggtagacccattaagaggagaacctgcaaaaataattatgtgtcaaaaaaaaaaggaaaaccaatctattattcacagcatgcaaattcacattgaaacacatatccgtggtggaagttctcaaaaacaaatgtggaagttcacgttcaaaatcatattcaaatccacatctgtatttttcacagcaatttggaagtttttttttaaaaaaagaaacatcagttggacgccgtggtggtggtcattgtcgcagggaggatgccgccatcttcgccgaggatctgatccggaagccgactttctccaccatgacgacgaggaagacgaccacgagcagcgcgaggagggtacattgtcaccttgccctcgtcagatccatcgcccatgcgcgttgctgtcgtcagatccgccacccggcacatcgtcgtctccggatcccaccaccgaactccgccgaaccaccatggagcgccactgctactcccttcctcctcaccaccaccaccctcgtcacctcccctgtagaccccgccgccgaactgaggagagggagctgggacttaaaagaaatatctgaatgtttcaattttctttagcgtctatgtaaatgctaatgccaattttcgcagacggatggcttaagaagttcactaaaaaataaaggtatttttataggcgtgcctctaaagctgtgcccgcgaaaatagattttcccagacggccggtcattagacctctctctacacaactacacatgcggacaatcatagtaaaaaataaggtccgcgtggaaaaattatgtgttccgttgtagagagattttttttacatatattttgttaattcttgtggcaaccataggagcctccttgtaggtgaaattagttaattagttgctggagagttatttattactagtaaaaatagagaatggaccaaatcaaatagtattagatttccaaaaggacacaacttgtactagcagtagaaggtcagataaatacgctagctaaacggtcaaaatggatagacaattaaagcagtaaaatttgagactagttctatattcatgcatgcatgcatttcgtccagtcagattagggtgcactagttctatattcatgcatgctttacacccagtctgtcctacacctaccttaattttcttgtagttctggatatcattgaaattaatggccacaattaggactaactaaagctgcccggctgaatccctgaaataaaaactacagttatagcgcacagttttgcggcctgatctgattagaagtcagagctgccttttcttgaattccagtatatatactatatagtactatactatatatatatatgtaatgtcggcctgcagtcaaaatacaatgtgcgcaagtaccatgcatctccctttaatttctgcgctttctacttgaagttaattagtttatttcaactcttcttatcattaccgatagcgagagttcctcttactgtattaaacataaggctgctatctaatattagtacttgttgagtgatattacagaccatgaccatatgagaggctccgagaggcatcacatattaattttttaaaatatatttttttacacttctccaaactttagggacaaggaggtaccaatatttttaaatgtaaattttgacacttctttatactttaggtacaagctagcagataacaaattttacaacaaaaatgatatctaccacctctcagggaccgtgaatcttcttaaaattgttagggaagtatttcactattagctcgatctacatcaatctttatgagtgtagcaatatttatggcgccatattttttatcaaaaaatagccggcatgtatttacattgtaagtccctaaattacatatgtaattttagtgtatttacaatgtaagtctcaaaattacatatgtaagtactaacattacatatgtaaattcaaaaattacatactaattacatatgtaagtggggtgtaaatgagatgtaaccactgtgtaagtggctgaaaaaaatcgactgtaacatatggcgccatatttctagcaactccaatctttattggtttgttagaggttatgagagatttttcagttcgtaagagataccatattttctaatataaattttaatacccgctagagcatcacaaatggatatttcctaatgtgaattttaaaacctgttggagcatgaccaacagatatccaagatggtttcaatttctaaaattttaggctagcttgttagtgaaaagttggcttcaaccgttcctatagttagctggccaaaaagtgaaatccgcttgttcgttcttatcgctctccactactaggaggttcagttcccaatccactgcgatcaaaccatgcagagggaggggcacacacaatcgaggattgctaattcgcgcgcgcgtcagctcgtgcctcctccccacgcccttctttttttggttttttttggcgattttttcctttttttctgcttttttctcatttttttaatctttagcacacatgttttttcaaatattttgagttgaaggtttttaaatcttaacgtaaaaattttcaaatttgatatgaaggttttcaaatctgagtcgaaaggttacaaatctcgagtcgaaaggttacaaatctcgagtcgaaagtttacaaatctcgagttgaaaattttcaaatctgaattaaaagtttttaaaaatttatctagcaaatttaaattacgagttgaaaattttgaacgtttgagttgaaagatttcaaaatttgacttcaaggtttaaatcttaagtcgaagttttcaaatctaacttgaaagttttcaatctattagaaaaaagaaaaagttctcgtaggtactaattatgattagcactaatcactagtcacgccattattagtgccaatcacatggttagcgacgggggcacagcgtatgcgtcggccttcggagcgggtgcgcaacttccgctcaaagcgcgtacacgcacattaggaattccccacacgatcatgctagaggaggggagaatcggagatcgatggacttatgtggatagtttagaggtggcccacctagctttaatttagggggttaagtttaggctatctcttaaaagagggaaaagtatatcttttaatccttatatcctcgttatacataaaaaggacatttagggatagaactttggataactgtcgtgacgctaaaaaatattacgtcagctatcctatatatggcatcaaattttaactaacattttactacttaacaactctataattcctccagagggtcatagaagatgcatgatattcttctcgtgttatcttggcaaaatacatatctgatccggaggctggattaataaatactacatctcacaaaagtgtaatctagtatgtatgtatgtatgtatatatatatatatatatatataggacactcatatggggcaccatggtgcccgggcaccatggtatctaatgcacaaaatcactcaaatttttcaaaattttcaaattgtaagtatatacctagttataataatttgattcatacctatacttatcaacaaaacaactcaaatttaactttatttcacaatccatgattacatacctaactaattatatgtatggatgctatatacctagaatcaaaatctaacaaaaacaagttcaaattcagttcaaacttgctttaaactagttagtaaagtagttaatgttaatacctaagtaattgaaaaagtttcatactcatttgaattgggtatatactcaatttcaacaatggtgcccggacaccatggagcaccaaacaaatttaatatatatatatatatatatattagctatagctaaactgaaagaaaatggacatatatattgctcatttgtctaacctcagtcccgatttgcaacgagaactatttcatgtacatttcaaaaatccatacttgcaaacatatcttaatttaattaattaattttgcgtgagatcgatcctgctgaacgttaaataaattgtctgaaaaattattgatttgttcgaacatgtcatcttacgctagcgcgctatcataccgatagtcactacacgtgttaattactagtaacgacccaattaattagcaagttcagcagccaaagctatggagtagctagctagaaagttcgcatgcagtatatatgcaaatcatagtactggccgccattaatttttcttgcatatgcacgccactctttgtgacgcttgatttggccaaattagtattacttcaacatatttggctttgacattgtctccggtttatgcatgcaagtagctagtttgcattagtataaacaaataaataagttcaagtactgtaaattagactacatacattaatattgatttatctgattaattcaacgatgttttaagtattagccgatcgagaggcagttgcaaaaaaaaaaaaacatcggctctgattgttttatctatagaaaaatgaacagtcatgtagaaaaatgaacaaagtaaaacttgtatgtatatgtactagtagtattaacagtataaatggcaaggatttaagaaatagaatgcgatcgatgaaaacgacatacaagcaaccctaaattaaaatttaagaatttgttatggttaataagtcaataaacgaatttcgaatggagctgggctacgtcgtgaagaaaacttctggggcatttgtgccactcagtttttcaattacgaatgaatgccactcgaagaacagtgttctaatggcattttttaattttctagcaaaagtcatgtaattaataacggttcaaaccaatgctaaatttacaatcgtcccgaaaacgtcgttgatatcaaattatcaacatttcatctggctgcttgaattatttagcagtatctcagtcttttaatacgtttggttatctgtcttttttttaaaaaaaatgtaattattatttatttttgttatgatttcatttattatgaaagacttttaaagttatgacttataactttttagtaaaacaaatagtcaagttacctgtgttacatattaaaaacgaagtgagtatccgattattcgaaaaacgaaaacaaaaagtctctgtctcagcgcggtgggatgggctggaaaaacatgttttccgcatagtatgaacgttgacagttgacacgcgttttcttgagcctaatagtaaaccaaagaaataccggccggtcaatctgtcggcgccgcgctggctaagctagcacatgctccattcagcaaattgttggtaaggcagaaagaaattaagcccaatcgagggtcaacagaaaccggagtttgacatgtattaatttcggttgaaattaatgaaaaaagaagaaaaaaaacaagatctagctgagttttttttttaccactatcaggttcttgatgaagatgtgtttgagttgagaagagtcatgttatactccctaatattctttgaataaaaatccatttagctgcatcttaaactataaattaaaaccggataactaattaacttccttaaatttattacacctgatcattcaccctagctagagtggatttggaggcagtgattttatttaatttgcatgtatgtcgatggttttacgtgatatttttcacgtatatactttttgtcagcaaggcggttttaaacaaacatcattcatgtaactcttcagtacgtgatacttagtttgagtaccgtgtaacttgttttcatgtatttcttttatcaacactatatatttaaacaaatatcatttataaattgctctctaagatttatactccatccgtcccaaaatatattagtcttgtactggatgggacacatcctagtacaataaatctggatcatatgtcccatctagtacaaggtttctagaacggatggagtaacttcttagggagcaaggggacactcgcacggtctacaaggccaaactatcaaaccacacattgacgactttatagagaacccatatcatatttcatttcttttacatatacacaactaattaaggttgtatttttttttctaccgtgccgtcctaaggacatatagttttcattactgttggatagacggggacataggtctccccaaggccaaactatattaatgtgaaccatgcatgcattgacgaattaactatatactcatattgttcatattgtacacatttattttaattttttccattgttcatgtatgcctcctagaaacatgggacatactcgatttcacaatcaaccgtacgttgaccatcacacacaggcaaggaggtgcaagtatttttttttccacgtatatattttctatacgttgaccctc

SEQ ID NO: 27162 - DNA, 623 bp, Oryza sativa
gcagcaatggcgaggagggcgccatggctcgccgggattggggccgtgccgttcttgatcgtcgtcgtggtggcggtggtgggcgccgccgtgccggcgatggggaggttcgtggtggagaagagcagcgtgagggtgctctcgccggagcacatccgggggcaccacgacgccgccatcggcaacttcggcgtgccggactacggcggcacgctcaccggcgtcgtcgtctaccccgacaagaaggccaccggctgcgccgagttcgacgccaagttcaagtccaagtctcgccgcccggtcatcctcctgctcgaccgtggaggtaggagattgatttcaaacttccaatgattgattcaattagtttgtgcttgttttgatttgcataagtatttttcaagaaatttgtgttccaaagtctgcaagtctgaactgaacaaacttgagaagtagtattagtttttgatgattatttggattttgagagtttggtttggtgatgatttgattccaatgttctaagtcatgccaatttttgttctgttaatgggttgtgtcaatccaatggttagctagtccactgattaaaaaaacaacaaaagaaatggttagcaagagag

SEQ ID NO: 27163 - DNA, 3260 bp, Oryza sativa
taaaaggtcacaatatatttatctcaaaatggacttggtttcaccaatatacgcctacaaatgtggaaatttttagcacgaacgataaacagcagtaatatttcctagttcttacaagcatggttgacttataaatagtactacagcatacttaaagtagacaaacagtgcataaaaaaaacatattgctcccttaaacaacattgtcatgttctggcctcctgatgatcccagcatgagtgagaagtgcccagaggattgttatcagctcgcctcccctggcaatggcctttgcatgtgcctttgtattgtcggaaggagcaacatatagcatcatctctgaccaaaactcagcaagcatattccaccccttgttttcattctgaattccatcaaccagctgcttgccgagttgtacacctttgcacaccacctcattgctctttgatttttcactcagtaattgcatcatgcggtcaaattcgaaacacctcatatcagtgctgcccaaaacagagtcggtgatcttcttggcagatttatacaattcttttgaccatggagtgtcatctggcagtagctctgggcacgatgctagcaaatatgcacagtactttgacaagtgaatggcagtgatcatatcatcattctcatcaggagagctatgacgttctgaaggatcatgcatgtgcctgatctcaaagatgcaagttgcaatgtgccaaacaagaataatgtcagatgtcccttcaccattgcaagcccaacgaatatcgtcacgcagatggcacttctgcaaagatgctatgccattgctcagctgcccattgctacctttaagtgagttgatgagagcagccttcaccggctttggtatcttggtaggcttcattgctttagacagcctgaataggtgcctaatatgacctttcctcttgcaaggatctaatagagaggtcatgcccattttgtcaccccagtaattcatgagcttgcatctgcaccacagaaaacaagcaatcaatcgtctcatgattcgagacttttgccatgatggctttgctgtgtaggcgcaaaccagggtaactttggtccagttagagcaaacgtaagatatgatctcccatacctcaccaagcaaaactaccagaagaagggagatcgttggcaccaacacgaacaagatgcttccaatatcatgaaatctatcattatcttgttcaccgcatgttaattcgcaggacattaccctgtagtccttatactctggaagaattttccaagccagtgtaatcacgatgaagatgcaaaatgccatggtaaagagtgaggtcatgatgctcataatgggcaaccacttacccaaatgggagatcgggtgggacgagtaatagaaatcccaagcaaatgatagctcatctgtgataaccctgaacacagcttcaggatctgcgtctgccccatccgtgagcaatataccacgaacaaagtgaaaggccttctcagaacctgcctcaaccagtgggtacctagcaaatcgccttcgcagaagcttaaacaatgagaatgacatgcagagatgtttcagtgctggccttggccccaaaagagcatcattcatttctgccaaatgccaaactttgtcaatggttaccaagttaccattgcttgtcatcgcacttgtcccgttctggctaaaagtgctacgtttgaagtgataaccatgaggtcctttctcaatctgttgtttgtcttctcccattaccacgagtgctaaaagcctttgtattgtcacctctgcaacttctgatacctgtagtctgtacaattcttccatatatccagcaataagactaggattttgtcccatagcgaaggagcgccgtgccctcccgtatgcaacaaattttagaataatcttgatgaaaccaaggcccagtaatgttgatatgatgatatctggcaattcttcggtttttttttgtgtagtagtacaacacaaggaagaaggtccaaatctgtcgagcaagcatcgctattgattcaaaattcccaccttcatttccattatgaacggcagtcaatattgaacttgtattcatcccaaccattggcagcagcgctgcccatagtagcagacagaatgcgcggttgtcaacgcattccaaaccgtgaaacaagttgtagtacttgtctctgccgacgtaggagacaacataggagaggattggtaggactagagtggatgctcccagaaaaagatagcggttcaaagcaatatgccggtaacgacggccataagagccagctcccacaaggatcaccaccaagaatgcattggcgacgaagagcgcattcgtcgtcagtacatctttgtttatgcgctctatcaagtcgtttgagcggaagccacatgtggtagacgacattatagcttttatagatcttgcaaccttgttgtgacaatctggtttacatatattgcacattcattagggttagactggaaaaagagttagcttataattaagaaattaaccacaaagttatattttttgtgtccctatttattctcacatgtttgaagctcttacctgacctatatggaacaaatcactaaaataaacaaaaaagaaaaggaaaaaagaagaatgtcccaaaaataccaccttgaatttcaatgttagaaatattccactctaaaacatgttctccttgatttatgccatcatagacttgacattaggtcaaaaatattttttgtagctctcccaacgttaaatttaactggacagtgtaattaaatgaaagaaatcaggtttggggtggcatatatatttttagctatgatattctgggtgacatatatcaaatctatgtattatataccaaaagtccactaaacttcctataaacgctccaaagttgtcacgtagcgcttcaacaagcattcctaggcccgccatgtggcattctacaatcccaccatcgattttatgtcgcgtcccaaatcgaccctaaaatagatcctctaaattatgcctagaataattaaaatacttatgaaatccttcaaaaattaaaatgtgcaaagttaaaagtcaaataaggcttggaggatttttgtatatttcctaaaagcctaaaatgtgtaaataaattttagtggaattttcagagcacaaataataattattaagaaataaacaaagttaaaatgattttataaaagaaaaaccttaaaatcccccccctccccc

SEQ ID NO: 27164 - DNA, 16474 bp, Oryza sativa
cccctccgtttcgctcgccgaccaccggagcaccaccgaccccgtggacccgagccgcgccaccgcctccctccgctccggccgcctcatccgccgccgacgtcgccccggggtgagccgtggaccgtcgcctcctttcccccttccctcccctatctcggacgccgctccgccgcgccagtggtcgccggcggcgaccatcggggcgcgggcgccgcctcccgccggccgcgtcgacgtggccaccttcgggcgcgccgcgcggttgccgcgtggggcccagccgtcagccgcccgcgccctcggctgcggctgacgcgtggggcccacggcgccggccggagtgagcccgggtgcacccggtccaccgtggaccgtgaggctgccgcgtggttcccacccccgtggacatggtccgcgcgcccctctctcccggctgacacaataaatcccttttaaattaaaatttaaatgaagaaattcgtaaatattcatttaaagagcatataaacttcaaatggccataacttggctatttgaactcggaattggaccgttcaagtctctaatttttccttaagaagtcaagaacccatttttgtgctttgttcctgcttgttatatggagtttattagagtaaaagcccttttcttttccgttgctcgtgtagacgctgcagcttcggaagatccgctcttcgtggaggttgaagccgacgtttgggaaagcgagcaaggcaagtcacatcatctttgaacatattggatcccagtttgtgaaattattttgatttaaattaatgcattatcgctttatttaaattcccgcgttatcactgttttatttagccatgcctgtttacctttgttatgaccttattattattgctattgttattattaccttgttcaccctagaataaacaaaaccccaactagtgggtactctattcatggtgccactagtatgaatttaggtagatgcttcgctgattaattaggcaacattaggtggttttataactctagactttgggaatattcatatcacttgaacattatggaatggttggattattgcgaaattggatgcacacctccccctctattcaaaaccctcaaaatggttttaggctgggctcggggtgcatggttttgatagtagcacctcggccacgtaaggaccggtcttcgggcctctgttgcaaagcactcccgtacttccacatgtctagtgggtaaggcttagtttgtggctcagtatggttataaacaaaagtacacggatggagagggacgaagtcgggggtcgatggacatctctaggacaaatgaatgctacacgagctgcggcccggtagtcaagaagtcatggcacaggcctggtgtcctgctgctaggggctcagtcctgcctacctgtcccggaggttccggccgtaggtggggttgggtcggtactcttgtctatggctaggatgggttggaaactatgtcatgtcttccgtccatatgccatggtggtatgtggcacgtggttgcacgtgaggaagacgtgtcttgtgggtaaagatgtacacctctgatcaaagtaaaacctattcgaatagccgcgccctcggttatgggcaagcctagcaatgtacccaagttagtgttttcaattcttaaaacctgcttaacaactaaaatgtggaatggttggcctgggttggcttgggacgagctgggacccagggtcgggttgccagttcggtctgaatcatcgtaggccttgggttaaggcaggttcgtgtgggttcacagccttgtttaataatattaaatagttctaggatcgtgttttaaatttagcttcgagcaactaagtgtcttttaaatgctgtttactgcaaaacctaacccctatactataactccattgtactccctcgcatttatgttgcacttgtgggtgtgtcttgttgagtacggtggttgtactcagtcttgcttaatttttcccaaacccagaagaggagcccctggatgatgaaggctttggtgtttagctcgtgcttgccgtcaaacgcctgtggtcgtcgccctagtcttccgctgtttcccgtttgtctttgtgtgagctgggccttcgccgcccatgtaataattaactatttacgcttccgcttgttaaactctgaattgtatcaacttttggtgtaccttgcctcctgggacaaggaataatacacgcacgtaaggaacgcccgttgggttatttccggtcgtgacattttagaaggactggatctatgtcaaaatcgcgtgcacaagggcgtctcgggaccaatcagacatgcgaaaaattgtgcgcaaggacgttgtgggcccaatcgtggaagcgcgcaaaggcgcgtatgaaaaatgggcttaatcgctggcctgatcgctgcatgtggcaaggggcacatggaaacgtgcaagcccaaataattcacgcacgtctcagataagagggacactttggcgtaagaaaaaagaaaaaggttttgacagaaacataaaattaaaaacaaaacataaaaattaaaacgattcaaacacgatgacgtgccgaaattccggtgaaaacatcttcaatttttataatagtagattgaagttttaaaatttttataaaatatctataagatggtaatatgaaaccattgtaaaaaaagagaataaaatattttctctcactattaccaatccttgaactcaggatctcttggacaaatcatttttgtcttcaataaactaaccaacttaacccgtgtcattaattgtatatttgtgccttgagtattgtttaacaaacttaccaaattattttgcaaaaaatgtattatttaacagtttgaaaagcgtgctaatgaaaaacaaggaagttgatgtttggtgttgaagaaaagaacagagcctcagaaatatctctacagagttttaaatatttgattaaaatgcctttacatattgttgacggtcgttatcgatcagtttcgatcgtcaatattaccaaaatagaagagaactagtgatgcttgcaatgcataaatatgttagaataataatattccactagtattaggtatactaaccttttgcagagaatgacactaaagtggaggagaatcgacatcaacatggaagataaatcagtctgacgatgtcgagaatcagacttatgcatgaatgggccaagaactcagaattaacacgtcaaactgggccaaaattcataagtctacaaaaaggagcaacagaggtggccgccagccgaaaggtgggctggttgggccggcccctagttcgaccgaacctccctcgcctccgttggatccaggttttggctggacggttgagatgaagccccaatgacggttggagggtattaccgaccattccaaccgtcacaaccgtcatagttcagctataaaaggagctccccttctcacttcactcacacaccttaagcaatagctctctcatttctctcaagtttagtatagtagtatctagctggtaaatagaattagaataggaatcaggagtccggaagtcttcggaagagtttgggtatggctctagtagcttttctcttctcttttgtaagctttgtacttttattagaatactcttctaaatacatttatggtattgaaatactttccgagtatatgagtacctactttacattatgttcatgttatgctgaatatacggctagcttatctgggagatgctttggtgcgggtacaatgtttgcttatgcaattactctatgttatgatgatgatattagagtagtatctggtagtttagacgtggtgtctagattacgggatatcattatttagggttatatattgcggatgagaggtgggccgctgatggtgacagttcagtacgggtattcctctgcgctggtatataatcctaagttaattccctggggagggtatttctccgtatttagctccggttgtatggtcatgacaggctgtcgtaaggaactcggcagtcaggggtggcttctcgaagtaccaggagggcattggatcgaaagtattagctagtatatcagttaactagaatgtatgtatactatgtatattagaagtataggaatagattatctttctcttttctaaccacttagcttagataatatattatgagaatgagtagttaatgcttgtgtgtcactctacctttaaattatcttaacccttgcttagaatatgattataacaagtaatatataaattgttagtcaagttctctctacatgattttcccacgtgataaaataaatacgatacccttggaatattctcgggtgaaatgctacaatggtatatctgtgcgcttgcggatgaactctgtaaccatactataccaggagtatttctgcgccattgttgggaattatatttctagtaatgtcgttaagaaataccaacacttattaggcgcattttaaagtgtaaaaaaaatgcctctataaaatgtgttgaaaatatctctacaatgtctctagagtacacattttctaggcaatttttaatgtgtctataaaatgtttggggtaattgtgttcttgcccttgctttccgattcaattgtacttttacctttttagggattgtgtttttacctttttttcaaaatgaagtagctgtttgaccttgatcatgacgaaaaatttgataatttaacactttttttatttcccaattgttttagttagcacttgtgaggataacatgtggtaccatttgaacgattaaaagtaggccaggatgtcaaataatcgaaaccaattttaaaaactgttaaattatcaaatctctagagtgtggccagaattttcgagtaaaacaaatgggggagaaaataaaaaatgattttgtaatttgtgaatgactgttatacctctcgtgagtaaataaatcactcaagtagctgtgtgaatcaggctccgcatcccaaaaccctagaggatttggcggcggcggcggcacgaacaaagcggcggtgacacgaacaggtgacggggaggcacggcgacgacgcgacgtagggatgaagtatcaggcggcggcgaccgtggggcggcacgaaggggaggcgcgtgcgccgcggaccgtcgccaggactacgggcggacacaaaggggaggcgcgacggggacaacgggacgcaggggaggcgcacgcgcggccgaccatcgtcgggactgcgccgcggaacagcgctgctggaggcaagtaggcgcagaggtggcgggcgggtacggtatcgacacttcgacagcgaccaagtcggccacaacattttgccgctgggtgcatcggcggaagaggaaggtgtcgaccgcatcgtctcatgcgaatcctggacctcctccttgttggatcccagctttgctcaaagctagctaccgctgccaccgaggaactgggagggtttaatcagtggcagatgtaggaggggataataggggtctgaataaactatataaagctacaaccacccttcctatttacatatagcaaaaaaaaaaaaattagcggggctgaggagactgaaatttactccatatttctatatttttcatggattatttgaggagactgagaagagtgggttttgggggcagacctataacattttatacttgttgggtatttgaaatttgttctttggaaaaaagctttgagaattagttgaaaggtctgcgtatatttgaatgtatgatttaatttcaattaagacacttgagtggagtatattgttgtagcaatattaaaatattaatatcatgtactaaatacctcgaaggacacgtgcagatagtggtaatcaaaatttggtcgattaatgggaagtggaaattatattctgaatattgtacaggcaattgcacttgttttcataaagtaaaaagctagagtgaatcatcgttagcataattaggagtttagtgtgtcaacagatttataattcttacgtgtgttaaatgggcacattagttgatgcatacgtacgtcggtacgtgttatgtgtgtaaggtggtgcgtgtgcgtcttccacatagtactagcattttattaagtcgtatatttgtgcaactctaaccttctctccattagatgtgtctacatgttaattataataataagcttaaatttgtactaccatcatacaatgcaagcgtaacatacttgacagaaagtacgtgttgcttgaaaattaacatttttttatcatgatttgcaattaataacatcaaatagcttccatacaataattaccacaacaattgtctctctgtattgaatattgtaaatagacttgtaatctgaaatgcccaattcatgatttgttgaacaaaatggtgagtgcagtgcttagggttaggatttctattcatcttctgtattaccatttcccctttccatgtgttccgttccgccttattcgttgttgcttgagttgccgtcttcttgtcatctccgctggtgcacgagtcttgtactcctctcatattttgcttattctctacttcgtacatatatgtattatgtaatagaataggtgttcatagatgaaatctagttccaacgcaaatattttttttgagaagggtatttttttacccggcctctatatccaaccggatatatacggccattgaaatatgaaacttagacccaaacaacccaatctgaaattcgctccataggagatttgaactcaggaccttgggtactacttcggtcactgtaaccactaggctagatgccctttcgttaataactaagtattatcattaacaactaaatattatcataacaataaataattggttatcattatgataaatttctgaaatttagcgtaaaacccaaagttatagaatttagctgtgcgtaaaaatatattccttcacaatatatttttcaaatacaattggttggcattttgtggtttataaacctccaaaatgtatcagcttataagaaacaaaacatccacgccactccactctgtttgtgtgatctctctgagaaattttccactgtgacaaagagaggttaggtgtgtcagggtagaataaattgttgttatgagaatgcgtgaacagtgtgataatgtgattgaatatttgaatgggcacatgaattactacttttaactctatcagtatacacgtcaccttctcttgctaatgacacctcatcattcttttccacactttatttcctttctcattcgtgcatcccctgcttgaagggtctagaaccctctgctttttacctctagtatttaagttcgatcgaaccgttaaaattgatttcacgttttttccttagctaatccaacggctatatttctaagatgatgtggcacattcttgtctcatttcactagtgaagattcgaaaagaaagagtacaactagagaggatcatctttcgaatcctcggtcctgactactacttctgacacaaaccatcttaaaaagatgattagcgtggtggataacgagtcagccctgatcgttaaggttcgacttaattaggcttggttcgatcggattgttttaacaagccaaaggtaattaactcggttcatctcgtgagctagctcgtgaaggttgttagattcattaacacatttatatcatctttataatctgaaattgaccactttatcatatattaacacaataataaacactagctaatataaagaaatcacaaaatagatagtttggaaataactagctaaatgactaaattaacaatagctaaaaagcactaaatatgcatataaagatacgaaacgatctaatcaagcagcttaagagcttaaagtctcatcatgactataagtttgagctgataggagacacgagattcgaactttctttttaccacttaagtttgtgggagatgtagctgtatatttttcttcactccatttattttttttatatataatgtcattgacttttgatatgatgggcttatttggtttggagccaatttttgccctaccaaaatctaggtagtaccaaaacattggtaaattttggcactaccaaattgggtagtattcaatttgatctatggtgggtaaaatttggtagtaaaacaaacatctacttgctactattgaagttgccaaaattttagtagggtagtaaattggtatcaaaacaaataagcccgatatttgatgattcgtcctatttaaaaattatataagtattatttcttttgtcgtgacctttttcattaaagaccccttaagtatggcatgtactttatcatatttgcactaactttttaataacataaatgctcaaatattgttataaaagccatagatagcaactattgagaaattaaggaggtagtatttaattaattaatttttatgagcctacagttttggtagctgagaagcattttaaggcattcctaaggatataatgggggtgcaaaccagaataaatgacagtgggtgtatgagacccactactacacaaataattttcctgtacaaacacttcaatagattgtagatagatcataagtgttcgcgtctgtaaaattttattttcgtatatggccctcttaaggtgtcgttgcaaaattaggatgattttccagacgagccacttaagaggtcacacggaaaaaaatattttcgtagacgagcttcttaaggatctgtccataagtctgatttacctcctcttccttctcagcacttcattttttttttaaatcatccttatctcctctcctgtctcctcatactcctcgctctatctcaaactcctctctcccggacagaactctctactctctctctcccggaccagacggcggcagcggggggccctccatggcctagatccgcgcggatctggctgcggccgtcccctgccctgaccagtagcaggagagcccgaccagctagcattttgcgattttcttttcagattttttatttttgcgtgtggacgacagaagcacctgtacggaaaaaatgggattttcgtggcgtgtgggtcacccgtatggaaaaatagcgattttcgtagacccggcacgtgaaaatcacttttgactcgtatggaaaaattactttttactagtgacggatgaattgtaccaaggattgagcctgcttaccgtgtcaaaatcgcgatgatcaatgtaacactaacgcagtatcatgaagccaacatatgttttccatcaaagaaataactcatatttaacttggagaaatccctacaaaagattggattacattgtcaactctcaaggcaagtctgcctgaaggaaaaacactctcaagactagtgtgaaattgatcatctcaacaaaaacgcatacattaattagaaaacagaaatgggcaaaaagaaaagaacaggagaacaaagatagagattaattacacttcatcagtgttttgaaagaatctgctttccgatcgaggaacttcaagggcagtagtttcagcacgtacgggtaacatatttatactgaatgatcaagcaagaaggagagcaaacaacgcccacagcgaagtcgaaacgacattggatttgatgaagtgaagtcaacgttagccacagttgcaaaaataatagatcgagaccggtattctagaacaaagtggcttggctgtaagtctccagatcttttacggtgtagtatccatcattaacttctaaacagttaattaggaatagaaactaatattagcacgtgtagtttagtaattcctcaatcaccatccctcggctggcccaacatgtctgtctaactctagtgaaagaatgaacgcagcgagtttgcgggcgaggagcagcggggaggcaccctcaaggcctcaactccctcacgcaggcacgggtcatgggtgttgtgaatagaattgattgagcgagagagattgagtgagagagaattgcacataagaatatagagaatgaatgagcgatcatttattgataacaatggttacaatatataggggggagagaggcggcaacagaagacgcgataatttgggaaccatcgcgtccgttgttagaatcgccgtgaggcgagaagaggtgtggggcacgaccaaccatcgtgtcccagaatttattgctgctctatctatatagatggatgagatcacccaaatatttcagaacactctcccttgatcgaatccagctttgatcattactcatttagtgttccagatatctgtaaagataatcttagaaataattatagttaaatacatcacgtaaaactactcgaaaacccagtgggaaaaataaggagagaaccgtgatatatattatggactattttagatctatgagtaaagctcatagtttgatccaaaatagtataatgtctatagttatcatttagtaaaaacccagtggggaaaagccaaatgataagacatataagcttatattgatattacctcgttaaaaactttggatgagaaaacctaaagggtaaaactcatacaaaggaaaaagagtataatatgacgaaaataggttattttccagaggaagatactccccctgaatcctgcaaatttttaagtcgtctcataccaattccttcgacacatttaaagaatgtggagtatggtagagattttgtgaataaatcagcaagattatcacatgacttagtttgcaagatgtttatctctccatgttgctgaagctcatgaggataaaataatttatgagcaatatgcttagtgatgttgctcttaatataaccagtttccatctgaacaacacaagcggtattatcttcatagataatggtaggtgattccaatgaaccaataccacaagatgttaatacgtggttaaccattctgcgaagccatacacattcacgtgacgcctcatataatgcaattatttcagaataatttgtggaagtggctaccagagtctgtttagaagacttccatgaaatagcagttccaccctgtaaaaatacgaatcctgtttgtgatctggcgttgtggggatcagatagatagccagcatcagtatacccaattaaagtcgaatcctggttctttttaaagaaaagtccaagatctcttgtgccattaagatatcgaatgacattcttaactccagtccaatggcgtttggtaggagcagcgctgtatcttgctaatagatttaccgagaaagcaatatctggcctcgtactatttgcaaggtacataagtgcgccaatagcactaagatatggaaaatcaggaccaagtacatcctctccatcttcctttggtctaaatggatctttctccacgtctagagatcgaaccaccataggggttttggaaggatatgacttgtccatattaaatttctccaaaattttctgggtatatgcactttggtgcacaaggattccaaaaggtaaatgctcaagttgtagacctaagcaaaatttggtttgactcaaatccttcatttcaaattccgtctttaaatgatgatgtgcttcattaatatcttgtgtattgccaataatgttgagatcatcgacatataccgagataatacaaaatcctgtgggggactttttgataaagacgcacgggcaatcatcatttttagtatatccctttagtgaaaggaattcacttaatcggttgtaccacatcctgctcgattgttttaagccataaagtgacttctgcaacttaacacaatacatgttacaatttaccttctgattcgggatgtcgattccgccaggaaccttcatgtaaatatcagaatcaagtgacccataaagatatgctgtcactacgtccatcaactgcataaatagacgattttgtactgccaatgatattaaatatcagaaagttataccactcataactggagagtaagtttcgttgaaatcaacgccaggtttttgcgtaaaaccttgtgctacaggccttgctttatatctcaccacctcgttgttttcgttccgtttccggacgaaaacccatttgtatcccacaggaaagataccacgaggagtaggcattacagccgagaatacatctcttttgtaaagcgaggctaattctgcgtcaattgcgtccttccatttgttccagtcagagcgcttttggcactcttttatatacctaggttctggatcaacttggaggcactcagcaatttgttcagaaaaattagtgtcgacaattatagctcttctatcaaaagattctccagtttcagagtaattgatggcaatttcatcaacccttatagactcattgtgatctcccgaaacaatgtgtctatggtcttccgaattcctagtctcagcattgtgcaccaccgagctaggttgtagactatcacgatctgcttgacatatagtatcaatttggtgtgtaccaactaaaggttggtttgcatttaccgtctttctttgcttattagcaattgtttctcgctgagtggccatacttcttcctctctttttagtgagtggaagttgagtgcttttatttggtacctccactctttctggcgcattctgagcgggaatgaaagatttagtcacacctttataattggtaaatgcatctagcatgttatttgcaagtctttgcaaatgtataattttctgaacttgaagttcagtttcagtagtacgtgggtctgaggctggaataccctgggcatcccaatcaatttcctggcattctttttggtacttgaattctccccctaatgccgggaaatgttcctcatcaaagatagagtcagcgaaccgggcggtaaatagatcacctgttaagggttctaaatactttatgatcgacggagatttgaatcccacatagatccccactttcctgtgtgggcccatagcggtacgctgtggtggtgagatcggtatgtatacaacacattcgaacttacgcaaatgggaaatacttggaggatttccacgtactagctgcattggggaagtttcatgatatgcagttggtcgtagttggacaaggtcagcagcgtgcagaactgcatgaccctagcacaacgaaggtaatttgcaattcattaataatggtcgagcaataagcttaattcttttgatcaatgattcagccaaaccattttgtgtgtggacatatggaacagagtgctgaacctgaattcccaatgccatacaataatcatcgaaagcatgagatgtaaattcggcagctttgtccatacggattgattgaatcctatgttcagggtaatttgccttcagccttataatttgtgacatcaatttggaaaaggcatggtttcgtgtcgatagaagacacacatgagaccatctagtagatgcgtcaatcaaaaccataaagtacctgaacggtccatatcttggcacaatagggccacagatatctccttgaatgcgttcaaggaatttaagtggttcggctctgattttgagataagatggtcacaaaatcagtttcccagtagcacatgcagtgcatacgaaatcagaggatttgagaaatttgtcagtgatcaaatgatgaccaatagagttgccaataatttttctcatcatcccgataccggggtgcccaagtcgatcatgccaagtgtggaatgcatcaacattttgaaaaattactttgtacgcaacatgtgcaatgggcttaatgtatgtatagtacaacccgatgtgagagatggaattttctcgcaaatgcgtttgccatatccgttttgtttggttaagagaagaaattcttctcgattatccatatgggtttcaatgtgaaacccattttgacggatatctctataacttagtagggtacgggttgaatcaggatacaataaagcatcctcgattgtaatttgtgtacccattaggagtgtaataattgctctttctgagccaactatcacagtatcgcgcccagcgatagtcaaactttgccttctctctttttgagagtttgaaagtatttgatctccctaagtatagagtttatggtaccactgtccacaagacataattcctctccaatcggagcgatatccttagacatctataatgaaagaagaattgcatgattaagaattctttatccaatatatatacatagatacaataattaaaacatcaaatacatagtatgacgtttacatatgttaatagtacatactctaatgactaacaagccatacaaccttacaatacaagggagttcgtacttatttacttattacaaccaatattatttggcaaacttataggatatcaatatactgtttcaagcacactgagataagggcagcttcatctccaagtgggacgcatcgagatcattgcaaatctccaagtgggtccgttgagcagtattcgatgaacatatcatccatcgtagagagtggagcgacatcttctgggagaacattgaggttgctctctggttcagcaggagcctggtgagaacttgcaacctcagggtgctcttcatgtgtaatattgaagtgtgcttcaaatcttgggttctcagaagattttttgtccttgagggatttttggtacaagaggataagatgtttcgggatgcggcagtctttagcgacatgagtgtcagatccacacctgttgcaatgcttgttgccattgctacgaggttgtggtgccttacccttcccttttcctttctttcgacccttgaatttgcgcctgttgttgttgcgtttgcgctttccagtcagattcttatgattattcgaagaatttcccttgaatcctttcttattctcagcattattctgtacattgaagtgcacctcaggtagtggagcagagcccggtgggcgctgttgggcattctttaaagaaagctcatggtgtctttctgcctgagtcaatgtatgtataagcagagaatgtttccagaaattgttagcgcgatactgttgagtcagtatcctgtcctccggaagcatagttggatagagttttttctatcttttctgcctccgttggctcttgttcgcaaaacttcaacctggaacaaatgttatgaacagcatggttgtattctgccacagttttaaagtcatgtaggcgtaaatgaacccactcataattagcctcaggccaaatgagttccttttgcttatcataacgctcttttagagctttccaaatgttgagagggctcgtctctaacatgtattcatgtttgagatccttgtgaatgtagagtctcaaaagaaaaagggctgtattgagcttcctgggctcaattgccggatccccatcattgggttcctcaattgtctttagaatcccccgagaggcaaaattgattttgatatcagaaacccatatgggatagttagtcccatcgagggcgagttcgtcgaactcttttgtttccatgtccctacaatcatggttaacattatcaatttacagaggtaaattaataaaaacatgatattaaggttgtaatctcaatgcgaaatgtaaaacttcatattctgtaatgtttcgaaagatgtaggttatggacctgacaatttttagttagaattcgaaattaggtggcacaatgtggataatcttcaagtaattaaacagtggagtagatctcttaatagtgggcaaggtatacttgctgcctaaaatacggtctccaggcaaatatattatggtgaatataccgtagccaatgtttagaactccactaccttgtgttcaaccaaatttcaaataatctcatttctcaaaacatattcttggaaaagaacacatgtgggtaatcatcgtgagatgtagacctctgtgagatgggcgaggtgctcgctgcctaagttatgaccagtgcggccaatttctagggctccatcgggtaatcatctcaaaatatagaccactttatgatgggcgagatactcgctgcctaagttatggtcgatatgaccaaagtataggactccatcgacatgtgattaatttccaagttaaagtgtgaagtggaacatgcattaaatcctccattaattatgttggacataattaagagaatttgctaaatcaaaatacaaaatttatagagaaagtagagcgtgtcttgaaataatatgcaaaaggcatgttattaagacaacaaataaatttagtgaaacaaggtatttaaataaacacctatgttaataaacacataacatcagtggtctataggaccattacataattgtttgtacaactgatgaactgtttcgactaaattacataaaatatagggactaaagtgaaattgctgctgaaaataaaaaataaaaactaaatttaaggggtaaatgggtggtgggcc

SEQ ID NO: 27165 - DNA, 17182 bp, Oryza sativa
  unsure (1)..(17182): unsure at all n locations
ccgccatctcccatccaccaccacctccaccgctgccatccaccatccgccaccgccgcgtccccctcattggccggcggcatgccgacgatcccgactccttatcggagtcggagaccggccggatccgaataccgttcccccccacgccgtttggtatcgtgcggctccgggagccgtggggaacagcgatgaacgtatgacggaggccgggacggcgtgcaacggcggctccagcgtggcgatgtgttggagacggtgtaaagagaggcggctcccacgtgcgcaccgccatggttccggtgcggccgaatcctggtgccgcgggagtgggggagcgtcgaaagctaggcgtcggttgcgatgttgatggaggtggggaaggagcggttggtggtgatggagtggcgacgaacggggccaacagcgactccatctccagtgggagttcacacggctcgccgggcattgtcatcaccgccgtccatccatggtaggcacaatactgtaccccttgcacaaggatccagcgaggtgcttcggcaaccggaggcggaggaggtgcgacagggatggggggggggccacaaccggagttgcaggcacacgacgagggtagtggcggcggccaccaaccctagccctgcctccgcgggatccccggcgcgtcctcctcatcgatcgacgaagaagaaggtgaagccggcgtgcgcgctgatggcgagggaggccgaaaacggcatccatgatccaatgaaaggtaggcatcgtaccttctttgttgattcttctgttcgcttttctattagatcaaaagcgatgtttcttcctttcacttcgcgatctccttcgcgagagcgaaagtgatgataacgtgttgtgaatagaattgattgagcgagagagattgagtgagagagagaattgcacacaagaatgtagagaatgaatgagcgatcctttattgataacaatggttacaatatatattcgggagagaggcggcaacagaagacgcgatggtttggaaccagcgcgtccgttgttagaatcgccgtgaggcgagaagaggtgtggggcacgaccaaccgtcgtgtcccagaatttatcgatgctctatccatatagattgatgagatcacccaaatatttcataacaatgggggctcgttggttcaaaaaaagatcagatccggtgttacggagcaaaggtgaagtgggctgccatttcccatgatttctggccagtgaagaataatttttctcttctcttatatttctgagagaaaagatgaacagtgtattttcaaaaaaaaaattctgctgcaacaccaatatcaaaaattcatattgatagtacaaacttgttgcaattttactgttgttttttatgtgcttttatctctcttttttctagagaagcccggcttctatatccaactggatatatgcaatattttttaaattgggaacttcgctcctatgaagatttgaacttaggatcctgggatgctactcaggtcactgcaaccactaggctgctcaggtcactgtaactcaggactttaggatgttactcaggtcactacaaccacttgagaaattgatgcgcttagtttgaggaatccgtagttaatcgctaagcatttaattaaccaccgtatgaacatagaaatgcctccaacacactctatcgggacttcgcattgcaggctggatgggatcataggaggaagatacgcttttgtcttccgcaaaattaaccacggtatctaattaccattttaaccaaccacttttcgtacctggcccaattttttcatacctttttataggtataccttttatttttgtgcgttagagattaagcgtgatcatgagctcaaaccaccgaagaaagtttcgtaagtcgaacaatgaaaacaagaagtttcgtaagtcgaacaatgaaaacaagactgatgagcagttggctcaacttgcatagcgcagatacatatataattacttaacttatgcttcactgctataatgaccgtcacagatataaccttaaaggtttctaataaatcatttgagtttttataatgtgtaacggttcgaagtccatcggattgtgattgtgttgggaactatatagtatgaaccattagtgaatagtcatcattttgaaaagaggttagagatcattagttctcagttcgtagttacgaatgtttgctgcttttatgtaattatatgcacacaatatgaatccttgcaaattaaacaaaatttgcaacaatatcaatccttggaaattaaataaaatttgctactgcctccgttccaaaatattgcaatataggatagaatttaatttatcataaaataatgtaactaaactgaaccgatttaacacattctgtaaccataaatctcgacataggttctatccagattcagtggcggatattgagcctaggcaaacctaataatagagaagaactacaattaaatccatacaaccacgtgcccgatttagcatagatcgagttctaatttatgaagaagacaaccaatgcacgaaattatattgatgaaatgaaactcgttaatggttaatgttgaatacttgacattatatgtatatatagctagtcattttgctagtttatgtgctgatccactgatctgacaaccattattggaactagttaattaaacatgtaatttgctattttactcaaatgtacgtggctgaacgcctgaacttgtatctaagtaattaacgtaaactgataactactgcatagtacggccacatccggcagagcccgggcacctgccgaggctagccgggtcctagctccaccactgtctaaattcgttattttaaaatgggtcaaatcttatcctgaatagcaatattttagaatgatagagtaggtgacactctaaaatatattatttggcgaaggacgatctaaaacgtaaatttgctcatggattaaaaaaaaatatgattctttgctacataacaccaccagcaatattttatcatttttggctacttgtgaaaaaaaaaaagagtaatgaacagaatgcccgggaaaaaaaaaggcttatcttatgtatccagttcgcccaatatgtcaattgtcacctctcttgaatctcttagaactgtaatcataagaaagtagctgtgctaatggctatcacaacgctcgctactacagcttcagtttttccacgtggccaaaatcaatattttcatgcggacgggcggaccgcctacgcccaaaagtctgcaaaattcgtatttttgcatgtggccagcgcaaccgcatgcgggcgcttaagccaacggccggcatgcgaataggaaaaatcgtgaaaggaatagaaattatgaaaaacaaaaactactcagaaactctaaccctagaatcctatcgttgttgctgccaccgtcgtatttgtccttccgtcgtcgccgaaattgtcgtcctcctcccatagccaccgctgacaaatccgcgcgggaataggaggggacgcgtgatccgggctggggagggccgctgccaccatatccaggttggagagagcggctgccgccagatcggcgcggggagggtcaccgccgccggattcaaagggggggggggggggtgtccnncnaccntnnccacncccccgtgtaactgtcacnttgtcccatcgccgttgncttttggggagcgggacccgcccgaagtgggtcgaaccgcccgcacacggccacctctttgtctgttggggaaccgctcgagatctctgagccggccgctgcccgccaccggcccctagaaggagaggagagaaagagagaagagaggaggaggtgaaaataatattaggaggagaggaggtgaaaaaatattaaagttgctgagaggcaaaagagagaggaggggagaaaaatttgtggagagggggtattttcgcacgtggaccatttaagaagcccgcatgtgaaacgtcttaggaggcccgcatgcgaaaataggctcatttttttatgctgccattaaaaggctcatcagagaaaatatgtttttgcatattgtcctcttaatgaagccatatgcgaaaatggaggttgattttttttttgttcagatgagaccaattacgagcccgcacaacttataagggttattggatgatcaatcttctccctaggggcattctggtcattttaaaattttgctctctccaaattaactagccagaaatgataaaatattttatgcggtatatatcttgcagagaaaaccatttcgatcagaatagggagcagccatgtttcttgctgatcaagctcgacagagggtgatttgttgctattttatttaaaattttgggtacttgacgctttccccggctctaaattgtcttcgaaggctagtaacatactccctcctgtttcatcaggttacagcacgttttgactttggtcaaagtcaaattattttacgtttaattaagtttatagataaatatagtaatatttataatattaaattagtttcattaaatcataataaatttgtcttgggtttaaagtgttactacttttttctacaaacttagtcaaacttaaaatagtttgactttgactaaagtcaaaatgtcttatagcctaaaacagagggagtagtagatatcctttactctattgttgtgttaaataatatttcaactatatagaataatcatttttaatcgatatttattttctagatcgaccgtttcacaatataagactttctggtattacccacatttatatagatgttaatgaatctagacatatatatatatatatatatatatatatatatatatatatatatatatatgtctagatgaatataggcaatgctagaaagtcttacaatatgaaacggagggagtaatacgtatttgtctagatatattaatagaattcactttatgtatgcaaattatcgacgggggataccagtagaccggatatagagggtattgaggtacgctggtacaaggatctacgtaatatgacatcaagaaaatagaagacaaggattatactggttcaggctcctcggaaggtagtagccctaatccagttggtatgggattatacagtgaaagccacgaattacaaagggaatagcagaactcgatgataccgacgagatcgtagtcgagttgatccgactagatcacccggtgacttggctcctgtaggttccgacttcatgggttgtggtcgttgtgttaactctgagattccatgccttaggtcatcccggggggtcccttttatatcgcaggttagtggtctccaagtaggactcggagacatcggaccctgcacgatacagtgacgacccagtcctatacgggtaggaatctttccatcagttaacttcgtgaagaatttgcttagcgtatacagagaacgtccgtacacgtgcaggtataccatattgccgcatagcgtatatccaagggtagagggtataccttatccgtaaccctgacacaaataatatattagattttatgcatcaacctaagtaattaaaacatcaatcatggtggatataacttattagtatatgcattaattaagcttctcgtctttcttttttcttttggaatatagatggatcgacgatgtacaattcaaaacgtggtaatgtagagtacattaaaggactcgtaaaatctataacgagaggcctttgatctggtcttacgcagcgacgcctagcacggccatccgatttagtcgagaaacattagagtttagaatttgagagaagcatcagagtgttagacatccatgtctttttcccttctcataaaattgtctctcaaattacttatccgatctacaatccggttacaccattatgttcgttgcaatgtaatctttacaacaagatatcacatgatcatattacgatgaaaaattgcaaattacttttataatatatctaaattacttttagatttcactaaattacttcttagacatattaaaagtaaattcaataaagtctaaaagtaacttacatatatttataagtaacttaagaaaaaaagaaagtaactttgtcatgtcattagaagtaaatatgttgtaggtataaaaacataactctatctagaaactaaattaatcagcagaaattatggaattgactaaaaacaataataaaagtaatcaccacgtaacattatgaatcaaatctaaaagtaatttatatatatgataaaagtaacttagtatataataaaagtaatttacaaacataaatacttttttcttcataatataatcattaagatctcgttgtacagatttaattgtaacgaacacaacggtgtaatcggatcgtagataagataagtaatttaagagaaacttgttttttgaaatttagatgggttacgaggatgcaagtggcaggtgctactgcttttagtaagaagggtaacaagtggatacacactgtactacttttggtaactccctgtagccgtgtcctaaaggactagatgcatttctcatcgcctttgaggaattcaggttgcaagtaaatgcaggcactactagaaaacgcattatcgccggcagtggaaatcggttttcgcaggcagggccgacctctgcttgtaagcaaacgacggtgaagatcatcgatcttcgcaggcggggcgtccgtccgcctgcgaagattattttcacaggtggacgttagctagattgatccgcctgcgaaaatatgtagaagccgactgcaaaaaaaaaacatccgcctatgaagataggtagaaaattttgaaatttgatacaataataatttgcccataaattacttttttattatttaatagaaattcttgcaggaagattattatatacatatattggaaagattatcaagtatttggtactgagaaatctagatatattgcataactgaaaagtgttgccaaaattatatatattacaatatttttttacattgtcacttcaaatacaccatctagttacattatggcatagtagtgctccactctcgaaatttcttgaattcgtcacttgtagatagggcaccctctgggtcgaaaaactctcctttcacatgacaacactcatggtggatgaattggcacagatcgcgctggacattcgtgatgcttgtattgtcaaagctcgttcgacgttctattcttagcaactgcatgcattgaagataaacaatatattagtatcataaatatgtgaagctgtctaatgcatagtatagagacttacatcctccgcgttaaccttgtacctcccattaaccctgaggaattcgtacgcgtaatacccgcaaaagacagttcctataggttgcttgtgacacttcaggacatatcataggaaaaagagttaaattttgcaattagtgaaacaattggaatacattaagtgagtgaagtattaccggccaatatgtatgtactagcagcttctcccttgttcgggtctgttcttcacccttgaacttgtagtagttgtacacactgtatggatgtcgtaccgtttcgcattaaggaggatatttaattataaaacattcatataaaaatgtaagagtcaatcacttactactgtaagattgttagaaattctttgtatgactggtgtatgtaatcgagagggtccaagactaccacggttccatccttctggtggatgattaaatagatataatgatcgctacatattaaaaaacaacttagttagttagtaccggctaaaataagacacatgtgtagaagttaaatgtaccggacttacttaaaattataagcggccatgacgactctcttattttgaaagtgcaagaaggctcgtccaatatactatgcgacaataatcactttctccttgtgcaagcccttcttgtattcagttatctcttgtggagtcttgcccttcagctgatctgaccctggtgctagcctcacggtatgttgtgtttgacagatccgagttggatccaagaagctgataggtttatttttcttcttagcatccatgtattgcatcctacagaagaagtttgttagagtaagttcaatagtatagccaactactagcttcaattcatctatagccaatctaatagctcattcatacaatagttacatactacactattaatacctggtcccacctgtcattcacacactgtgtcttggagtccgtgttacagctggctacaaatctgtagcccgctgcccttctctctcctcgtttatcttcttaaaatttgtttacagctggcttatagcctgctattgtacctactcttagtaataattacatggatttgtattgtacatatttttcatgtaattaattaaaattcatactcacatgcacctaacagcaacatagttgacgttcatcttgtcccgatgatatatggcatggagatcttcgaaatctagccatacgtaacattcgccgccgaaacaatctgccggtgatcgagctgttatattgcccaagcctttcttgctggcatccatgtagaaggtatgtaaccttctcatctcctatggtccttcgtaaagtgcccaatccggcaagagtgctttcccattttcgtatttttccgagcaatcatcagttggcaagtatggcctggctagtgcagcagccttctgggggtcatcatctctgagtttggcacgttccttaccccctctgaagatggttaccatgaacttctcattgttctcatctttagacttggagtcgtggctcataagcactttaggcaccttagaattgtcagtggccttctcagggaccggggtttcttgcacctcggggtctttcgcaggagaagggtcttcaaatatttctggctctgtaccgtcccattccaatcgtactacttcttctatatatgtcccgactgatgccacaatttgcacctctggttctgccactgtaatctccattgggacaacggcactacaatctccatgggcacctccggcactgcaatctccggtggcacttccggcactggattttccttatgcatctcgggttcctccgccttacctgtcacctgcctcttcggaggaggtctcggaggtttttccacccctagttttggcaccatgggttttcgcgtggcattggtgcacaatccaaaggatatgtcattctagtgctagagaattacaagttctgtcgcgaccgggaaaattgccttttcccgaacgctagtgtattaatccccgtcccaggaaaagccggggtacaccacacaaacatgatataaaagacacatctttattatatcgataatatttacattattacaaaggcacttaaggcctgacaatcaaaaataaacagcagcggactagcgggcctacggctccatcttcacaggcgctcaactggggtataagccaggactccacctaagacttcttctccaaatcttctcttactgaagggggaaaagattgagcaagaatgagtacaaccacagtactcagcaagccacaccggcagatgcatgattaatgcaagggggtacaaggggtaataatataggggttaagctttgcagtaaacagcatttaaaagttacttagttgcccaaagccattttataaagacgatcctagagttacacagtattattaatcaaggccgtgaaccctcacgaacctgccttaacctaaggcctacgatgattcagaccgaactggcaacccgaccctgggtcccagctcgtcccaagccaacccaggccaaccattccacattttagttgttgagcaaattttaagaattaaaacactgacttgggtacattgctcggcttgcccataaccgagggcgcggctattcgaatagattatactctgatcagaggtgtacatctttacccacaagacacatcttcctcacgtgtagccacgtgccacataccaccacggtatacagacggaagacgtgacatagtttccaacccatcctagccatagacaagagtaccgacccaatccccctacggccggaacctccgggacaggcaggcgggactgagccccctagcagcagggcaccaaccctgtgccacgacatctcgactaccgggccgcagctcgtgtagccttcatttgccctggagaatgtccatcgacccccgacttcatccatctccaatccgtgtacttttgtttataaccagactgagccacaaactaagccttacccactagacatgtggaagtacggtagtgctttgcaacagaggcctgagcttaatccttatagtggccggggtgctacttcccacaactggcatgcacccaaaccccaccgaaaacaggttttaggggttttgaaagaggaagagaggtgtatgtccaattccaccatcatccaacaattccatagtgtccaggtgatatgaaaattcccaaagtctaaagttataaaaccacctaatgttgcctagttaatcagcgaagcatctacctaaattcatacccagcgggcgcgggcggctgacagccgggccccacctggcagccgcggggcgcgcccgaaggcggcctcgccggtacggccgacgggaggcggctcgctcgcgcccctatggtcgccggcggcgaccaccggcacgacggagcagcggccgagagaggggagggaagggggaaaggaggcggcggtcctcggctcaccccgggtcgacggcgacgacggaaacggcggccgaagcgggagaaggcggcggcgcggttcgggtggacggagacggcggcgctccggcggtcggcgggcgaaacggaggagcggacgaggtcgacgaggacgcggcgaagccgatggaggcgatgccgaagcgggagaaggcggcggcgcggttcgggtggacggagacggcggcgctccggcggtcggcgggcgaaacggaggagcggacgaggtcgacgaggacgcggcgaagccgatggaggcgatgccgaagcgggagaggtccggggcgacgacggcggcgaaccggaactcggcggcaacggcggagagagaggacgacggcgcgggcacgattccgacggggagagagggcggcgagcggcggaaacggaggaggggggcgcggggaacgattaaatagagcggggaggggaaagaggcggcccgaaggggaagaaaaccggcgcggcgatctcggctccatcaatggcgccggcgaggattgcgggagtaaatccgaacgaatccgagggagagagagcgggaaaagtggggggaaatggcgagggaatcacggggagtaattccccccacttcaatgcgcgcggggacggcgggatgcggcggattcgtcggcggcggcggcactagggcacgggcgaggcggcgggagcggccggaggacagggatgacaggtgggccccacccgtcagcgagggtggcgggcgggcccgcctgtcagcggcgcgcgcgcgggggaaggccggatgggccgcgggggagaggagagagagggagggagctgggccgagccggcccaagaggggaaggggggaaaacagactttttagggtttttctttttataaaacctttttaactttgtttatttcttaataattattatttgtgctctgaaaattccactaaaatttgagggctgcttttagaccaaggagaatttaacaaaaattctccgggccacatttgaatttttcttgtacgtattttaatgtttgccaatttcttttcgaattttaattaattctagtattccttttagaaaatgatttttaattcgggatgaatttatcaggacgtgacaaatccaccccccttacaagaatctcgtccccgagattcgaggaggctagcaagaagataggttgggcggtcttctcttcttgtctgacttcttccgctccgtcttctataacaaacttgcctaacaaaacttctccactctggactgcttggctcgatctcctgttgcaggtggaatcttcttttcacctgactcgaaccagggtgcacctttcagctgacgcagactaggttgcggtagtttaatgatgcttccgttccagaacttctcacgattcatattttcggcgtcaacctcacacaagttatcaacttcatgtcatgtgtcgtaacctgcttgtcattactaggataccatgcttgtcatcatgagaataccatgcttgccgtttccttccagcttaccaccatatgctttagactatgatatcccgcttactaaggataccatgattgacaacttgccattaactatctcatattagctttcctggtctccggtgctaggtacttctgcgattcgatgcaagggtcaaccactctaactataagttctgcttcccaagagaaccaatttatcccacttgacatgctttgccgtcttcccgaatgactttgctgctggacttgttattgtctgatcgtgatcctgccagatctgaagcttcgttgttaggggtgattttaatctgacctctgtagactatcttcgaacatatcacttggttcataactgggaatagctcccacgaacaagcagctcggattcactttctttacattcagtttacttcccattattatcttcaggttgtcctcagttagcattcaacgtattcctttacacctttaaccttgatgtgttctttcccattggatcatctcccaagacatggcattacctggtaaccggtgcttgcacttttcaccccgtgtagcatctgataccgagttgaagatttcactccttgccttcatagaaacactcttacctaggtcatcttgcttacttaatgacaaggtgactgttgcggggcaattactatcaggggtcttccttgagcgatgcagagcatgtttttgtttatcaatcacctttcagcctacttctttcatgctagagaacatcgttgccaatctcttttatcaatcctctttcggcttatctctaacaggtggtattctttaatggggattgcggacgcttctggggacgatgaggtcctttggcttgctgcctttcagtgaaaccttgatgcggttcgtcaaaaagctgtactgactaccttcagggaaatacattgcttgctatctgtatccatgccactagggtttaattgccgatgatcatctttagtgcttcctcgggatggggagcatccaaattgttcttctgccatatcacctttgacccttttctgatacctgatagactaattaccatccatcgactactatgttctcaaatattgatgtctcctggatcttcttaaccgtttgcaggtatatccgaacttatcaatgtagaggcatggctggtacccttatgggtttcatccaacaatccttatattgatctgtaaaggcgtatccaaactcttatccccaactactgtctcattggctttttaacccaacacagtttaattggttttcttttccatcaacaggttggttattaactcgaggttagaatatagttcctctgacacgagaccctaggtctcctttgtcaataaacaattatacacatgatcacatatccgcatcttccaaaagaatcctcttagaacttgtctgtattacacattcctcccttattacacgaatacaaggcactgccttaaacaaaaagggaagatgcttatcatcggtacattgtatcctcaacatgaatcatccataaacatagcaagctcactgtttacagacatgaatatatttatttattacatgattgctgcaaactttcgattacgcaatgataagtagcgaactgaaaaccacaaacatggctgctcattttgactctggagagatatagctggcattgttctagtgactgcatccttgattggttctgtgatgatgtgataggactgcataatgctatcattcacaggagaagcttccgtctgattgctgtttgaagcggaggacggtcttctgcttggtatcgccctccggaggttgattgccctttgctcggcctggagtaggtcggggagagaaacaacttcttccatcgacgacaattctctgctgaggctgtcggcgcagagaatggttggtgctgaaggtattattgctatgattgattgcagagtcaggtgcagcaggaggagcattggtgctatggatgatatcgtcgatgttgctgttggagctcactagctgatgagacaatcgtagggtggttcgttggatttctgcggtcttggtcaacaacacactaagttggcaatccttgggcacatggtttgtaccttcgcacagaaaacatgtgatcttgcgggtgggacactcccctggtgggtggtcttcttcacaatgagagcagagtgtgagacacatgctagcaacgtgtccaatttctccacaacgggtgcatgcctttgatccgaagaagtcacatctgaaactcttaatccaaacaaatgtctctttggttgaccacttgattttcttcgccctcaatcactaggttattcgattcataacagattatgggtttacggaaatgagaccctaggtctccctaatcagcaacaaaatgtacacaactcacagcacttgcaatcttaacatggatccttcataaacttatcaaactccttcataatctcatgtttctctgttataacatgattgacgggaacaacaataaaacaaaagtatttgaacactgatataagagtattatgtttgcttctgactagcactaggcttagcaggtactgcatttgctccagtgaccacttggcgattggcatgtctgcttccttaacaggtgctaccgtttgtaacagacaataactttcttacgctcgggttcttcatcttgtacttgattttttttttggctgctgtgctggaacatccaaaggtacaatgccgctgtcttgtcaactggtggctggggctgaaattgagcattgacaccttgtggtaatgtactcgctggagttggagctgttgcaacgggggctataggactgcttcgggatgcatggatgacaattcgctgaggagcaagcttctgattgcagggagttgcgtggactgacgtgccggcagctatgtttctcggttttggccacttgtcggcgaaatgacccattccttgacaattgaagcaacagatatcttctcggactcggcattttctttcctcattttgattcctctgtcctggcactgaagttaggctgaaactgtaatcttggcgaggatttgtgttgccttgatgctgctctccgttggaactggcgggttggctggccatcctcttcgtcagcagaaaactgaattgacaatcttttggtacatgatcagttccttgacaaaagaaacaagtgatcctgctcattggacacctgtcgggtggatggtcttcctcacaatgaacgcatgtagtggcacacgagctggcaacatgaccgatttctccacaacgagagcatgccttacgttccattttgttctggttgaaaccttggggagacttctgatcttcatcatctgatgagacttgatctgaatcttcactatcagacactctacctccattagctaaaagatgctctgtcaactgtggtgcaccccggaaggtatttcttctctgacgttttgtcattcctggtggaggccattctgtgctggtaatggtcatcttacgtacttcttcttcagttcgcatcggtgcttttctcctctgattcttactcttcttgcctttggcttgcttagtacgtgaccccacgtggtacgaagggctaggaggaaagcaattcccgggattcaatggattctcttcattgggctctctgctttgcacactaggctgcaagcttgacttggtgcgaagaggctggtttagcgatgtctgcactgttaaaccaagggaaggagcttctttggcatatacccatggacaattcagggcatagtgtccttgctctctacaatcgtgacaaaaggggacatcctcttctggtattggaagctcatcgacctgggtggcaaatgctcgatcaaacacatactgattttggtcttgacttccaaccaatggtagctgtggactaagcagcatgcttggaatggaccaagggtgtgcccttgttaactctcttgaggctagtggtggattgagttgaaaacttgagttactggaggcatacccgctgacattctttcctttttctctgttaaacatctgttacagggattgaggtgagagaggaaacaagccaggaaagaatagaccagaactagggacaggaccttaaaggaactaactcttcttgatgatgtgttgtttgtttcacttattctgcaagttgattaagcaaacaacctagcatggttacatcacaacccaccgatgcaaaccacgcgctacacacacaagcaaggaacacacgactaacaacactaccctatagggtggcttaggttctgcgacgggttctccaagattttcactgcttctacacagctggcttcactgcttcctccacttcgctagcggaccctgcggtcttccggagcttcggcagacaattgacgacatcttcttcttcgcaaagctgaccatctagtactagttgaaatccgaagaaggaagaagggagtaaaccttttgcaaatagcattagggggaggagaaaaaggaactttcgcaaatagttttatttataaaatatgtccttaggttttatcctcttggcttatcctacagtcgagatggctctgataccagcttgtcgcgaccgggaaaattgccttttcccgaacgctagtgtattaatccccgtcccaggaaaagccggggtacaccacacaaacatgatataaaagacacatctttattatatcgataatatttacattattacaaaggcacttaaggcctgacaatcaaaaataaacagcagcggactagcgggcctacggcttcatcttcacaggcgctcaactggggtataagccaagactccacctaagacttcttctccaaatcttttcttactgaagggg

SEQ ID NO: 27166 - DNA, 13270 bp, Oryza sativa
ctttttagggtttttgtttttataaaccctttttaactttgtttatttcttaataattattatttgtgctctgaaaattccactaaaatttgagggctccttttagaccaaggagaatttaacaaaaattctccgggccacatttgaatttttcttgtacgtattttaatgtttgccaatttcttttcgaattttaattaattctagtattccttttagaaaatgatttttaattcgggatgaatttatcaggacgtgacaagttcgaccatatccccaagtacggatacaccatctggagtagggaagtctatgtcgtaggactcaaacccttcgtggaccaattgcggctgcactttggcatatgcatcgggtatgaactctttattatatgttctcccagggatagcaatggttgtagcggcctcaagagttttcccagagcgtcaaatgagaacgtgcaatctgcagggtgtattctccttgaggtcatcgaaggggtaatctggctcaggttgtttggttgcgggggcaggcaaaagcatgtgcttgacgcagaaattcatcatttgcctttcaaaatctgcagccccttcgtctcttagtttatccttgtacgcatcacgcttcttgtggggggtcatgtttgaacccttccttccaactaagcttggacgatgttggtatttcttaacgacattactagaaatataatctccagcaatggtgcagaaatacttctggtatactatggttatagacttcattcgcaagcgcacggatataccattgtagcatttcacccgagagtattccaagggtatcgtatttattttatcccgtgggaagatcatgtagagtgaacttaactaataatttatatattacttgtgacaatcatattctaagcaggggttaagataatccaagggtagagtgacacacaagcattactactaatcctcataataaataatctaagctaggtggaaagaaaagagaaagagaatctattcctatacttctaatatacataacatacatacattctagttaactgatatactagctaataccctctatccgatgccctcctggaacttcgagaagccacccctgactgccgagttccttacgacccccgtcatgaccatccaaccggggctaaatacggaggagtaccctccccaggaaattaacttaggattatatataggcgcggacgaatacccgtactgagctatcaccatcagcggcccacctctcatccgcaatatataaccccaaataaagatatcccgtaatctagacaacacgtctaaactaccagatactactataatatcatcgtcttgacatagagcaattgcataagcaaacactatacccgcaccaaagcatctcccagataagctagcagtatattcagtataacatgaacataatataaagtagatactaatgtactcggaaagtatttcaataccataaatgtatatagaagagtattctaataaaagtgcaaagcttacaaaagaggaaaggaaagctactagagccatacccgaactcttccgaaggcttccggactcctgattacttttctaattatattccaccagctagatactacaaaactaaacttgagaggaatgagagagctcttgcttgaggtgtgtgttgaagtgaagagagtgagctccttatatagaggtaggtatgacggttgtggaaggggaattgtccgaaataccctccaaccgtcattggggtgcaatcttgtacgtccatgccaaaccctagcctcaacggtggagatgggggttcggccgaaccatgggctggcccaaaccagcccatcttcggctggcgacttcctctattgctccactccacagacttgtgaattttggcccaatccatcgtgtcaattctgagttcttggcccattcatgcataagtctggttctcgacatcgtcgattgatttatcgtttgtgttgatgttgattctccaccactttattgtcattctctgcaaaaggttagtaaacctaatactagtggaatattattattctaacaaacatatgcattgcaagcatcactatttctcctctattttggtaatattgatggtcgaaactgatcgataacgaccgtcaacagacgacacacctcgaaccctaccctctatgctcaggagtacctagtgccgtacttagcacatctttctccctcttaggcttgaaagatcctttcttctgtgcactggataaattctctcttttatcggcaacgccctgcagcttcggatcttcaaacgatactttgcctttatccgtgatcttaggagttccagctcttacccagttcctagatctctatgaccattcctccattggtaccggaaggcccgccttccttatttcgtcctcctcttttgtccactgtgtcagggttatggatatcacatacctaatagtagttgactaaatctcggcaggacttaccacataccatgtcttatacggaaactaacctcggatatggatggagttccagataaggaaagacaaccagagttccacatggaaatgacaaggactacttggattgtatccatattagtttccctagttctacttagaaaaggggacacctatgggtataaatacaaggcccctaggaggagaggagagacaatcaacatacacggacatacacggaataatagatcaagatacgagatcaacatacaaggtaacatatgccaagacaagccgccggatatcgacttcagagataggtatggctagtcccctacggtgtctccggatactgtcaggagagacatagcgctgtctctgatctcgctgggcacggattcgaggaggaagactaccctgttgtcaactatgagtcagatcttcagaccgccatgtcgacaacagttagataggctaccccaaatattgtactggtgtgattatggcgaataagagcaacaaccggcttcggccaacaggatgtagggctattacctgacaatccaggggcccgaacctgtataaaaatccttgtctccatctcttttacctcagtctcgcttatatcctagtaccaacgatcctcatactatgtaaataccggaatcgcgacatcaaacgtcgacagtggcgcgccaggtaggggatcttttggtgcttcaaggtttcgacgagatgggtttaagagatggattctccgacaacatactactcgataacttcggctatggaggatctaacctgaccggagtccgtgccccgacatgatcgggaccatcatcgtcaacaacttggtctatcgagatcattcaagcctcaagctccgcggcgtaccaaaagatgtcagatcacatgatatcgaacgagtacgcagcaaggtaattaggagattgattttttaaattaatctactaattttgtacatattctctgctatatgtcttgccttatagaaaatatttttaggaacaattgagcactcgagtaggttgtggtcgagtacaccccattatcgagaacgatctcgacaaatgcagagtcgtcgcgcccaacctgccaacgaagaccgacgacctatctcatagcaccggccatggttggactactcgagaaaaggttgttaacggataattcctcgcgaacgtcgttggcttgatcacccgacatgattgcaaacggacatccggatatgctataagttgggtatgtgagtcatgctggccacatgagatgcacatgtaataaaccaactctagcacctccattggtgttcgagagataattctactcgctggttcttgaaccagtaaaccgtagcaatctctcgcaccgcaacttccattggtgttcgagagataattctactcgctggttctcgaaccagtaaaccgtagcaatctcacgcaccgcaacctccattggtgttcgagagataattctactcgctcgctggttctcgaaccagtaaaccgtagcaatctctcgcaccgcaacttccattggtgttcgagagataatcctacgagctggttctcgaaccagtaaatcatagcaatctctcgcaccacaacatccattagtattcgagagattattctacccgctggttctcgaactagtaaatcgtagcaatctctcgcaccgcaatttccattggcgttcgagagacaattctactcgctggttcttgaaccagtaaatcgtagcgatctctcgcgccttaacttctgatggtcaaggtaccactacggcaatagcgtagcggtcctcgcaccacgacttcagacgacttcagatggtggaggaacagctatgattggtcttcgaccggcagcgtagcggtcctcgtaccacgactccaaatggtcgagagacacctactcactggttctcaaccagtcaatcgtagcgatctctcgtacatttacttcaagtggtcgagttacgactactacctggtcttcgaccagagatgtagcgattctcccactatttccactttaagtgatcgagttacgactactacctggtcctcgaccagcggtgtagcgattctcccactacttccactttaggtggtcgagttaaggctacacttggttctccaccagcggtgtagcgattctcccactagttccacttcaagtggtcgagttatgactaccatccggtcctcaaccagtggtgtagctattctcccactacctttactttaagtggtcgagttggggctacaactggttttcgaccagcggtgtagcgatcctcccattatgtctactccaaaaaagttgatatcaggtacacaatatcgccaagtgttttacccagagatcccttaccacggcgacacctagagttgaaaccaatcctactgtccctttacgccgttctgacaaggcctctaaggaacctaagggaacttcgactggggacgcccagagtggataaggccttgtcggatcatgtagagacaaacgaccatgtaagacctggtcatgtaagagttctcgccgtgcgtattaaccaagccatgtaatccgaaattgagttttccaactagacggctgggggctagggtcagtgcctttttgaaccaaggcaggtcaagggtccaagagccttatcctccgagaacaattctccgacgacaaggctgggagctaggaagagtgtatgactcaacaaactgactgatcaaagtcggtaaaagagaaaacgctcgtacacaaaacattggtctgtaaatttaattcatttttagttttccaaacatattataacatgtcaccctttgagcattcgctcgggggctatttctatttaatattcttttctaagtattgatttccggaaaattctattcgacattgttgaagactcgatgtctctatggttctacaccacaatcgactaaggcgagtacgaaaaatgttgacaagcctccgtcgcagattctgcgccttctccatcactcgagaacggttagtggatatcgacaaggaatacggaatgaagaaatggtgtactcgccgagacaaagtttcttggtttcaatccaaattctctattacagtaagacgggagacttagtcgtatgctctgtgctttcttggttaacgtcggagattgactcagacaaaccctataggtgcccgcacgaggctgataagggaagtctaatgttatctctgaactcaccgagaacggtcacgtgagctcgataacagttactccatggtctgtagttgagaatatgaatttgttcatttgcattgaagtcgggggctactgtcagggttatggataccacatacctaatagtagttgactaaatctcagcaggacccaccacataccatgtcttatacagaaactgacttcggatatggatggagttccggataaggaaagacaaccagagttctacatgtaaacgacaaggactactcagattgtatccatattggtttccctagttctacttagacaaagggacaactatgggtataaatacaatgtcccctaggaggagagggaagacaatcaacatacacggacatacacggaacaatagatcaagacacgagatcaacatacaagccaacatacgccaagacaagccgccggatatcgacttcagagataggcatggctagtcccctacggtgtctccggatactgtcaggagagacatagcgctatctctgatctcgctaggcacggattcgaggagaaagagtaccctgttgtcgactacaagtcggaccttctgaccgccatgtcgacaacagttagataggctaccccaaatattgtactggtgtgattatggtgaataagagcaacaaccggcttcagccaacaggatatagggctattacctgacaattcaggggcctgaacctgtatgaaaatccctgtatccatctcttttacctcagtctcgcatatatcctagtatcaacgaacccatactatacaaataccggaatcgcgacatcaaacgtcgacacactgctcgaccattggtgcgtatcccgcgcagcctaagcagtgaggaaatctgttcttcttagccaactctgaaaactttttgctcctttcaattccttccggggagttcttcagcgtcacagagtcgacccactactttggggttatgttggcatacgtcgaaaactgtgtatggcccgtcttcacgaatttcttgttcaaggtatttttccaaccacgccaggagttgtccattgtttgcagtgcacaattcctcactgctgcctctgatccatccgggaactggaagattttcttcaactctttctataggacttccttatccccatccgatatatgaccccagtccttgaccgtgatgggatcttttcccttactattatgccacaccgtgaactaaatttcgcacgtgcattcttaggggcgagcggctctccttttggcccaacattggtaacaacatgaaacccttcgtcctttctatccacgcttatcttgccctttttttcttcgcctttgctgccggttcgcttttctttgagcaggtggtcttagctgggacctcgtcgtctttcgacttatcttttttctttggctgccgttttgatcgccgtggcgccctttcctacgagaaggtatatatcaaagtttcgaattagctcgggctaatagttatcagtcgaacagtttacatattaagtgtacttaccccttctttagggggaatgtagtccttgtcgcctttttcaccctcgccctttttccttctcttcgggcttggacaaggatcacttggcgacgagtactcatcatcctcgtcagctatgtcgctgtcggaactatctgtcggctggaccgttggttccggagcaaccacaataggaagggacggctcttcctcccctaaacccttctcttcagtccctttagtaccattggccatcgtttcgtacttctaacataaaaaacaaactgtatattaacaatatgtcatatgaacaaatttaaattctctgagattgccatatattaacactctacggaaatagtttaaaaaattgataagtagtgtactatgacataacttatcatatgttatattaaaaacttgtgtacatagttgcaaaatgtaataataaaaacttgtgtacataattgcaaaatgttataaattagtacaaactaatttgctaaattagtacaaacaaatttgttcaaaatttgatatgttattattaagtagtgcactaattcacaattacatttcatcgacatgttgtttaaaaagaaattaaaaaggcgaccatatcctccacatgttataaaaaaaaaattgaacatatcctcccacatgttattaaaaaaaattgacaaattcacatatcctgcaaaattgaacataccctcccaatttcattcacatatcacccacattcccaaattcacattgacaatcaacatataacccctcattcacatatcacccacccctcgttcccattcacacccacatgcacacacacatatatagcccctcacagccacatgcacacacatataaaaagaaacacccacatgcacacacgtccgtggacaatgaacggccgacgacgaggttcggtcgtggacgacgacggaagggccgacgacgaggttcggccgtggacgccgactggccgaagacgtcgttcggctgaggatgacttcgctcgtggacgacgaccggccgaagaagccgttcggccgagatcgcgactgcgagagagagagagagagagaggtggcgccggcagtggtggagcggctggcggcgaagtgcgggcggcggtggagccggcccccgcgggggtggatctcgcgcgtggtgagcggccggcggtggagcggtggcgcggagctcgacagccgacggggtggagctcgacagccggcggtggagctcggcggccggcgcggagctcgactgtcagcggcaaggacctccacggttggcggcggcggacgacgacggtctgcggcggcggaggatggcggtcgccggcagtggatgacgacggtctgagggcgatggttgcaggcaggcggcggagaaaaaatttggcaccctgatggcgccaaaatttctagggttcccgcctggacatagaaattttggcgccgcgggcttgcccttatatagggaaacgatcttcgcgggcggacggtccgcctgcgatgatgtaaaccctactcggcacaataatctttgcaggcgcaccgcccgcctgcgaagattgttacagagctgactatatttatttgaaaatgttttctaatttatttttgtaatttgaaaatgtctacaatagttgtaataaaaatggtaattgtacatacaagtatacaaaccttaatattagtactattcaaatgtaaatcttacttaaatgtttgaaacattaatattactacttttaattttttaaatagttttcaaacaatggtaagtgcacataaaaaattgctacaaaattttgaaacctcttttaaataaacttttaaaatataaaaaaactgtaaattttaccctacaaatggtaattgtacataaaaattagtacaaactaatatgcaaaatgttaagtacaattgttcgtcaatttgcaatatgagcacacatatccccttacataccatcattacataactaagaacatcttagatgcttacgtgccactcaacaatcattaccctttaacatttttgcccacaccgtccgtgcgcatgtaaggtttcatggtcttctgagtacatacctcaacatgcttgatcttttgtacaaactgattacaaagtggcatactatcgtattaattgtaattttcgatatcttcgaccccatccactcccaatatcttttgttttcctggtagcactatcgttttcttcaaatttgaagggtctttctcataaaacacttgtgccatgcgattggtgagtacccaagggtcatccttgtgacccacactcgtaaggtcaacaacagtaagaccaaacatatcaacattgaccccgttcggttattttacccactggcacttaaatatggggaattgcattgtgtgtccatagtcgatttcctatatttcttcagcaaacccgaagtatgattgtttttcccccgcttcatcaattgcctccacacggatactgctattttgcgtacaggtcttactatctcgggctcttgtactaaacgagtatccattaatgccatatccctcccaagaatttactgtagttgatggaccacaagccaaccgcttcatagttatttcatcggtagtttgtccctcaggtaagtctaggtctcgcaaccaatctatgaagagacgcttgtgttctttcattatccactcggttgtgcgacccttattgttagctcatagtagttcgatatgttgatcaatgtaaggctcaacgatagcaaactgatgaagcacgctgaagtgagcttcttgaaatgatttgtgatcatgggtgacgaatatcttctttcctatggttcccctgccactcaatctgccctcgtgtcggggcacaggtactccaattttatttccatctttgaggtaatcgatacagcactcgacaacctcttcagtactataaccctcaaccattgatccctctggatgtgcacgatttcgggcgtaacccttcaaaaccgccatgtaacactcgtatgaccacatttgatggaggtacaatgggccaagcgcaaccatctgcgacactatgtgaataatgaggtgctccatcgtatcaaaaaatgatggagggaaacacatctcaagttggcactgtgtctcatgtgcgaatgtacagagatttgctaactcttcatgactaatgaccttctgtgacactgcgttgaaaaagtagcaaaaccttgtgatagcaacatttaaaagttccggttttatggcccttattgtaattgcaagaaacacggtgagcaagacatgacagtcgtgtgaattataaccagataccgacaaatcttttatggaaactagtcgactgatgttcgatgagaaacctatgggcactctgacatcacggagtgatttgcaaaatgacttcttctcctcaggtgtcattgtgaaacaggctggtggaagatatactttgccattgttctctccttcttgagggtgtaactcttccctgattcccatctcgactaggtcaattcgtgactgaagaccatctttagtcttcttcggcatgtccaacaatgttccaactatgttgtcaaacacattcttctctagatgcatgatgtctatggcatgccgaacctccagatctttccagtacgggaggtacttaaagaatatggaatgcttcttgaatgggagagggagtttatcatctagcttcatactatcatctagcttctttctatcctctggtttcttagtcttctcgggtttcttgcgctttgtcccctttgatggtttcttactaacttttccaaattcacaaatcattttctctgtcattgcaaccactttttcccctgatgtaggttttttgtgtaggatcactctcttcggtgccatcgaactccgccttcatcttgcggtacttgtgatttgtgcgtaggaaccgccggtgccacatgtacaaaagcttgttggaacccgggagatacttatagtacgttccattcaagcagatcacacatcctgtttttacctttaatttgacctgaaactgaaaacattgctggataatcgttaatggtcacgaagatgatggccttcactgtgaagtattctcttaagtactcgtcccacattttcaatccctctttccataaatcagccatatcttccaacaatggttcaagaaatacgtcaatatcaataccaggctgacggggtccctgtatgaggatacagagtaatacgtattttcgcttttgacaaagccacgtaggaagattatacatggtgagaagcactggccatgtactatgtgagctgctcatttctccaaaaggactaactccatcagcactcagggcaaacctaatattccgtcggtctttagcaaactctctatactgagcatcaaagtttatccactgacaagcatctgccaggtctcgaatcatcccatccttcttgcgcccttcttgatgccaacgcattagttccacatctcgcggatttgagtatatccatttaattcgttctttgacaggaaggtaccacatcacaagctgcgggatttttctctgagttccctcagttgtatcagacggttctaggccagtattgctattcgatttgtaatggctagcaccgcatgttggacattcatctaaagaagcgtattctttcctgtacagtatgtagtgattaacgcacgcatgaatcttttccacaccaagtgaaaggggacatctgagtttcttcgcttggtatatgctagatggtagtgagttaggcctcaggagcattttctgcagaagttctagaagattgtcgaaactactatcagttcaagaactgaccgtaatgttgtgaactcactgtcatagccctttgattcatcgtacaaaacttccttagctgccttctgtaaagcttcaaagttatttaaacctataaccgaacccattagcacctcgggttctggatgacataacatttcatctagatcgattttgtcctcacctgaaccatcgtcatgcaccatgtcttcaacttgtgtcggaactacattttcaggcccgtccacttgttctttgccatggtgtgtccatatttcgtacttttccataaatccacgagttactaactgctccatcactttagaagcatcttcccaggctatttcattcttacagtcagcacaaggacaaattatcttcctcatattgttcttttcagcgtgtgccttcgcaataccagtaaatttagacacttcatccctatatggagacaaaaacctcggccaatgatacatctattgccgcctttccctatctctaaaaaaattaacataaaagatttgcactattagtaccaaatttgtagggtttactaaaaaaacatatcgctattcaaaactaactgaaggtgaattataaattcgtaaaaaacacaaagtttatttcaattttttttacacagacatgccaaattagtatattaggaaaatctaacaaaaccataccatcggcatattacaaataatacaattatttttttgattaaaccaaataaatagacattaaaaattttgttctctctcatatatatatgtctacatctagatctagatctaggaggtggatgtgatagcaaaataaaaaaaaaagagaatttatgttactacattaaaccactacaacaaaaggcatcaagtattacacatacatctaacatcaacatatcaaaagaaagtaaataaaaaaatggagcttttccttcactattttgcatgcatagatccatcacaaattgaggtctaaaagcttaaaaaattgcatacctagtgtggaaaagagtagatctaagcaccgaagaaaaatcccctgaagatttgaagttcaaaagctccccctatatttaagtcactttaggagagagaaacttcgggagaatgaacagggctcagaaaggaagaagactatataggggcattatt

SEQ ID NO: 27167 - DNA, 21696 bp, Oryza sativa
accgtcccctcctccccgggtatcgtctttgccggcggggttttgcctccgaaggccatgcccgtctgcgaaagtggaacccctacgtcgtagataatgtgttttctagtagtgagggttcatagggtgcacatgccttgattacaagaacgggagatacgttcctttagaagaaatccaactacggtcatatggtttggcttattcagggaatatgtcaaatggtgtttttgcaaatgaaaaataattttttgaagaaaacttttatatacgtgtccttaacgacctaaaagtaaaggttgaaaaataaatttcgatcaaaataccccaaaatcaatataaagttaaaaattgaaatttttgttgctaaccataagcataagcgaaaagatgagacttcaagcataaaaataaaataaaatttaatgttaggtttaatgtaactaatctggtgttataagaattgctacatctccctataattttgatcaaatatataagagtttaactcagagaaaaaactcaaaacatattataagacataaaatgaatcggtattgtaatcatcaaaaggaaaaagtaaggtgatatgattttataagagaagaaaaggagggagataattttgaccgtagatctattatctatgggttaaaaacaattaaggcgatgtagcttaacgagagaagagagaaaaatcgtttaactacttagtgcggataaactttatggatatacagaataggatttgctatgttttgctatgtgatagtcaaacatggtgtttggtgaaggacgaggagagctacaaattggacgtccgatgttgtaaaaacatcggatggtcaaatgtttcagttgaccattggtgcaacattaagttatacatgatgaaaacaaaaaaaactctgaaacatacataaattttgtgaaatacaatgagaacacattgtgaaacgtatcgttatcacgtatgaaacattaagtttttattgtttgaaacatatatttttctttcatcataatataatcattgatatcttgttgcaaagattcaataataacgaaatcaaccgcggggcggggaggggggggtgagcgtcccatactttttcggttatacgtggtgaaatagaaaaatatgttattgaaacatttaatttttttatgaaacataaagaaaacccatgttgaaaatattgctaccgcatctgaaacatttaattttaacagattgaaacatatgtttttctttcatcggaatgtaatgatgtgatatcttgttgtaaatatttaattataacaaatataatggtgtgatcatatcatagattggataagtagttcaaaagaaaaattattttgaagatcattatagcatttatggatgtgtatagtggatagggaggaagtaatttgcctgtccgattttttctgcgtcatacgtatgataccaagcatttccggtgaaggacacacgaaaaatgtaattacgcccatggattcccaaaaaatgtcattctttgccacagaactccacctataatactttgtcatatgagttttatttttactcctcatccctttttttatagtagaaatgaaaattatggggagttcatgtggaattaaattttagggttgatttgatccatgccattgcaaaagtgagtcattgtatttcgtctatttgtaatcgtgccactcaaattttacaaaattcgaaccatgcaatcgtcgtcatgttttccatcttcttccccatctgcacgtggggcacacccatcatattcatcttcttcctccatcctcccctcttctctttgtttctctctccaccacttcttagtctccacccgaccaatccatcccgacaccctctgcaccgcggagtacgcctgcgccctcaccaccacgggagtccacgcctaagccctcaccgccgcaggagaccacgcctcacacctccgacccccgttgcctactcaatcgttctaagaactactcgatgcttgctgcatggcggtggcggcgagttcgacctgcgcggctgggagaagcaccagtgattgcgcagcgacgacacactcgcctacttaaccgacaacgtgttgcagcgaggtacactaagcttgctctgccgttggcggtctgttgctgcgggcggcagggagggagttgggatggatgtacgtgtaacgtgcagatggggaaggaaatgaaaaacatgatgcgatggcatagtcccaattttataaaatttgagtgacatggttaggaatagacgaattgtaatgacatttacctaaatatgcacatttgcaatggcacagatcaaattaaccctaaaatttaagtgatgatgtacgactgaatttatctcatcgtacttaaaatgggaattccctcccaatacctacccttacacatgtattgaaaaaggtgggagctgctcttaaactctcaatcccaatccctcataaaactcccacatccatcaaccaaaacaatagactaaacaacctccacccttcaaactcccatcccctcttaacaattccaaatgcactgatcttgtaaaatactcaaacgagtcacttatctttttttaatcacataaaacatgtgtcatgtgaggagttctctattaaggttgatgccatgttgatttatttggtaaacatggccacacacaatcctggattgtcaatccacaaataagccaactgcaatatgattatagtaaaatccaattttaagatgaattatattattgcttgctaagtttctcgaaagcacccaaatagcagctagcattgatgaaaatatggtggtaatttgtaattcttttacttccctaaaaacatataagcttatcctgcccatatggctcacaatgcattatatttggctggtatggctgtcaattcgaaacaaaacaatagatgtgatatgtattttataagatttgcaccggcgaaatgagatgagtgacttaactgagcaatttgtaaaataagtaactaaattgcacccgcctcgcaatgagtaatgacaagtttatcttatgtatcgttctgcctaaacaatgtcgtgtcacctgtctcataaatcattttgggttattcagattgatgtcattttcaaaccatactattttttttaagttgctaaatatatacatccatttagttattaccaaactctaataaatacataacaaatcttgccaaaatttgacaatattactaattgccaaatttttggtattaccaaaattataaggtttatttttgctacaacctaaacaaactcttttaactgtaaccatgaaaaagtggcggtgctaatggctaccacaacggtactgaatggatgaggggggggccttaatgggcgattgatcgccaggcgatcgcccaggcgatcggatccggcccccctcctcctatactcctccctcctctcccctattcctcctccccttctcctctttctactacagtagactacacaaatttttttgaaaaataaaagttagaaaaatttatgtatagaaatactatatataaaaaatttgaattcaaattcaaatttgaatcgggtatgtaaacttttgacttataaactttgggtctataaactttaggtgtataaagtttagatgtatagaaatactatatatagaaaatatttgaattcaaattcaaatttgaatcaaatattattcaaattcaaatttgaatcgggtatataaactttaggtctataaactttaggtgtataaactttagatgtatagaaatactatatatgaaaaatatttgaattcaaattcaaatttgaatcgggtatataaacttttgacttataaactttaggtctataaactttaggtctataaactttaggggtataaactttagatgtatagaaatactatatatataaaaatatttgaattcaaattcaaatttgaatcggatatataaacttttgacttataaatttttggtctctaaactttagatgtgtaaactttaggtgtataaattgactaaaatagaaaagtaacgcggtgccaaaaaaggaaacaaggtggaaaggtggagggagggaagggggggtgccagggcgatcgctcgtcaagtagcattcccgatggatgagcacgctgcgtcctaggggcaatctggttattttgtattttttttctccctcttgaattacctagctagaaatgataaaatatttttggtggtgtctatagaaaaaccacatcgtttaggtgtgtatgtgtgtatggacgaagccatatttttaaggggtgtttaaatctaggggtgtaaaattttagcgtgtcacataagatataatatagggtgttcctaatttaaaaaggctgcatatatctggtttgatgtagaggccggataaaaatatctttctcaaagaaaaaaaaccaacgaccttatgttacgatccatcttccttacaaagttgtcccaatgggggctttttgcaacatgtgtttcctacgaaattatacttgtttgtcaaattagggtctgtttagttcgcgaaaagaaaatttttaagagtcacatcggatatttgaacggatgttgaaaggggttttggacacgaatgaaaaaactaatttcataactcgtctggaaaccgcgagacgaatcttttgagtctaattaatccgtcattagcacatatgggttactgtagcacttatgactaatcatggactaattagactcaaaagattcgtcttgcgattatctcttaactgtgcaattagtttttttatactatatttaatgctctatacatgtgtccaaagatttgatgtgatgtttttgggaaaaaaattttgagaactaaccaggccttaatccatagaagaatctatggattaatagcaccgggcatgaaaacggtgcatttacgcactcatgtgactgctgcaacggacaataatcaaaatgaatgaaaaaaaaatgaacgataaggagtttactaacaggactataattcgacaagctggtgtgcttattcttgtccgtattgtcattgacttgtcaacaactagttattgtacatgcatcctatgaccacttagattattgcaacaagtacttgtcaggcccagcttgcgcctgtaatgtccggaatctcgataaatttatcccgtatatagcgcccctacgtcggccggcccgacgactgtaatatacagtcagtcaatggtttcaccaataacaatgtatggtatactgacgtttcccgggaaaaataaggctgatgcaacggagggtaaaagggtcccaagcgtgcccacagccacaggaaactaagagcatcccaacagcattccaaaatttcatccccaaaattttgttttccaaaatcctaaaagaaatttaaggtgtgaaaataatcatctctccaagagatgacctataactaattctctataactgaaaagtggaccctataaaagctaccaacaaaaatctgtttcctccctcctcccgcaagtgatcatgcagcctcgacgcttactgtcaccacgatcgcattcacctcccatcccacaatgttgctctccccccgccacgatgtacttctgcatattttggcctgcagtgtttgtaaactaccatctaaatttgtacttgtaagaaaatttctcagtacaaaatcaacaatcagattagtacaacatccgcatttcaacgcgatcaacccaacaacatttcagtagaaaattatctcagtccaatatagcagcaagcaaaccaacgtaaccagtaagcagcagcagccagccattacgagcaatggctgcttctaggatcagcatcagttcaacagcggcagaagcagcaagcagcagctgtagaccacacgggtggagaaagcgtttgtagtcccggttcgtaacccctttagtcccggtttccaaaccggcagtaccaatccgggactaaagatcgctatctttagtcccgggtgcaataaccgggattaaagatcgagctgacctttttttttttttcatggccctgttgctgcatggttatatatatatatatatatatatatatatatatatatatgaccaaaatatatatttacattaaagaaaatgtgtacacatgcatatagaaaaatagacatgtattaattacaatccattatgtcctagctagctacgatttcgacgtagtagtagtcgctatttcagaagctaaggacctatgaattgtatttctgtcgtagtagaattcacccttgggatcaaggatttgttcgttgatgaatcccatgagttattcttgaatcgccgcgataaattccttgtgtgtgatcaggttatccctcatgcgaataaactatatgaatgtatgaaattaattagtaattaaacaacaagtcgatatgtaatgaaattttgaatttatttgtacgtacatcgagctctcttgtggtgatgatttggtctgcaaggcagtggcaatactcgcacacgtagtagccgcacaagttagttccctgcttttgctttgcgcactataaataaatgacaaacggcgagagatgtaattaatatacaattgtatgtatttgaatcggagattcaatataaatgtagagcatgtgtactcacaggaaaattgaacttcggcctaagtctttctctccatttgccgcggaccaaatgacagaaccgataccaagccctacatggagtttaaagctatgattcgtagtagcaattaattataacaagattcttaattaacataggaacttatgacagtacctatctataagttcgaaaacattgtcaaacgtagactcttttttatccattgagtcatatacgttgacggtgcaggcctccaggttgaagagtaaaagcacccagtggaatttgcaatgtgcgtgggatgcattacatatgaaacacttagcatgttcgtacgggaataaaatttggtataggaagacagtaaaattaaactaactctgagttgtacggcaatagtatgaacgtccctccgttcatactcagaagaatctccctccgttcacggaatatggacatatatcgcagcctgactgggatacgtttgttgcagatcatacaacagctgaagcattggctttgaggaaaaaaatgtccgagctcgcgaagaaaaatagatatccccatagattggggtcaagtggatacgctgggcacgtcgatcaatggcgggagaccgagcaaagatttgcagcggccggcaaaccactactggtagaccccatggtggaacgtagtaagaactgggtttgggcgcgcagcacaggtcaagtctcggatgagggagacatactattcgagactccggacatagaacaagtgactactaatttgcagcagatcgtcgagaaagaaagagcaggacagtttgtcccacggagggagcgagaccagcttactgtggcgttggggaccgccgaacactctggacgtgtaaggggtttgtcctcaaagccaagttggaagataggctttccacatgacgcaccaagttataagaagagagacaaatacaaagaacaactatcatacaaaatctatgcgcaagtgaaggaacacttctactcgttggtagctaaaaacccgacagcctttccaaggttattccctgatggccagcaacccacacaatccacacagcaaacaactaatgcacccagtagtgtaggatcagtggagacaactcccttccctatggatggtataactggaccaactccgtgcagtctcgtcgtacctatcggccgcgctagaaagactaaggaggttgcaactggtttagcgatacccggatgtcaattacacaacacggtaatccctgaggattacgcaagggtacaggtcgccaaggtccatagagaccacatttccttggaactagacatacctgcacctgagaggattgaacttctcggtgatgcagtgaatcagtttatgttgtggcaccgcagagacataatcctgaccgcggccgttccagcagcaggatcttcaactccatcctcatcacaagcaaggacagttgccgcttctgcttcaccgtcgcctcctggaccaccatcacctccaaatctggcatcaccactaccgtttaggtcaccggcttgccaacctacaccaccaccgcttaggtcatcggcttaccaacctacaccaccaccctcccattctcaacagcctgctctcccggctccacaaccagttcaagcctctcccacctccccagctcaacagcatgctcccccgactccgcccttagttcaagcatctccacctacaccccaatctgctctggtagaacaagtgcacataccggaaggtactacatccgaaccgaagtctaatcctttggaacctcgtcgtataattccaaagttgatatcgacatatgacccaaaggagattgacaaggataaggagaagttcatgtttcagctttcaggaattctgagaagagaaaagaacttgctcacgtcatgtcagactcccagaagtcagtactagcagcccaagatgaattgcaatcatggttatctgccgatgtgcctgaaacttatgagtatggcaagccattcttgccaacatatcttatgaacaatctaccctgggaaatgagggcaatgcacgaatggtatatcaaggcatataggaagggtctcggtttcataagcatcgccgtcccggaaggtgctttcatgagttgagtggtcctaatgggatattttttttatctctttccgagacctttacgccctctacaagctagataaaatggacgttaatctcgttgcggcattctgtctgtaagtctgaactctttattacatgttacacgtatcattccaaacaaagaaaccaaatctcattacttctttgttcattatacagtatgcaattcatgaagctgatagaactggatcaccggttggatacatcgatccaacaagaatatgcaaaagacaacacaccgtagagctgagagaggactacgagcaaattggttggcaagacccctcaagaaaaggaagaatatgtgaagcaattgcacaacaggaagaagctagaagtagcaacatacttagcaatagcaatgttggcgcacgccgacaaagatgtcttaatggtcccctacgcgttgacgtaagctttatcttctttttgtttaattaatttatcttcttcggaattttctgtctccaataagcctatcttatatgcagagaccactacatattattccttgtatatccaaaaaaccaattgatcatatcgttggaccccacacaatatgaaaaggagacctttatggaattcctcactattttgaatttgtaagtgataaacatttcattaatataaattgtttaggtcgatccctagtcttcttgctactgataaaataattgttttcttcaaatagagcacacaagtactaccgcaaaagaggcggacccagtacatattccatcccagaagcagttacccatcatgactggctggccggtactatcaaatctataccaatagaactaattatcgaacaatacatactaatttatatctactgagatcagtccctcataattatatcgcagcgttacaaacaaccaccaggaaccaacttgtgcggttattacgtgtgcgcgatgctcagagtaaacgggaggtacaaaacaaccagtaaccaagtaagttagcgaactcttctctacaaagaaacccatctagcacacgcttctcactgagtaccattctattttcctttctgtgcgcagatccccgaaatcccatatattgcacaacaaatcaacaacggtactacctggaacgtgggcgctgacctctgccgattcctccgtcgtgatgtctgcaacgcaagaggtctcttctacgacaacaagaatgaactcgcaatgaacgacaaatttaaacctctcagagagtgggagaaagaacatatgcaatgacatgtacactacttatacatatgatgaaaaaactgtgacacttgtattatatatttcgtatgtaaattacgattgaatttatggttatgtatcataaactgtaataacaacaacccgactatctcgtatgcttactattccgaaatacgataataaatcctcaataatttaatattaattaccagacacatctcaccaaaaggctagaataaatattattttagctattcggaaattgaacttcgcatgcggtctacttaagacggccgcatgcgaaaatagatctttgcatgcggtcttgttaagtcgatcgcatgggaaaatagatcttcgcatgtggctgcttaaatgggccgcttcgcatgcggccgtcttaggtgaccgcatgcgaagatcgatcttcgcatgcggctggacgcaaatgatgatctttgcagaccatttcgcgcatgcgggccggccgaccacatacgaagatcatgttcttctgtatgcaaaaacccattctgtagtagatgataggtgatgtcgcaaaagtgatggactgatggcgtccccaactacgcatgatggacgcgattgtggggccggagcctgatgaatcgccctcgacgggatgaattggcagaatcacataagtgagagcgtcctcgtctatgcgtgatgcacaagattgtggcgccatgcatcaacatgaggatgtttggccggacggggtttgggttgttcacgacacgtcctgatgcctgaaggcacggtgcggttccgcagcttcccatcttgctccttcacagcgaacggttagatttatttcgataccgtctggtaccagtaccacgaggagaaacgctagggtcttctagctaactccactagatggtgggttagcctgcctagctagttcgaagcggcactccttttaattatttgatattagatcattttttaatatttgtgtttttacaagtaccgcgaggtacaacctcatggacaggaacaacgcttttttgcaacatatattttatacgaaatctatgctttctgtaaagttaaagcacactaaatctaaagcttaatatacaaccatgccacatcatcacccactagcaataattatatatttaatctcatacaagcatacaaatgatctacaatttatttaattatacaaatcaaaatacaagcatccaaccatcatccgtctccgtcatacatttgcacaatatttcaacaaatctatctattacttttacaatatttaacatatacttatcaatatgtttcacactaaagcacgagtattatttgactgataaaccctaatgttttgttttttttcttcgtaatcctagtttgattgtaaaaaaaacatattgagaatttcttagtaaattttacaacaaagcacgggaaagcgtgaggaatcacctagttatactatagttatactagtttcattgtttgtcgaaccacagtgaagaagaatctattgattaatagcaccgggcttgaaatcggtgcatttatacgcactcatgtgactgctgcaagcctgcaacggacaataattaaaatgaatgaaaaaaacgaacggtacggagtttacttactgttactggattataacaagctggtctgacattgcgcttattcttctccgtatcgtcattgactttgtctacaactagttattgtacttgcatcctataaccacttactccggagcaagattattgcaacaagtacttgtcaggcccaacttgcctttgtaatgtccagaatcttgataaatttattccgtatatatagcgcccctacgccggccggcccggcgactgtatattaatatacagtcagtcaatggtttcaccaatacatactgacgtttcccaaggaaaagaaggctgacgaaacggagggtaaaagggtcccaagcgtgcccacagcgacaggaaactaaagcgaaacggaaagtaaaagggtccgagacggccaaaacgacatatttacaaacggaaaataatttgtgaataaaacttttatatacatgttcttagcgatgtaaaagcaaatgttaaaaataaactttgataaaagaaccccaaaatcaactttaaatttaaaattaaaaatttaaattttagctaataagtataagcgaaaagatgagaccatataccgtagcgcatctattcatctaagccgtttggggcaaccggactcactatttggtttttattcgtgtagctgatccttccgtcccaaaatacaagaaatttttagtactccctccgtcctaaaatataagagattttggaaagacgtgacagattttggagagacgtgacactttctagaaccatgaatctaaaatatgtcacaaatcttcaaaatccttatattataggatggatggagtatattccatcagcagtacatacacataccgcacatgattcgaacgaattataactcctacggtgcaataatatattgtaatggttgtatatagtgttagtatatagtagggtgtgaaaaaccgccggtaaccgcgcggttaccgcggttaccgcccgtaccgcgggggtacggttacccgtaccgcacggtacggtttaataaaattcgtccaaattcaaaaatttaaaaaaaaagaaaaaaatcaaaaaaaatagtgaaggtagtgcttgatttatagtgttttatggtgaagaaatttctcaaaaaagagtaatatttattcaaatttgagagcaaaacggagaataaatttaaaaattggaaaaagaaaaaaaaataggccggcccgttactgtgcaacccattacacatcgcgcggtaaccgcgccaaaccgcgtggttaccgcgtcaaaccgcgcggtaaccgcgccaaaccgcgcggtttgcccgaatttttgaattcaaatttcgatttgaaaatttgtcgcggttttgcgcggttaccgcggttaccgccggtaaccgccgtaccgccgggtggcggtaaccgggcccccagcggtttttgaaaccctggtatatagaaggacgcgcggcgccacgccgcgcacagctgaacccacaagcatggcttaatcaaagcaactattaaaaacacattagctattattgaccaaatattaatttatagttccatttagcttaaaaactactccctccatatatattgacgtcgttgacttttcaaccaacgtttgaccattcattttattcaaattttttgtgcaaatatgaaaatatttatgtcatgcataaagaacatttgatgacaaatcaagtcacaataaaataaatgatcgttatataaattttttgaataagatgaatggtcaaacgttagacaaaaagtcaacggcgtcatacattaaaatatggaggtagtatatcatagtacaagcggcttatacactcaaaatatccgtagtttgttgtttgttaacaaagcggctttataattaaacagtgggtgatcgaacaacatgagcctaagaaaaacaagatcgatagagtaacatttttggtgtgaccaatgtttcggatacatacaggaatagaaccactctgtctcttttacatttatcatagcatgattgctcatggaacaacaaattactgattctaaaatctgaaagtagcagaaaaaagctacaaaactacagtcagtacatagacatgaaccagcacaaaataacttagttcgagaattagtacgaaatccaaagaacacaatagctcacacctgtgcaagcacaaatcctttcaaatctctaaaccgaatgccatcagagcaccccccaaagtcccttacatggagcaccttttttgctgcaagtaaaaaggcacaacattaattaacttatgtatgcaaccaatcatgaaaagcatactttaatgttgacctggctatgtacatgtgcacatagtaatctaattttaattagttccatgaggataaccatatcattacaatatcccatgaacaaacttagaagtttctgatgtaggagctagaaagaatgataaaacactggagtttggacgatatgggcatctagggaccagttctctgtaaaccagatatgcatacaatgggctacatggcacataaacaatttgacattagtctagcaaatccaagagcatactcacttctgtgtatatccaagggtaccgatttactgaatatgcaaacacaaaaattgtagaggtcaaatgtgtacgctaaattgagttccagaaaattgaaaattttaactgtacaggaagaaattaatcgacaacccaaaaaaaaaaaccttggttacaatatatttcgctattaagctgcataagaaaagctacagagcactgataataatgcatctggacatttatcaaccatatgttatagagatttaaccaataaatcaagaacacgcatggtgctttcagatcaaacaaacagaatcacaagcaaacatagccaaatagatgccgtctgatttgcctgtgcaatttgtgttaagcagacatttgaccactccatgaacagtttgtgtagttagtcacctgaaatgcaaaacatgcaaacaaaacacatctccatccattttgaactgttccttccaagttgcagaagtgaaagaaaaagggtatcaaattggggaagcgattgtttgcatagagtaccaatcaggagcaagaaaccggttctgttttttacagagtaccatcaaaatgtacaaaaacaaaattgaaggagcatagtctaaatcacctgttccactaagtgctcgtcctactgaaaacatgtaaatacaacatgtcagatagttttaataacaggtagcagtactaagtacgtagattttaaaaaaagtattataagtacttgtgcttccctctcatggaagcattttatgtttacgatctttcatcttctggaaatgaacaatataaaataatattgtttggggttgtatctagatagggtgactcaacaaaacaaatgacaatcattcatgaacttgttactaatacggttacgtagtaccttcttcacaattttcattgctaaagaacccctctcgcctgacacggtggcagcagttagtttcatactacctctccaattggtgaaattaaattacaaatttactaaactaaagcaataggtacaaatatgtgcaaagtaaataatcaacactatttttttaagcagaaccaacattactggttccccctgaacttgacatacctgaagattgtaagatcaacaatcctaggcggcagcgggctagtacccagcgcccaacagcaaggttctgggattcggtccgaaagatccgaatttcggtgaatttcacccatttcaatgaggtccgagacaaagattcactcctatttcgcctaaatatggttcagttttaccaaaatttctcaaatttggtttaaatttgaccaaatttcatccgaattttccgaaattcgtccatttcggtggacgtactccgaattttttctgcaatcgaatcccaaaaccctgcccaacaggcacggcacaccaatgagcagaacaaccctcagcctcaaagactcgttgtatcaaaatctctacaaatcagaagcaccaaacctcagtaatcatgggagattgaaagagaactacttactggacatcttgataggaacgtaagaattttgtgtgcaaatcggatgagaaattgggaatttagttgtatagggcaaaagaaaactcacctgattgcttatctttcctcaacaaaacacccattgctgtgctgctgctgctgctgcctgatgtggggaaaacgcctagtgttcctcatggagacacctgtcggccgttctgcctcgcttatgtgctgctgctgttgctgcatcatgatatgaggaaggcaaagaagatagcatttgttttgttgggcttggtctgctatagttgcatgtctatgggcaagcgttagctcacgcctctgcccactgcacccaactgaatcgcaacctcttggttgctcctgtcctgcacagctgcatgtcgtcgctgagccgccagccacagtactggagagggagcttccacagccgttgcgcatctgatgacggtatgtagcggtgccggtggtgaaggaggaggtgggaggacgcgatgccgatggtgaaagcggaggtgggacccaacgcagtacgaggcgacgacgatatagtgcaacttttgcagcttgaagcgacaggggagactggactgggactctggggagttacctcatcgaagggctccgcctccatggttgcgccaccactgcctagggttctcccctccaaatcgacggcaggagtgaacgaaacagacgatttgagggcgataggggatatatgccatctaattcgtagacctttcagggcaagccactcaatacgcacttctttcagattttgcactgagatagcgaattcctttattccgtgccactccgtcgccgatccgtccgtccgtccccaacgccagcttttccgtcgtcttccccacctcgtcacgctcgtcaccggcgcccgcgtgggccaaactcttggagagttggagggactcgagctcggactccggcacggatgggaggaaccagttgtcttctaatcttgcgaagcagcagccgattaaatggcgaggaggggccagctgcagcagcccggcgggtacggaggagaatgcggcgacggcgacccggcggtcggcaccggtgacactcatactttcttcaggtaatcactaatcaggttcatagctgactcctccgagtgaaatagcaagcctacagagtttgtatgtgtcaagtctgcaggctggaacgtacgtaattgctccgtgcatgaatttatcataaaaatactactgattgtgcatagatctagcttgtgtgttaattgcagctcgctaatttcttccctagtttcttcgttctctctcatcgatcaattagttgcggaatgtgatttctttctacttcgttctgccttctgaggagcacgcttggtagtttatcaatgaaaacagtagattcctctatcagttttctcaatgcatttgtttgggaagattaacaattttttgctgattatggcatggaagagattagctctgcagttctgcctggtgctgaggtcgcacgtccgcggaatagatatggccttcgttcccgatgtggcccaggttcgcgaaggtggccgctcgccggctacgtcgaggtggaagacgctggaaatttcttcgccgagttgcccaactattctgcggtgtggagggcggccttggcgcctgcggctagccccgcctcgtgcgtctcggctcgcccgtttcgatcggctgctgctttgccagattacaagacgaatctgagcttgaggccctttagagcgtggctataggtgtccaaacgggcggcacggcccggcccggcatgggcacgggtccggcacggcccgttaggcacggctgatgaaacgggccgtgccgtgccggcccacgtgccgagccgccggcccaagcacggcccgtggatggccgggccgtgcccgtgccggcacggcacgcctgcggcccacgggccgttcggggcatggcggcccgtgaaggcaggccggcagttgagctgcactggccgccaggccgccaggccgccagtgcacagtgttttttttaaaaaaaaagcaaaggaaatgtataaggaaaaaaaattaaaaatggaaataaaatgtttaaaaaaataatgatttactaatgttaaaaaatgaaaaaatggtatttaaaaaatggaaataaaagtttttaaaaaaagtaatgatttgctaatgttaaaaaaaagaaaaaatggtattttttgttgtgttgaaaaatttaaaaatatagattgtgattcattattttgaaataatttaaagataaatccacacttgcgaaaatattgcaaaagaatttgttaaaaatagtaatgacctttattgatgtttatatcattacaggatacaatgatacatgctgcctcgttaaaaactttgtcatgtaaaaactcataggggaaaatgagaaaaccatgacaaagaaaagagtacagctcaaaggtcaaaactacttctaacaaaattctactggggttggtctggatccaggtagagttgctcgaactgggcggccaattcttggttgtccgcagtgtattgggcatgttgtcgagcaagctcccagtctttaacgcttagtagcatttcgacgtggtcgctgcgcagagtcgtcctccggtcttcgatgattcggccgcatagactgaaggccgattcggaggacaccgtcgacacgggcaccgtcaacacatcccgtgctagttttgaaagcacaggatatgttatcttgtggtcattccaccacccgaggacgttgaaatcttgtgcttcgtggtggatggcgtcgctgtccaaataaccggacaactcttcggccacaacatgcgaagaggcgtctccacttgtagccgacgaactgccaccaccttggattgaagacgatccaccccaaatcctaccccactgtatcttcttcttacctgtagtggggataggagggggtctctgctgacgaactttctgaaactttacttcatatcttccaaaaacctcatataatttacgtctaacctcagtataaaaagaactataatctacacctatagtatctccaacaagtgataaaatagcagacaatccccttaatttacacctaggatctaaaacaaaagcaaaagcatacaacataggtatatttttccaatatttcaaatatttttgtttcatgtgaaagacaggttcagttagaacgtcatcattttcgtattctttaaataaagtagcaatttcaagaaggttgtgcaaaattatattagcagttggataataaacttgtgacaaagttagagtacaatcataaaaagtttctagaaatttgtgaaatttttggacaattgcccaaacatgctcgttcagtactgaagacctgtcactgtttcttgggccaccacgtgactgaacaaaatcaaaaagtaaactactataaggtaaaacaacttttaacattaaatacgttgcattccaccgatgctctgcatcggtggcaaacttacgagctttcacaccggccgcattgcaaaacctcttccatgcagcaatccgtgggttagaagcagttaaccacgcgattgcttgacgaacagcatcgatgtggtcacctaccctcttcatgccagtcttaacaatcaaattaattatatgacatgcacaacgctgatggagtagaaaagattgagcatacacacaaaataaaggttgcaatatttcaatagccctagaattagcagatgcattatctagggtgacagcaaatattttatcagcaagattaaattcattaattacttccctaattctttcagctatgttttctcctgtatgtgagacatctattaacctaagccctaaaactctcttttgtaattgccaatcatcatcaacaaaatgaacaactacgctaagataatcctctctagctctactactccatatatctgaagtaacactaacagagaaagtacatgtactaaacagttccttaagtgcagttgcttccttgtgataaacattctctaaatctctagttgatgtttgcctactcacagctttaaacctagggttatgagattgctgaatgtaatgttcaaaagcaggggactccccaaagttcaggggtaaatcttgcctggcgattaaccggacaagagattcccgagcaaccatgggatcgtactcccaactgcgtaccgtaccgtctgggtttaccataagttgctgctgccggagttgtattccttgcttcttggcacacgactccgcatggcgcttgaggtgacctgtaccaccagaagaacgagcagataaaatttgcctacatattctacaacgggctttcgatacctcccttccgtcggggcatgtttcctttatctcgtcgaagttttgccacacaccggaggttctcgatctcttcgagccggtgtgtgtcaaaacacttccgctcgcggttccggaaaatccttccgaagctgtcccgcctgaaccggtacctcctcaacgacagccgtatgaaccggtacctcctccacagatggtggagttggagccgatccggaggtatcgtcaaaccccgacatgtagttggggtcgaaatcacccaaggtgaatgacggcgactggtatggaaagttcggatccattctgaaaatttaaaccgacataaacaaattttcgaatatttattgaattcacaaacacaatacaaataatacacaaatttgaatattacttacatctttccaaccgcgagctcttcaaacctctgtgatcaaactgttgaactacgaaactaattttgatttttgacaaaatttgagcaaattttgtcaaaatcaaaaaaaatgcacacttgagaacaaagagagcacttaaaacacttgagagcacaagatgaggagtgtgggatgaggagaaatggctggggttcatgccctatttatagggcgaaatttgagattttttggaattttttcgaaatttttatgaattttttagcctcccaacggttattttcaaatttgaacggtcaaatagccgttagtgccacgtggcgccttcccattcgaccgccgcccgccctgtccctgctttcggcctggcgcgtgcgccgctggcccgctttcagcctgacgggccgccggcgaaacgggccgtgccgtgccgcgggccgtgccgtgccgtgccgctacagtagccgtgccgtgccgtgccggcccgcgggctcggccagcggcccaagcacggcacggctactcgtcccgtgccggcacggcccgttactgtagcaggccgtgccgggccgtgcctgctacaggttcggccgtgccccgggccgcccgtttggcccggcccgtttggccacctctaagcgtggcccacgccggcgccggtgacgagcatgacgaggtggggaagacgacagaaaagctggcgttggggacggacggacggatcggcgacggagtggcacggaataaaggaattcgctatcttagtgacaaaatatgaaagaagtacatattgagtggcttgccctgaaaggcctacgaattggatggcaaataatgaaatggaaggagacgtcagcggtcagcccgaagcggcggcatcggcttcgtcgcggccacaggggctcggggacagaaaagaccatgtgtcaaaaaaatttacaataaagtttgacaattagtttttctcaagcgcatccatcacaactatggtcactctatatcattccacaaccctgatgatcccgatgcccgcaaaaaaaaagagaaagaatcaagtaaaacctaaacgaacccaattacacagtatctttttaagaccacaatagtcctccgctctagagaacggatccatagaaccactgaagaaacatcgcaagtctgatccatggtccgatcctaaaccaaatatgctcttaga

SEQ ID NO: 27168 - DNA, 17898 bp, Oryza sativa
ggcaaatgcaagtacgtacgtctgttggcaatgtcattagatatttatatttaaaaactcatatccaatttagttcaacttaaagagaaatatgtcatattaatcggggccacattttctaacttttgtgtcatttaagcaattataaaactataaaaaaataattatatatattttatcatcgtatataacttgataataattaaattagatctaataaaattaaaatgaacatatctttgagtaatattaaaaaaaattagaccccccattataacacaataaaaagtacacatcttataaacactcctaagatattatgttgttctcttaaatcggagaaaatacactcttaagatattacgtcgttctcttaaataagagaaaatcctaaaaattctgacatgacaacaaaacattcgaccatcagcttcgacttaaacatctgacacattattttagtttattagattaatcatttagaaaaaaaaacatcccaaacctcccttcctcccagcccgtgtatagcctgcgccattcttttctctctattttttatctccttatcaactgaatttaaaattttctatatggaaaaaaacacaaatgggcctccatctattacttatatcccattaggcgtttcacgactttctacccactaattaatttctcttaacatgcatatgagggctatgtatctatacaaattgaccttgatacttttaaaatgatctttttaggagataaataaatattcataagaaagattatcataacatcccaattacacatatgatatatgaagttactaatcataacaggtatttatctagcaatatagacaatagattgaaaataaatgtgtggccggttgaatatcataccagtaagcatatgggttgcacctaggaatcttaacaaccttgaggtggcctttacaataaatcaagtcaattctatataggaattaaagaccatgtcattttttttaatttctggtaaattttgctacaatatattataaaatcttgacatagaacaatctagaaatgtgtatttgttataagatactccactttagtgatgattcgctaaacacactatgaccattacttcaatatttcttgacagaaaaatttggaatgcatgcctttaccccatgccatgttatatgcaattatattttcgtctcaaattgcaaatatcaaatcatttcaaggatgattcatataatgaaaatatccaaaaataaacaaaaataaaaatggacatgaaataaattgaaaattgagcaaatgttgctagatttaaaacccactctaaatagttagaatgataaaatatataaaaaactaaagtacaatcaatcaaacaattgatattgttggatttttttgagtagtaagatatcctgctggggagttaagatatcctaaattttcttataggaagcaactcctttgtttcgacacaatattttctcatcaattcaaaaccgtatcttctcaaataatttatttttgaatttatatgttgtaagggtaattataagaaaataaccagcgttcaaagcacacaaaataaatttaattttagtttagaatataataaaaaaatatttaataaaaagccacccacacataaatattcataataaaatttcacttacattatacaagaagatgtccacacgtatgcacgggctacctttctagtttttataacaggtaaagttaaaaatatagatagtcttaatgtattcaaatcatattttgtttttgtttccgaaatatcgaaccagcatcattgatcaatttctaaaaaatcgtctgcctagggaaactagactaaccgatttcatccctcgtgaatactagctgaagtggccatttccacttataggctataagccaactataagcttatgtagaggaaagagaatttaaaaaatggagagggttggctctcatgcaagagctagctattcacatacttcaagataaatacattaaatacataggtgagagatagagagaggaggagaaaaaaaaaagataacattatagctcatttactatacatgttaactctaatattagctataagctcatagttggctctattattaaacttgctcttagaaaagcgggtgaaaaattgaagtcgcctccccaacaagcctgaagccctatacttcattaattaattatactatacagcgattactagaagctaattgtattatcctacatatgcccaaataaaatattggtgtacaaggaaattgactaacaaacaaatgccctagcaccgaaattcttctcaaggagagtatgggtctgtttggtttatagggtttggtttgggaaaatgatcctatccgggcgaccgatgcacgaactaaatatcgagcagttactcccctcacccacttcttctccattccctcatcctcttttctctctctttcttcttctctatccacacaaattctctttatataggagaagctcagcggcgcggctgccacaaggacgcaaccgacctttgcgtggcatcgacaacggtagacacgctgacgggtcgagctctgtgtggcgtcggcaacggtggtcacacggatgcggtggagcttggcgcggtgtcaacgacagcgaccatgcggttgtgtctgacacggacaaactcaacgtgacataaacaataacagccacgcagttgcactgcatagacgacaacattgcaaattggacactagagaatgtggtaccaattcgggggcatgccggtgccacctcctcacccacggcaccatcccagtcgatgtggtggctaaccaccggaatggaggaagagatagatctagatttttcttttgaattttttaatgtttcagtatatgtaccataatgtttcatcggttagatttaaatgttgcagtggggttttcgatggtgtttcattctttttctcaatgtacttggatttttttcatgtttcactacattcgaaactgttgttttatacgctgtagtaaaatgttttattgtgtgatttgattatgttttactatcttcagtactgaaacatttttacgtaaagactgaaacaacgtgctcgatttgtagtcgtttcgatctgttttgtttacagcccaaacaaacgacacaaaaatattggcaaggacaagggcatagcctgggtacgcattggtttgtttccagaaaaattggtgttgctaacattttggcaagggcaaacaaaacatcacaagttacattcccacaattttgggcattgccaaaattgtggcttgccaattttttttaggcaacaatccattatatacttcaatataggatttttgggatctaattttgtacatctatcgactcttacggccattaccttttcgattgacctggccgagttcctgaagatatcgtgattattactcaccacacgttgtacacaatgatttgaaaagcgtatttcccttttttctttttcctatcccaattgggcatttggtaaacggagttcgcttccctccaaaatgtcatccacttccatgtcagtccgttctccggcgtccttccccttccccacggcagccggagcccgcggccgcgtcggctcggcgcagccggtgggccccaagctcctctcctcgccacttccgccggcggccacgcccgcggtgcctcgccggctcctcttcccggtggctgccggcatttgggacttcctttccggtggcggagcaggcggcgcggctgccgcgtcgctcgccgtccggggaggcatgcagctcttcaggcaggtgcgacgataagggatttttctttcacattcttttcccacttattttctgtaattacagataaacccctcgtctcagccaatatctgcttccgtaatgctgcgcggcgaagctgtttttgttattagcttcgataaattgcgtgagggttcttgaatttttttttctgttcgtcctatctttgcattacagggagatgtagctggctcagtagcagagttcgatcgggcaattgagctcgatcagcggcagaagaaatgtatgtatttgtaacacttcaaagttcagatttcagagtgtgagtcagcaatgtacaactggctgcaattgtgctttgtttcagatctctggcaaagggggctttcactctactacctggacaggtgcattatcatgatagtaactaggttcatagattctggaaactgaaccaaataatttcaagccatggactgaaattaaaccatgtgtaaccatctcttttatccttggtttaattgatcgaaattctgggataggttcgaagaaggtgcagaacagttcaggctggatgttgctgccaacccgaatgacactgaggagtcgatatggtgctttctctgtgaagctcagctgtatggggtagacgaagcaaggaagcgcttcctggaggtaagttttccagctaaagatatgttttctgaatgctagatttcttgatgtgttctacttcttactaatgaggtatggtgcgtgacgtgaagaagtacgtaattaatgtcctcaagtaagatgcaaaatctttgccacttctgtagactttcatggtcttatcaatttagtttgttggcatgaactaacttcctaaatggtgtttttactgtccattatacactatctttacattgcgtacttcattctagcaatcaaaactgaagctttcaaatctaatgaatcgttcataatatatgctgtggaaacatctatgcctccatggtgactgcagtacataacaaattcaaattatcaattgactaaaagtgtcttaagctgagatcagctggcagagtactaaacgaatacagtgctattgggcgtccgtactcacttgatgatgaccacatttataaatttcttaaaattttctatgcatacgacataacgcgtcctacatgtacaaatttctaatattcttcttgacaaatctctcccaaatataaatggcctgcagcactatgtgtaaacagcccacactaattgctggtaaatgtaaactttattgcgcttcactttcaggttggtttagactcaaggtctgtaatgcgagaagcttatgcactgttcaaagatggtggggaccctgaaaaggttgtttgatttgatgataaatgaacatatctcacctgttcttacaaatttctgataaacatttacgctagttttctttttcatcttcagttggcttcaaatttctctagtggttctgaaggtgaaattttctattcatcattatacactggactttactatgaatctcaggtacaattaaaatcacaaaccttcttgtgaacatttgcattcttattaggttatttacatattttctcatagtttttttactgaacttcccccagtacaacatttaacaggttttcgtcaacgctatattttctttttgctttgtgggatgttttctattttataaatatatccattgtagtccttggatcactcacacatatagattataattgatgcatagccagttgaatgaaatatatataccggaaacacgagcagactgagtagttctaaacatgagcagttgacacatcctgcaagtaggtactaggtagtgtcctgttcttctcttatccatggcaatcgcaattaaaatttaaaaagtctctttactttgtgaacattcagaacattgaactactactactttgattctgtactgaacagaaggatgcagagttggcaaagtcccacattgttgctgcatgcaggtcaccatatggatcaaggtcttccatccccacctgttccaaagtacagatatatttcactaactgtgcagtcttcagccatactgaattaacaggataattcttggtttaggtccggtgattacatggcttcacttgcactagttcattgtcaatgccgcaactggactctggagtgacagaagtattatacaaacaagtggacctaaacattcttgttgaagccaacagataggaagcatcttgggtatgttcttcccatggctcactgtatttaactggacttcttggtctcaaatttttgtagatttggtaaatagcacattgccactcacagtcaatgacgtaacggctcttatgtgtctatgacatgtagatccagtaacaaatcctaaattgtcatttgtaagagtggcaattagttaaatatctcgcgtgatctggactcttcctcttctttttttcccttttaacgagactgaaatggctgatcaaacacggtggaagcattttaaagattcaacctctgagaaagatgagaaatgaaaccaaatcaagcgttgagatgctcattgaatgaatctttattttcataacatttcccatgcttgttgagtaattcttccacaaagtaagcaacttataatcagttgatcggtggttcttcgtccagaagaacagagtgagtgaatcaccaagtatagttaaatgattctgaaagtctgaaccattatttttttaattaatacatgtactgattcggaagcctaaaaacagtatatattttcttgacatttaaacctcactactacgattcatttgtttggcacatcagacatagcacccagaaattttcagtgcagaaatcgcgcttgttcatgcagaagccggactgcagccagggatgttggtaccagcagcgcagccgctactagcagtagagcatccgcccaaaacttgagtagctggcctggacggcctcctccaaacaagagacggtggccttggccactgacgcagcatgaacacagcgtagtacaccagaagccctgaaactacgcacgacaccgaagtcatcgcgcacctggagactccatgctcatccatggaggccgccaggtagccgaacccggccaccgccccggcgccgaggaagacaactagcccgtttctgttcgatttgatcgtgtccacggtgataaccgtgctgctccggtcgatcgaggtgaaggctggaccagagaagcgccgggacaagctccggcacgcagagcagcagcacaacgttctcgccgagcagcttggcggccatggcgtgcacggtcaccggccagcagcaccacgagcgaggccttgcggagcagctagctctcacgcgacgccggcgcgacgcccggagccacgccggcgtcgtacagccagctgagcctcgtcagcatcaggaccagcgcgcccagtgtggcgctgaggaagaggagaaactgggtgacggcgaggtccgtggcgcggtccgtgccccgtcacacatagcgcccagtagggcacaaccgacatcgccgtcagctgctcggcttcctcggccgccgtcgtcgtcgtattcttgttgccttcgcgatcagttgcagcagccgaactggcactgctgctgcttgcgccaggctcgccgccattgtcagcttcagctcggatcagtgcgacgcacagcgcggcgatgaaggcgagcgcgatgaaggggaagacggcgaggacgatgaacctcacgtcgatcacgagcagggtcgcgtaggatatcaccacgacgatgaacctcacgtcaatttttttcggtgtagttgttgggattgagtaagaacattctgtatatttctatgttccgatattgttagcgtgtccagctctgccgttccaatactgtctctgagaaaaaaaatattgtaacggaaatttgatcattctttttttccgatcgttctcattctaccgcatggagatcgatctttgctagttatgctaggaaagaaaagaagagagcaatccatgcatcttcctcccccattcctgctctctctctctctctctctctctctctctctcgcattcggtcatctatatatatggacagaaccatgaatgtgatagataaaatccctgcatttaatgtgccataaaccatatccgaaaaatgtaatgcaaatataaaacaaacgctcgtctcggttacattcatggcatcatgatatgctagtagtactagctatgcagagtgaaaagaataagtaaatcataattctaatatttaatttgaaaaacagatcctagccccaatgagcaaaaatgattaatagcatacgacaagacaataggcaatatcattatgaaaggaacataatgaaatcaattaaacaccactactaggactggccctggagaggatcccagcgtgagtaagcaaaacccatagaattgttatcagctcacctcctctggcaatggcccttctatgagcatcaatattgtcagagggggcaatgtacaatatcatctctgaccaaaacccagcaagaaccgtccatcccatctcttcatcctcaattccctccacaagttgcttcccaagagttaaacctttgttcaatatcatatcgctcctggatttttcaaccaacaatagtaatatgtactcatattccaaaggtttatcattccggccactgaaaatgggatcgacaatcttcttaacagattcatatgatttcttcgaccatgccttgtcatctggcagtagctcagaagcagatgatagcaagtatgcacagtactgtgacagataagtggcggtgatcttattgctaattgagtctgcaatcaaaggctcagtcgaatgcctgatctcgaagatacaagttgcaatgtgccatacaagaataacatcagatgtgccatctcctttgcaagcccatgaaaaactcttgccgatatggctttgttggagtgatgtaatacaatcagttggtctccagttttggcttttgagagtgttgataattgcagccttcacctctgttggtatcttcacttgcttagtttggactggcagtccgagtagttgtttaattctaacaattggacctatattcatgttggtatccattagggaggtttggcccattttgtcactccagtagcccaagagattgcatcgaaattgtagtacgcaacgaatcaatctccgcatgcgaggagattgctgccatgtgggtttggttatgtagtagcaaatcaaggtaactttggtccaatttgagcacatgtatgagacaatctcccatacctcatcaaaaattagtactatcacaaagaggaatgatagcaccatgaaaaacaaaatcgatccgaactgtttggcttgatcattcttaccgcatatcaacacacaggttatctgatggtagaatggatctgatgacattggcccaacctgtgctaccgaaaccacatgttgaatcgtgcgtattgcaataaataagcagcatgctgtgccggcgaaggagaataagatgtttaatacgaataaccagaagactgaacaggatactgggagcgatgaatggtaaaaatcacatgcaaaagatagctcatccgcgacaatactgacaattctttcaggttcagtgtcactatcaaataatgtgcacaccatgtttgggccaatctcagatccttcttccacaactacacacctcgcaaatcttcgccgcagcagcttgaacagcgagaatgataaacacagatctttgagtggcggccatgagctcaaaacaccatccgttgatgacatgatctgaactttaccgatggtgaccaggctttcatttcccttcctgtctctaaatcgatagccatgagggccttcctccacctgctgctcatcctcccccatgactaagagtggcaacgcaacatttacagcttgcgcgtggtggctgctgctgctgctgctcatgatatcctgtttcagttgatccatgtatccagcaatcaggcgagggttgcgtccatgcgcgaacgagcgttgcgccttcaagaaagcatataacttgacaacaatcctgacaagaacgaagccacacgacatcgaaatgaagacacggtcaagtggaaaaataattctgaagtggtgaactgaaatgtaagaggtccagatcgcacgaacaagcagctccgcgacgggacgatgaacattttgacctccatggtcatcagcagcagctatcacgaagctgtttgctccgaaaatcagcgcaaggatcgcccatgcttccaggaagaacgcactcatgtccttgcattccttgacgtcttttggcaggccgcagttctcaccgccgatgtcggagacgaggtaggagactacaggcaggtacagggtagaggctccgaggaagacgaagcgggcgaaaccatggcgccggtggcgacggctgtagacgcctgatcctacaaggatcgtcaccacggcggcagcgaagatcaactgacctcgcgtgcgccacactcgcgcctgcatgcgcttgtagaactcatccaaccctgtgacgtcgcatgcttctcgaggccctgacattgacatcgttgagctgttgtttctttatctgttagatctgcatatacatgattcattcaagagttgcctcaaaaactactatatttggccagaaaccgaatgagaagtagtgtacaaactaataaacgagtaatgcaagagcaagaattaacagtttgaggtagacagtcttaggcttttagctagtcggctcagattagccaatcaaatctaattagcaatttatcactgaactagaacaccatagatcgatcgatgtcgtcgttttcaccttacagaggtgttatatatccaagcaattaattaatcggaaggttatgagaagagaaattaagaacgaacgtacgtatacctacctgcatgcagttcaacggatcacttgaatcatcgcttcatcaggacaaaggatccacaagatcattcggcaaggtcaaggctatcgatcaaggcaagaaagtaataacgtagtacgcggcaactgcaagcgtatgctacggttatcttatctcgacttggagtattatacacattttgtttgctctcttcgatcggtccccctgttatgctacaacagttccgtactatcaacacctcaactcctcaaggtggcctctgtgatcctgtgggtgcttcctgaatacgaagttcagcaggctggccgtctcattccgtacacccgtttgaacaagcaaagaaacagcttggcccctgtatgtccatcttccaagtaatcgcgtgcatcaatatcttaattaggccaatagaccaatcaaacttgcctctatttcaagagagagagagagatatatataggccaacttgccggtacacacggagagaaacagaaagtgtaacattgataaaagtcaacggtgggtaagacgggccagccatgtggttttggaattaaatttgaaaatatactgactttttttcagaaatatacgggatgcaaaaaaaaattttaagagatataccacccgcacaaccgttatacgaaaataacgtagtgcgatgtcaatccaatgagaaaagtgcgagaccgcagagtgaaagagcgagcctgaacggtctcactgaaccaatcaacaacaccatcccaacggctccatttgattagtgattaattaactagttaactattaactaacaacaattagtgattagttatcttgattagtaattaattaaacgctaatctgaataattaatcaatttgaaatcgctccctggttcagcgagactgtccggtctcgctctttcgtttcacaagactacgtgataccattcgcgatgtcacgtctacgttattttcgcgtaacggttgtacaagatcgacaatatatttctacaaaaaattttgcatgccgaatattcctaaaaaaatttgaatgaataatatattttcaaatttaattatgtggttttgtgcgacagagagcccgagatggacttgcatgccctttatgtgctcgctatgtgtatctgtttgccactagcagagcggccgaatttggctgtaagtgctcaattcacaaaattttcgagttgacaatgacatcgcggcgaagtgatcaaagtatatattctgttcaaaacttgttttgctgccatgatccgtagtccataggaacaaacaaaggcacgtacgcgccaggtccatccgattattggctcattaactcagtacagtttgaagcatgtttccgttggattcacagcgatccatcggcaaggccgaattcacaggccttcccctggaatgggccgacctaaaatatcggagtgcatgaggcatttcggccttatcaaacaaaaccaaggattcgcacaagtcaacccacggataattgttagcctatttttaataagtccacttgccatccctcaactatatgtcgagcttctctccaatactataaatcttcacctctaacctatataaaaccgtgcaattaggtctcgtagtagtatggatatctagtttcgctgacgtggcatcctagtcaacaaaaaatttaaaaaaaatatggggtccacatgtaagtgagaagaaaaaagtagggcccacgtgttagcatcctcttctttctttttcttcccaagcttgggaaggaggggagaggtggtcggcgggagagacagaaaacaagagaggtgatgttggaaacatagacttaaaacacatccttagagcaagtttaatagtataatcagttactagctgaaaaattgacacaccatatacaatcactttaatagcttacccatacaactctcttagtacaaagttatactcactaatttttaaagcttaacatgcaaagatgccacatcattatccactaataattattacatttaagcatcatacaagtatgctatattatctataatttaataatttattaaattttagagatttaaaatataagcatgttaaatcatcccacataattcacataatatttcaatatatctctccattatttctttataatatctcatattcctgtatagttcatcctcacttagattatttatttttcttttatctcattaagtcagatcacattaattgtttgtagtccttaaatgattaatatatggttcaaattatctctcttattttcttctctcattaagccatataatctcaattttttttagcccttatatgtatagtctaaattatctttcttttttcttctctcacaaagttacgtcatcttacttttacatttgaatcatcattaatctctatttttttaagccattagatgtatgggctaaattatcttcattcttttattctctcataaagtcatatcatcttacttttatcatcttacttttacatttgaatcatcattctacgtactatttaaatttaaatcgcatcaacttatgtaaacttatgtttatgtaagcttacgttgtttaaaactatcttacgcactatcttttacttattattatcatattaaacttctgcggcaacacttggggtttcacctagtagttttatattaatatatattataggcacacctctcatacacatattttggaggccatgctgcagttggttacaaatctatagtatatttttcttctctctcctttactctctcctccatccgtgcttatagctcacatatagcatgttattgtagttgctcctagtatgcaatctactactcttttccaacttttattccctcatttttcgagcacatgttttccgagtcattaaacggtgcgttttaaaaaaaatctatacaaaattcttttaaaaagtttatatttaatctatttttaagttctaaagcggatacttaattaatcatacgctaattcatcgtgtatttttccataccagagaaaaggttaaacccaaacgaacacagacgtggttcaggttacaagctccggatccaagctatcaaatccttgaattttggagctgacacgtgacagtgagatcctatagctgcggagtgatcaaagtctcatttgattggtttactaactccggacagttgaagatcgatcggccatcgagcatgtgtttctattggcatcacgcatcaccacgacgacgacgacgacaggaaccaacatcggccggttcgagcggtcccgttcgcagccccaacacagtgtatcaccggcgatgccgacgaatagtatcatgggcccccagactcgagggaacagtgccgaaaacgaagccctacttgaatccacagcccatcatccaaatactcgaattaaatcaatctacttgctttggtttggtgtccacataccatccaaagttatggctgagttcgggtcgcacgaaaaacgggtgttaacccattaacatgtgattaactaagtgttagtctaaaaaattgaaaaatggattaatatgatcggtaaccgcgaccgtcgatatttgaacaaaggggtccatctattcgaaggaactcacatgaaaaaaaaaatctattcgaacgaacatccttggccaatcaatcctttttcctttcggggaccatccatatatgtccctttttggccgtccacaattgtacgttaagtacgaagctcaagctgtggccatgaagaatctcaacaattgtggtcacaatcatcctcacgagagtacattagtattttgctgttgcggtgaggctgaataggaaatttatgttactccttgattataaggacgcaagtgggtcaacccgtgaacccacttatatagaatacttcatccgtttcacaatgtaagtcacattacttacattgtgaaacggagggagtaattaagtaggttgacgtgtgggttacccgcttatatttatgctataagtgaattggtcggtcgatccatttgcagttttacccgatggctttggagatgttgaatcttgcttgtatctgttggaattctgctcttactaccttgagcaacatctgccctgaagtgaaaagtgaataaaagaacactcaaacgatgtcagttttggtccgttctcagctagctgaccacatttattggttttcggtgactgattccttcccacagcgatttgatctttacgcaaactaagaccttttggattttggaaagcagagttttccttttttttttcttttttttttttgccagaattgaacctagaacctttttcctatgaaattcatgcacttaggctatgctgcatttgtgatgcaggatctaatcagttacgagaattgagaatctttactgaccttagaatgcttttcataaaagttttgaattcaaagtagaaataaaccagtgccaaacgtagtctaggtgtgatgaacaaataaattctttattactttcacttttatttcagaatgaagaggaacgatgtctccttctgaccatcattccctcacagggggcaacatcgatgtacatattcgaagaacaaaaaagaaggaaataaaaaataaaaggacaaaaaaagaagggtgtgagtgagatcaacggacctctgatcatatggatcctaccacaatcacaaacagataaggtcgacatgatcaatttatctacgatacagcggcacggagaaggagcagacggagtcatcagatcgccacaaatccatccctcacattatcccatcatcatcatcttcttcagatagggcccctcccctatctcatcctgataaaccaagaaacctgtatgatctggaaccattggtggtgtgtgctttgtatgtagtatgtactatgtacatttggcgattgggggtgagcaggatattgtcagccatgtagcaatgtggatgcagatggggacgacaatgtcattagcaacaatgcagcctcctccacacccatcagaagcctccttttcggaacaacctgcaagttgctgctgctatttccactcccactgttgcagttgttgctgttgctgttactgtcttttacttcaggtattacctcaccatgctcctgcttctgtggctggttcaggtccagcccaagatcctgcctcctcttcttccggtaccggattccgcaagcgttgcatagagactgcgataagaaattgaaaaataaggatcaacggatcgacgcatctgaatttattattgcaaaagggataacattaagaatcacctttctgccaattattggctatctagttactttatttccttagtgctacacgtgcttttgtgcctaatgttgctacgggatggaattgaggaaaacattaagggtggaaatgaaaaatattccaattagagaatcgaaatggataaagcatctctctctctctctctctctccatgtacacaattggtttggtggttagctctgttgcaaggaacagctcaactaaccaacaagttgcaacccagctgaatggagagaaatgtcaacaagattagtcatgatagattggaccaaaacaagaggtcaccaccaccccctgtgctaaatgcctaaatccaacaagacatcaagtaagcacagactgtcaacagaaaacttgatattttctcggagtctatttcaagtatatatatcattgtgccactaaaaggggacttgaggaaactttcgaaagcgtgtttgcgctaatgatcttgttgacagcgcattgattaagaagctaaacaaactgaaggccaggggcaggttagatatggacatatggtggaatgtggtaggaactttctcctaatgcaatgtacttagttctctagctgtctatgattaaagtgaagggcacaagatagcctctttgactcggtctttgcagctcatatatgtttccattggatcatccaacattagaatcttagcggtactactcaagtgcaccaaaaatcagtttagcattctctaaaagcatctgctaattattttttaccaaaatacagaaaaaagattagcatttcccgattagaacagattgcactaaagaaaataaatacctgttagtcaaaaaaataaataaataaataaatacctgataaaaatccacaaaataaagatcatgacgtccctaaacatccatatttaatggatcaaaacttcgctaggacaaagtaaaagttactaatagatgagatgatcgaccatgtagcacagattgacagcatgacacgaacaaacggaacaatcatttgcaccacaagagcagagataaaaattaatatgcatgtatatacaagtacaactactacgtcatgatcatgtaatcgatcggcagtccagaattaatccccaatcaatcaatctgcctgactctgatcataacgatgatgaacacagtaaccgaagaggaaagccaagggaagcgatcgatcgatcgatcgatcaagaactcaccctggggccggtcgggccgctgcgccacatgggcgtggtggtggcgcggcattcgacgcagctcctcctcccttcctccgccacgccgatccccaccacctacatgatgatcaccaaccaagaaaaaattgaacgagaaattgatcgagcccagaacacacaaacccaaaactcagattacacaagctagggaaacaacggagagagccgcacgcgcgcacgcacgcaccttccgatcggtggagcccatccggattaacacagcgttggttggagaagagaatcgttcgtattttttctctagttcttgcttctgtgttgttgatgaagcgtgtagtagaggaggaggaggaggagagagtagttgtggaggaagaagacgagagaaggagcaggagaaaggtagaggcttaggcggtggagaggtgaggtgaggaagacgtatgtacgccgcgcggcgcgcgggatagcggaggaggtgacgtggcgttggcggatggacaagggaagatatggctgcgattctggtttcgtttccgtttggatggtaataaaaagattttgtaacattggcg

SEQ ID NO: 27169 - DNA, 6613 bp, Oryza sativa
caagtccccctactctgctgaattaccagtgagaacatgagaacaggggagaggggaggcgaaagaaaagggagagaaggaagcgtaatagggcctaattctggatccgtcctaaatatatgattatataaacatgtttctttacttaaagaaaatgttttaccagtgttaaatatataggtcacatttgggtccttgaacgagtcaactttggaataaaggatcaagattttgatgttggtaatgttattcaatgctaaatgcttacagcaacaattaaagacactagcagaatattgccacgtgatcgggaacctttgcaaaagaaaagaaaaattaaaccccccctctgttatgtaagcatctcgtgtggatgctcaaatggttacttgatcaattgattgatgacgtttagagcaagtttaatagtatagccaattattagctctaatccatctataggcaatctaatagctcatttatataatagttatatactacactattaatatctggtcccatctatcatatacacactacgtcttagagtccgtgctacagctggctacaaacctgtagtccgctgctcttctttctccttatttatcttcttaaaatatatttgtagctgacttatagcctgctattgtacctgctcttgtaataacaaagcatcgagtgcctccataaccaatgatgacgtaagattagcagtcacgttcacataagcagagaatcagagatgacaagcagtaaaagggaaaattaaagcacgagttcaagtccctagcttatctgtttctcgtttgctgtcatcaaaaccaactctttcttctgcttctcagttaatctagtactaactacttttcttacaaaatcgaagtggtcataaagtgtagaacaacacataagcaaccaccgaaatggataaatcaaagatgacgtcatggcttacccgtcatcacagcggctttgtgtatcacgattcacgggcaacctttttctcctgcagtgtacagaggtcaaaatcgccgtcaggaacaaagcaaaacgtcactttgttcctcaaaatggttttgtgctgaaattaacagtggcatgcttcatccaacgtagtatttatttgtggagtgaatgctgattcgtcttgaattctgaagggtattaattcagatattcaactcagaaattattaacttgacgttttctatttcatcctactagtttacaactcggaaattatccaaagcaaccaacaactaaaaacggctagatgcattcacataactttgcaagaccgtctttaggggtcacttatgagaagaaataatccaaaggtgtctacatgatcaagatatcgctgacaagttgatcgatatctcgtggtaaggttaagaatatatagtgcgctccaaataggctattaatcaatctatcatgcttcaaaagaaactttacattcagtttaaaaagaacaaaaaaaaagaaactttgcgttgaagcccttgaaaaggtaatcaaccaaaaaaggtatgtatatttcccatcaaactataaaatcgtcgacaaaattgtatctttcatttgtaaagctcatggctggacatctagacttctctatcatttgtaccacctgtagtattatgtggcgctcgaatattctccacttctatttatttaattatttatttatatctcttccatttcttgtgtgctaagttgggttttagtcaactcaactactatttccttgactgttccatgaaaaatacaagagcttaaaactgtatagtacacttcttttttcacgagagcatgcttcctcgctttttcatcaacgttatactcactagtcaactactgcaccaactccgttgcatcacattccatgaagaccacaaaagcttatgtaagcatcccttcaatgttttccaatgttttgcggcacaaattcttcccaacaataatcacccaaaaaagaataaaattgtactataagtactcactttcctggcaaaacaatcatccaccaaaaagtaaaaaaaaaaggaagaagattgtgttgtcaacttcacagatagccaaacaaaggttgtacatgagattagctctcagccagatatttgcatagaagcagctagtgtcccagaggataaggggataggtaaacatccacattagagtgaagcttaaccataaactaaacaaaggctaaacaacaagctccatcaggaccaccaggcccactagaactctcaactctcaggtgtaaaatatgcgagaaaaaaagctgaaaagttgttctggtggtggtacggccttttgagagggaaaatccactgcaatccaaggctcacccagctgtcgaccagctgctcatgcatagatatgtgttgtgcactaatgatttgtgtaggatgggtttcaactttgtaaattctgtgatgattggttagggagaaagaaggttatgagatgaaggccaataatgggggcaccgtaccaaacgcagtagggcagcacagacaaagtactccaaactggacctggagctagcacacaattgacaattgcatgcgcatcatgaacagctgaacaattgccccccttggcgcacaagaatcttcggctagggagccaggcatgaatcatgattgctgcaatgaattaaaaatatggtagtagtaaaagagacagatgtcacatctaattttagctacttcctccgtttcattttagcatttatattgatgctaatgaatgtagatagatatatgtctagattcattaatattaatatgaatgtgataaatgctagaatgacttacattgtaaaacggagggagtatttattaatgaagaggtaacatgtataataaattacatctatgctaattctagtgcactaatcccaatagctttattttatttagttgtcaaacatgtctccccctttctctatttttaagtttgtgtgaaaaatgtctaactactctctctctctatctatactattctattcacctcatcaatgtgctattttaagccaagtgtttaggtgtgcatagtccttgctctgagacgccagcttctcttctcccttacacgaggctattaaccgagcgctgcagtgatttctaacagagtggcaggcacagaaaaagaattgcagaacagcagaaagcagtcacacttcagacttgtatcgaacaacattcttgtttctaacttccaatcgagggcctcgaggcatcggcacaggcataatcaggccagtcgattctgtactatcagttccaacccaatccacataaaggtcaatgcttagcaaaagaagtcagaacccacattcagaagtcagaacccacattcagacgtggtagatcgccagatagatagtggtgagtaagaaaaaacaacagtgcagacaaaattgtgttccagcgacgggactcgtaagaattccaaaacccactgggttctcatgattaacaacaatgtaaactatggctttacagcttccaagtatttttgtcttttcccttttttttttacctccacagacataccagcttacgctactgaaaggaaggtaaaagtaatagctaacccgacaacacaagcaagagtatgcccttccccgaccgaccaatttccagtacccacccccttgtgtggagaaccataatccatatgaaccaaccgctatacacaagacacccgaaccacacaaaagcaatgtacctaattgccataccctgaccttgctcttatcggacgaaccctgactgctgcctcataacaagttagcaggaccaaaccatgactcggataacttgactctccgattctggaaagccccctgaacagacagctacggtgcatttccatccaaatcgggcactgttcaaaaagaaaaaaataaagtcataagaactccaatgagtcaatgactgaccagttccgaccattagtaaatagaaagaaatttaccttcaccgaaaccgccaaactgaaacatttcattgtcagattcagattcacagttccaaccattagtgaatagaaatttacctttaccgaaactgccaaactgaaacatttcattgtcagattcagattcagatacagatggaataagaaagggctgttggtcatcctcctgcacccagtatgactcaagcacataaactgccttattatatatctcaacattgtcatggttctggagatcctcaattttgtccaagccatcagcttcatcaaccatcggcacaaatatgttcatattacaagcccccaagttcttcttagcctccccaaccctcaagatattatcaagggcctccaaacaagttaacactgttttggaatcttggtgaacaagtaaatcacaaagcggcttgatgcaaccctgactaacaagatacctggtaaacaaatgatgtgtcgttaagaagttgctaatttagttgcacagaaatgagcaaaagcacatataaataattgtcatcaagcttttcatactctatctgattgaatgtcccaccagatgtggcattagaaattgcccaaacagcctcctttttgacatcaaactcagcatgttgcaacagatgcaatagaggagcaattatgtttgaatcgatcacagcctacaagcaaatttctgaatgttactaatggataggtatacctttcaagatactacttagtgcttttcaaaaaatgaaggcttcccaacaaggggatatattctagagctgcaaatgacacgattactataagcatatttctcatgtttttttcattggtgaagctacaaacctgaatctgctctttagttccagctgtgatgttggagattgtccagcaagcttctctcttgacgcttttcttttgagttgttgtcaaaagattgaaaagacagggaagtgcttggggatgaccaacaatacactgtggtagggagaagaaacattaaggaaggataaaacaaaaactaattaatcagtagtagatgtgcataacatgacacaatatacaggcaaggctgctgcagtagtattaacattaatattgtaaactgagcactgcaaatataaacagaaaaatgtggacattatttcctagtaacagacaccgctactatgtgcaagcatatggatggcagggatgcatgtgttgggcaaactaacattaacctctcagtgtactgtacagatttctctactcaaaggactactactttgatcaaacatcagtagtaatggagtaacctagtgagaaggacttaaaagcagatttttcacagcagaattcaaccaaacaccaatgacatcattaccattaataaatgttcttgtatgcacaattgcactaaaatgttcttgtatgaacaaagagaattatgacatttaaaaaagaataaattccccatttaccattgcaatttaagcactcaggtttgcgagtatttatgataggtttgacaaggcaagcagtttgcaagggaaatatgattttctcaaatttcagggatgcacatcagcaatattaaagtctggaattaccagatgaaacattggatcatagtgaaaatgaacatgttacgaatttaaaaaatgaggatacaaccaaatgaaaaataaatgctcctctgtgctcagatagttaacaccaatttgagcatcagttttctcataaagaattttttaactatgtatctattggtataaattttatacaaaatcaaaatatgccttaaagcagtgcatggaggggctaataaccagaaggactagttcttacagcataacaaaaagagtagatgtagaaaacttacagatattttggcaaaattttcgcaaaaccacatatgtaaggcacaatattgcaacactagcaatttagaatgagagctataaaaacagaattttaagcatggtataccaaaactacagatttcatttcaaagtcccattaggacaacatcataagatctaactccttaattcagcaatttgaagtaaattgaatgctaaatctataatttcatgataccatgcttaaagtcagcactaaatctgtggttccatagtattgtggattaaatccgtagttttgcaaataattttgtccagtatctgcagttttggttaatttactctgacaggagaagtgacacagtagatagacaacaaatgtatcaggagatatggttaatacaattctaaggtaaaatgctatttaatcatgcaacacagagtatgatgtttttcataaaagttaacaagttaactgaaaatcagccaaaggttcaaatataaacacatctgaccatatatttcgtatgcagtttttgagaacttaagaatgaagtagttagcagctcaacaaagattcacaaaagataaaacccaagttagaaaagagaaaaaagaacctgggtctgcgcatcatccccagttacaatgttgccaaccgtgcggagagcaggaatgagcaccacaggtgaaggatggctgaatcaatatgtagttgttcatgtatcagtcctcgaatttagatctatgaaatgaaaaaaccgaacaaaaaagaaaacaaacttacc

SEQ ID NO: 27170 - DNA, 1795 bp, Oryza sativa
tgttaaacttccctatatgatcccacccatatgataggtataagaattcagatgttcaaacttagattatcaattgcttccatgcctgttcacggacatcctctcttggtgagctgaggagcttcacaaagatgggcacagcaccatgttcaataactgccattgtgttggctgctgttcctgaagcaatattggtgagagcccatgctgcctcaaactgaagccacagaaaaaagataagactcagagaccagctagtgattaacatagtaagtaataataatataaagtggcatgcctgcattgttaggtttgaggagcaacggtaatgtagttttcagttttccaacaagcaatcaatttgctttgctcactcgtggcttatactatgttcttagctgtaatggaactgttgatatgctgtaatagatacaaacctggagctgggggtactcctccctggtgaggaattccacaaagcgagggagcactccagatctaatcacctcatcaattggaggacaatggtctgaaacatttatttactcataaactatagcagctcacgggaatagttaacataaatttcaagtgcagcttcagcattgaaatcaaatagcatataaaattaaacaaagattcctgagccacaatgattaattgcagtaggagtttacaaaaccaagggagttttgctataattttgtttacgaaaatgctatacacacgacagatttgtaggactatcgtacaactagtcaacgccgtcatctgtgagcgtgagctgtttaacttagtgggctgtgattgttgggccttttaaaagcccaactccagccgaagctccatattccagcgtcgattcctcttctcgatattactctatacacagccgtgacttttcatcttctacatttgctttctcaccctaaaccctcattctaatcccctttgtctcctatccataccaatcagttaagattaatcagaaaaatttttttgcggcaaccacaacagagtattcaggttgaagctaacagaaggtattttaggctctgattttctaggccccatgaacaattctattaatcttttatctcaattcgtttttcaacatctcttgttttttcatgcttgcaaacatatacatggccatatttgatttttcaactgattttggccatgaatatggaaattgaagccgtggtgccttgcttttctatcaagtctggtcaatcattttttgcttgcatgttatggctttttttagaggacttgcatgttatggctgtgaaaatatattggtttcacatcctgaaggcctaaactaatctaacatctggagtgaatcattttaatagcaacctaagctatatcgatacatgtctcagccggactagcctctggcctcagtgtacagaaagcgcagtacgcaagcaaacaacaacgaggcccagtgacgcgtagtcatatctgacaccgtcattgctcgttttttccgccgtttcagtcgtacatgcgtcggacacatgcgtcgggcgtatagcaaagttgttttgtttaagcacagcttcagcaatgaaactaatcagcatgaacattggacaaaaattccatgagccacgatgattaattgcacaataataagtttacaaaaccagatagtttcgctacaattttgttttaagcgcaacctcagcaatgaagtcaatcagcatgaacattgaacaaaaattccatgagccacgatgatcgattgcagtacgattttacaaaagcatgatagtttcgctac

SEQ ID NO: 27171 - DNA, 1444 bp, Oryza sativa
ttacacagatcaaggctaatttgcgaacaatctattaaaactaattaatccatgattagcacctattcattgtaccactatattatcaaataatagaagagtaattaggtataatatattcgtctcgcaaattagcctccatctgtatattctgttttgttcaaacatccgatgtgatagggactaaagtttccttgtatccaaattaccccttaaactcatcttcaaatctctcattttatgagagcgttttacctatctccacacttattttatgtggagctaaatcattttatgagagcgctttacacatctccacttttattttagatggagctgaaactgtttggctgagctccaaccacagaagaaatggagctgaagctgaaactgtgtcaaacaaaccttacttgtcctgatgatttctcacttggcagataggcactgagtttcaattgctgatgggattaacgtgaaagcttcttgaggttataaggctgtgttcgcggtaggttaagctgggaactttccctccaaacacgcaaaacgaaatggttcattatcacatgattaattcagtattagttattttcttcttgaaaaatggattaatatgatttaatttttaaaccaaatttcatatagaaacctttttaaaaaacgtaccgtttaatagtttggaaagtgtacgcacggaaaacgaaggaggtgaagttgggaactcaaattaccgaacgcagccaaagctgggtatatataatttttaaaagaggttttatatggtggtgtttgggaaggagaaactaaactttagtccctctcacaaaaattttagtccctcccatagggacttttgcttttgtgagagagactaaagtttaggtggtgtttagatccagggacttaactttagtccctgtctttagacactaatttagagtattaaatatagactacttacaaaactaattacataaataaaagctaattcacgagacaaattttttaagcctaattaatctataattagagaatgtttactgtagcatcacataggctaatcatggattaattaggctcattagattcgtctcgcaaattagtccaagattatggatgggttttattaatagtctacgtttaatatttataattaattttcaaacatccgatgtgatagggacttaaaagttttagtcccatctatacagggcctcagtcccttctttccaaacaccacctatataaatatactggaaatctatttaactttatactctagagctcgatctgttttttttttacttttccaactcatctctcttcttttttcgcaaacttggcctaaactatgtgttttttacaaaagtttttttataaaaaaattactttaaaaatcatttttttttcattttttttagaaaactaatacttaattactcat

SEQ ID NO: 27172 - DNA, 22157 bp, Oryza sativa
atctatggttggaattatctccctcattttcttctctcataaagccacatcatattacttttaaatttgggtcatcattctatatactatttaaattatgataaacaacatcaacttatgcaagtttctatcgtctagatatcttacacattatttctatttcttattatcataccaaactcccgcagcaacgcgcggggtttcacgtagtattgataaattagaattacgtttggatgacttagaattatgtgtgtgtgtgtgtgcgcgcgcgcgtgtgtgtgtgacttgtgagggagaatagtaatactctcgagagtaagactatttaacgtagagcagctattgtacgccctgtctcccatagttcaaaaacccatttgtagactcggtcagataaggtgaacatcgtctggcccttctcccaattgagcctccttccattcctttagttcatctccatgaaaactgatctatatgcttagtgtttgcagtattttcgcagcaaggccccctttgattcctacagtgattccttaaaaaaggcccctttgattattggattggcaaaaaagatttacatagaattcgaattcctatgaagtgtttcttgcatgtccctttgtaattcataagaaaacgaaagaaactttccatatatggttgtatttatatgcttccctttcacagcaaaatcaccaagagttcttacctctttgtaaaactttccaatgtttttcctactactccgttccattttaagtgcagttgtgagttttcgtgtccaacgtttgaccgtccatgttatttgaaaaaaaatataattttttttaaaaaaattagtcacacataaagtattattcatgttttatcatctaataataataaaaatactaatcataaatttttttcaaataagacggacggttaaacattggacataagcagtgtaaaccaatagtctttctaggatggaggcagtatgacactaccaaagggcttctatatttttctcctgtgtttcaaaacacatgttctttttaccattggtcacatcttttttactgctttttagaacaagacaatcgaaaaccgatagaaaaatatatcaattatagcgagagatttcgtcttttagagttgatggtaccgaacatgagcatgagagttgaggaaaggccaagtgtgggtgacaatagcggacatggggatgaccctgcaagccgcgcttgtcccgtaggcacactaagacaggtgatgggagcacgtgtcgcgatggaatagagaagacaagggaaaagccattccattccatgtcaatggcgtcatcctgtcctcggttcgtgtttccagcgttctcaccatgcctaggatctcctccatcgcttttgctgctgcatcatccacttcaacttcaagttctaatccagtggtcaacatccaagcagacctcgagaagggtaagaaaacctggttttattcttggtgctagaacattacaaggggaaacattttattacaagtgagaaaaaaacacaaaacatcaaaataggccctcactctatgactctaagaacaaaaaagaggaaaataaaggtactagctcattatagtctagtacacatacatgcacacaacaatgtaaattatttcatcacacacatagactagctagctagctagcacattcagaccgaagcaaagacattaatatactccctgtgacatgagaaaacaaacataagttacttgcagctagctagctcacttgattccatccatgtactagttaatcaacaaaacaacatcaatcacgctgaatatcgacttcactacgatggacgatatggaaagcgtggccttccttcatagggagatcatagcaatcgtcagattcatcacgaggactaaaatttgtgatttgaatccttttcatcctggagtcaccgcagtcatttttggccatgagtaaccaagcaaaggtgatgagctcccctccactggccagttgttccacgtgaagctccgcccttgacttgccggcggaatagaggaggactctcacccacatttcgaccagctcgtcaagtaccccatctccttcaggctggtcacccactagtaacgagtcatggatatttttgtaatgctcaacatcagagatgtcattagtcctcctctggaacatacgttccgcagttttaatcgaggatattgcactggtattgagtggaagcatggaagggtggttaaccaaaagatatatcatatagtttgacagttttctgcagacatccaccaaggaatgattcccagggtattgcctgaggaaaacctctgtgaccatatgcatcatgagaagagcagtaccaaagtctgcggtgagaacatcttgtatctgttccaggaatgagccaacatatctccattctaggtattctgtatcctgaccatcgacttcattcattaagccataaaggccaaacacaactcgttccatagtatctctatccgtcttgacatacccagtgtgtatcagcttgtttatccaagatatctccttagcaccaactttgtttgctatgtttctcaaataggtcataattttgggtgtgcatgatgttggcgggctgatgcctaccaacctgttcacgcaattgtactgtcccattgaattagaccaccgtggcctattctctggccatccaatgcgactggaaaaaagataccatgaaaaacaggcaagccagttgtactttcgaaccttcaaccatgcccacgtccatggagacatcatgaaaataagcactgcgcaaacttcaaggagaagttctccaatgaatagtgacatggtgaccgcaatatcaactttactataccgccgtttctctgttgaaagaaagagggcaaaagcaacaattgaggtagatatagcaatgaatcgaagtgcaatacctcccttttttctaagaagaagtgcctttgtgtagaggtcatcatacatcatgccgagctgaagctgcaccaaacttaattcgggctttattatagtttcaattataattttctccaattctgcttttctattttcgattgatatttcatctccctccaattgtacttcttcatcaccttcaattggtgtgttatttcctgtggattgtatagcttcatcattctcagttgagattttattttccttcggttctactacttcatcatctttaattaatattttatattccttctgctctactatttcttgatctatatccacagacctagtggctttctccaattctactgcttcttcatcttctctcacggatctagcagcttcttccgattctactatttcttcatcttcactctcagagttagcagtagacctgagactgcgtgcagcaaagatatcatggatttgtaacatggaatttaaagcagtgagaacataatcgtaataggtcatattcgacccgttgctcgcttctggcaattgtatctcatacatgtgtcgaatagtggagttctcaatgctttcaaagctcccccacttgagagaccatgacctagtgaaatacttgataaatccagtagcaaacataaatattcctgcaagtagaagctccttgtgtcttccaatagaattgaagaaaacaaaaacagccagaacagcatagaacagaagtttccctgaacgtgtcaaccatgcattcttgtcctccattttaaaagcagtaatcgtgtcctgcccaccaagatgaataagaagaaatggcgcccaaaagaaagcaattgattgggggttaccctcttgtcgtgagaggccaccgagggcatagattgctatgatatctgcccctagataagttgatgagattaagaccctggtgaacttgtcagtgatgtgcacgtgaaatctacccgcaaagaataggaccacttgcattgcgaagctcaagagcacaggcacatatttctccatttcgtatctcatagcacctgttgattagaatagcatacaatatcattcagtgtgacttcggcaattggaagaagcaatgctttataaatggcagtacaatcaatccataccattcatcctttataatccaaatcttcatatttatttatactaccaaaccactcatatagtagattaatttttgtactgtggtagtagacttcataaatcaacagttaatatctccttataataatattggtatagaatactgtatcaccgtaaagttactcttggacaacatagcgaattatctagtcgatcatatactatttggttcaaatatatatatatatatatatatattatgttttagccttatgtacacgaatgtagtcactaccagtaaaagtattttatcttacaaaatacaaataatatacccaccacattaggtaattaacaagggtatctagagaaagttggaaggaaatagacaaagtgccaaatagattgataacctggatttttttttatctatggacattcgtccttgatactgaggtcaggatgtcaatggttctcttatataagaaatatagatcacctcatggattttctctaaataagtcatcgttagaacacttggataaaacatgaaatggtgggtctccatctaatttataaacatctctcaacacaaagccctaactcatgcactttcctctctctgatccatcatatctcctctcccccctctctttctctctctaagccattacctctgtttcccacccacttgtgtgctcttgattctctacaatgctcctttctccatctgcatagaccattgccatggcatcccttcctcccatgaatctacaacaccgcctgcctccatctacctcctaacctatcgtacttcttgctttagagtggaaattccactaggtgccatcccttgggatcaaatccatgctgctggcgaccttagccccacgaccactcaggagccttcctggttaccatcttttatatattgaacgcctctaacccacggacccgccatagatgttgtctagttcatctgttgccatccataccagctcaaatgactgatccactcttccgccaagtgaaacaatgtcgtcccatgcatatttttataatatagttggatggctgaaatttgaggttgaattcaagatgtttagcttactgattgcgtcttattcttgacatgattgatgaagttcatggagattaataaatatcttactttgattttatttatctggcctctaaactaagataataatttattttattatgtcgttaattacctttttatagtaaaattcttagaagattttgtaattacaagtgagtttatattgcattgactataaattttagatgtcattatcttacactagcctataaatttatacagatgagtgtaattgaatgaatatttttttgacgtgaacgtttgcatagtcttcaataaacgtgtttcatcatttatcttttctaatttatttagaaaatataaatggtgaaacatgtttattgaagattgtgcaagcgtctaaaataatggataaaaaatggacatagtggtatgcagaaaaaatgtttagttgtatgagaatttctgttttgtttactgtgaatacaggaaaaaatggctaagttgattatatccattagtgggttgttaaagtgatttattagcacatcagattctattaattagttgtctgttaattagtctatgaggtgagcctaaacatgcaacggttacggttgattgagtgatgaacgctttggatgttatcaacggcaaattttgccgtttgcctcaaaggcagacgatacgaacagacttggtggttgtaccgatggtagctaggttaccagagaagagatcttctatgtatgaatgggtttaaatagcaatttgtgtgatgtttgtagtgccttaattttatatatgattaagactgtgtttagatcaggggtgaaaagttttagcgtgtcacatcgggtatacggacacatatttgaagtattaagcgtagactaataatagattccacctataaactgcgagacgaatttattaagcctaattaatccgttatttgcaaatttttactgtagcaccacattaatgtcagatcatggaataattaggtttaaaagattcgcctcgcaatttacacgccactgtctaattaggtttttttctatatttaatactctatgcatgtgccaaacattcgatataatagggtgaaaaattttaccagggatttaaacaggccctaaatccttaaatatcagtttttatcttttatgacccggcaataaagttagctggccaaccgtattaaaggcaatcccacacgagaaaattgtaagtccccatgaccgactgcaactcttcctcatcctcaacaaccctacccacgtcaccgcctctcctagccatgccgctgctgcctccatacccagctgcaccattgtcctcctcctatcgtgctggagggtggcatcagctgacggatttggtggcaccggatcctagaccactaggaggagaaggagaattactaagtgacttttaatattttttttaatattcaagctaaaagtaaattatattagttatttacaacaaataaaaatagtttgtcaaactatatatattcagagagaaataaatttaatagactctgtatcagattgtagatgaaatatgatatcccgcactttgattatattgatgaatttatgttaagtattataaaaatgatggatatatatgttaaaaatattgtaaaaaataatgtgaaaaaaatgattggatgttgatttgtagaatgaattatatatgatattgcatgcttgcataagtttttatataattattgctagtggatgatgaggtggtatgtttgcatgttgagctttagaattagtaggttataactttatagtaagataggattcatagtgccgttcggaccccatgccgtgactcaaggaaaaaaagcaagatacacgtgtgcaagctgagcaggggtcaggacctccacggggctctctccccacgctactcacctaggatttggctgaagaacgagtgatcaaagttggatacagggattttaggtagatgtggtagaagcgaacgtggcacggaatattcgttaggggaatgatgcaactgaatgccaacgttaactcaacgcactgtaaacgcccttatccaacaaccctagagcctggtttgcggatgggatccccaccgtcccacgatgccgcctctagcgtgctggggaggaagtgagatagggagggtgatgacggcggcaacttaggatggctgacagatctgacattgcgaggcaaaggccaacggattgggcatcaggaaagctagcggccgacggatcaattgtacctgaggctggtggggccgatggcatgaagtgaatgtttgtgctttttaaatcaacttgatctcaagattttattgtaagattgtttagtttactgttgtgagttgatctttatgtaatttgatatctggattgaaattgtattatagattggagtaacatgttgatgtaaccatctattttactttgtccccaaaatgagtaacactggtggtctagatgccagtttttgaaacggtagagattggcctttctatgccggtgatagtcctatctatatatactactataaaatacaacaagtggtggtggttataataacctctctaccactactttagcaaattttctaaattagtccatcatattttatgatattatacaataatctaatatttgtttcaagtaaatactatatattcaaatgagcaaacaaacaataatagcatacttgataaaacaataattatctatgccatattattatatattattttatccatagcaaaatatgggcatttcgctactaaaattaaaattcgatgtgatgcatactagtctggaccaaatatttaaaatataaagtttaattggagtcatatctcaaaccgacgagcatttgttactgaggaaaaactgtttatggggataaagaaaacacacacatatacttaccgatggatggagtcgtcatgttggacctggatgtgcaaacttgctgcttcctgagcctcctcttgcatatgttcccggacctgcctcttgcctgtctggcttcaccttaaatagaagaacgcaggcaggcatatgcaacttgctactggggtctgggagtaccaagtaaacgctagtcttcctggtttctagggccgtggtcgatcgtgtggggactctcacaactaagggcagtctcaactcatagtgctcataagcagtgtctatggtgtcatatcaataagacatcacaatataaactacactctacgatccatggtttcttaaagttagccattaataaatgcatcatctctcttctctaccaatcttatttattcttcatctattatgaaaacattattctctccaaatgcaaaacttgatagtgtctagtgcatagattctcgtgttgaagctgtgtcttgcatgagacccagtttcctcctctcttcactctctcttaattaatatagtgttacgtaagctaaaagtcctacatggcaatgtagttaataccatagacaccatcctaggtggagggttgggactgccctaacgtgggtgcacttgccactcgcgtagctaattgggagtaaaatttatttaacatgtaaagagacccgtgtaatggtactatatatctgagtgcgatggcaaccaagcatattccatacgaagccagctttggtgtgctgttctgtttacaccaactttacatatattgtaggactagtcttgtaaaatttatatacatatccaaaatttcaggcatatactcatgagggaaattaaccaatttcgtctgcaggaacctttgggccactttatctggaaaaaggtggcaactttggggtcatcatacatttgctgatgcatttgggtaagttcacacgatcgcgaccctacaaaccaggaagactagcgtttacttggtaattaaagacttagaactgctaccgaggactcctccgttgcataattcttaacgtttcggataaggttgagatcaaactttaatagctttgcttatcaataactttaaaaatacttagtttaaaaggttgagaacaatatgtatagatttgtctttccaagaactgtaatacggagtaaaagtaaacatgtatttatttattgtgtatattataataaaaaataagattaaagatatattttgaagaccatattattatctaaaacattaagaattacgaaaccggagagagtatatgcccctgggtttgatccccgccgccgtggcctcccattcgcggcgttcctcgtggagggcaaaggaggatgggatgatgcagtcgtcattcaggggatttattttttttattagcaagtgtcattatcttctaataaaatcagggccagctatggggcagtacggatggtgcgactgtactgggcctctaaaaattaggggcctccaaaatatgtatactatggtatcaagcctgataggcttagagaaaagacagaagaccaattggcgatcgagcatatcgtgactgcttgattgtattttaaacttattagtgtgaaattcgttaatgacaatgagtttttaaatattatcttatattttttggtgtatgggggtctttttttttttccgcaccaggccacaaaaagtcagggccgtccttgaataaaaccctcactctgatatgctaactaaaagttgcctgctattctcttttctttacataagcgtagttgttcagtaactgaacctggcctgatggcattagtgctagtgacttattattagcagtggagattaagaaattcagcccaaactgtctacaaaggcattagaagtaagaatgttatatcgtaaatactcctcctgttttcgaatgtaaaatgttttagtttaaaacaagttaattatatttctcccttatggccatatcgcaaaaaataggatacaccagtttaccaactttttctaggaagtgcaaaaataataatccatgaaccaataaagcgtaatagacaacgaactcagaaacgcacttcaatatttttaccagatcagtggactacaataagcccatctaaatttccattttctaatattgatgacatatatagggtggcataggagttctgtagaggaatatatatttaagagtaaattgaatcttgggtcactcttttttgccattgttgcaatttggattaagggtaaacaaactttttcaccttagaccacgtatcgtctttactggtcgtttaagtttggactatttcttctacctctagctccccctctctcctctctttctctctttactcatgggcaggaagaactgttgagattataggtatataatgatttaatatattccataaataaatcatggcattacagatgtatactagcattaacgcatcattagatctacacatgtaaactatacatgtaaactaagctgtaaaacataaacagatcaaatatacgcaacatattaaacacgtaccgaggtgatagaaagaccggctgctcggcaggaacttttcgcgattgcaggcgtcaacgaaggcgcacagcatgcgagcgaagaggatgacgagccgtcacggacgaatagggagcagtcgcgctaaacgcttcccaaaaaccttattgctgccttctcctggtgcaggaagtcgaaggcagatgttccggagacctggtctcccgatcgccggtgcacgccggcgagcgggatgtagtaatctacgagcgacagcgcagcacagagtaggaggcaaaccctagattgatttcgcgtgtgttgcgtgaagacggcaggtcggtttatatagagaagggtcgcttgatcagggcgcccgcacgatctccactatgcgtaaccaaaccggataagtcacgcgtaacttatccagactccaagccgttttcacgcaccggatttttcggaacgtttccaaaacagaaacgaatccgaatttgcagcaaaacaaaactgcaaaaggaggctgcatctgcgcaaggtgaggaatcaattttggcggaccattcgacgtatacgtcgtgcacgcgcgccgcctgccctgccaggccaggcgaggcgagcgagcgcgcgcgtgtgttccccctcttctctccaccacacatgcttcaagtggctaggaagacatcctcccttttaaggaggtcccctttcctagaataagcaaggtggtactaaactccacatgcatgccatcccatgaggtgggcttttgtgattttctaaagaattaatcttcgagtgggctaaggcccatccattaattccaacaatcccccaccaaatgtcaaaatcccactgagatttgcctttaccaatgtactgtttatataccagcggttcgatggagaccgattaaggttgaacatccatctagaactccaagctacacttactcacaacttgaacaatggactacgccttgaattgcaagtcttgtgcaagcaagtttcactcaaagtcttatctggtactagatcgtctgtacactacccctcgggtggagcgtataagtcatactcctaggtctttagtaagcttcctagaagattcacccaaaatcttcatagactgcgaccaacagtcaagctcacaaaggtgagttctttcaagaatgctctgcaggacagcatcttcgctaattaaagccaacagaactcattaaggtatagccaacctgccttgcagctcacgagagtacatgcatcttcacttagagagggtatatattggtactctcctctagtttactaatggtttgttcttcccaggatctaatttacgggatctccgatcacatagactgggttaccaccatagtataactcacatgggtctcaaacccatctccttcgatgtattgtctatcacatttcgtgatagtcccttcgtgaagggatctgccaggtttctagttgtttggatgtaatccaacgttataactccggagtttctcaatttcctgacagacttcaatcgtcttttcacatgtctagacgatttcatattatccttagaactattcactttgacaattaccgtttgattgtcacagttcataaggatagccggcaccggtttttcaacaataggcagatccattaatagatcacgcagccattctgcctcaacagtagcagtatccagtgccgtcaactccgcttccatggttgacctcgtcaaaatggtctgtttgcaagatctccacgaaacagcaccaccacctagtgtgaagacatattcactagtggctttgatctcatccacatcagagatccagttagaatcactatatcattccagtaccgcagggtacctagaatagtgaagccccaattccatagtacctttcagatagcgcattactcgctcaagcgcacgccagtgatcatctcctggattagaggtaaaccggctcaacttgctcacagcaaaggagatatcaggcctagttgcactagccaggtacatcagcgagccaatgatttggtagtattccagttgattcctagcaattctcttgttcttgcgaagcaacaagctaggatcataaggtgttggagaaggcttactatcaatgtagccaaagcgattcgagatcttctccacataatgggactgcaagagtgtaatcacattctcacctctaattagcttgatgtttaggataacatcagctactcccaaatccttcatatcaaatttttgagacaagaataatttaacctcatttattacctcaagatttgtcccaaatatcagtatgtcatcaacatacaagcacagaataactccctcacccccaccatggcgatagtatacacatttatctgcctcattgactgcgaagcctgcagatgtcaatgttctatcaaatttctcatgccattgcttaggagcttgtttcagaccatacaaagacttcaacaatttgcacactttgccttcttgaccttcatctacaaacccatcaggttgatccatatagatctcctcatccagctctccattaagaaaagctgtttttaacgtccatttgatgaacgagaagaccatgtgaggctgctagggaaagtagcacacgaattgtggtcaatctagcaacaggtgagtaagcgtcaaagaaatcttcgccttctttctgagtatagcccttagcaacaagtcgagccttgtactttttaatagtaccatcaggcctaaacttcttcttgaacacccacttgcaccccacaggtttacatccatagggtcgctttatcacttcccaagtcccgttagcgataatggaatccatttcactacggacagcctccttccagtagtctgcatcaggagatgcatatgcttctgaaattgacttaggagtgtcgtccacgaggtacacagtgaaatcatcaccaaaggacttagccgtcctttgtcttttactccttcgaggagcttcactgtcatcctccttagtgacatgttcatgtgtatgttcagtttgttctggtggtgtgattgaattggcaattatttcagaaggttgactagaactactatgtgtatccttcgttgggaaaaaggtagcatcacgagactccataattgtaccaacatgcatgtcaggtacctcagatttaactattaaaaatctataggcaatgctgtggtgagcatatcccagaaagacacagtccacagtcttaggtccaagtttgcgcttcttcgttattggtacattgactttcgccaagcacccccatgtgcgcaagaaagaaagtgatggttttctcccaatccatatttcatatggtgttttgtccttatttctgttaggaactctgtttaacacatgattcgaggtcagcaatgcctctccccaccatgccttaggtagtcccgcggtgtccaacatggcattcaccaagtgtgtccaacatggcattcaccaagtcagtcagtgtgcggttctccctttcagcaatcccattagactcaggagaatagggaggcgtcctctcatgtataatgtcatgttcctcacagaataagtcaaactcgtttgagaaaaactctccaccacgatcagacctaagtctttttatctttctatcaagttgattttcaacttctgccttataaattttaaaatagtctagagcctcgtctttcattttcaacaagtacacatagcaaaatctagtagcatcatcaatcaacgtcatgaaatatcgttttccacccttcgtcaacacctaattcatttcacaaagatctgaatgtaagagttctagaggtgccaagtttctctcctcagcagccttgtaaggcttgcaaggttgctttgattgcacacaactatggcacttagaacctttgacaatggaaaacttaggaattaaacacatgctggaaagtcgagacatcaagccaaaattaatatgacataaacgtgagtgccagacattagcctcatcatccacactgccataaatatggttcatagactcaaattgtgtttgagtgcagtaccgaaacttctccaagatggaggaagtttcgcaataatgcacccggccacaaatttgtcgggtaagacacacttaaggagttcgaattccttagccatggtttgtatcttatgagcctgttcgactacagaacggttgtcagccatcttgtagtcgtgaaactgctccatgatatacagatcattgctagcatcagtagcaccgaatttagtattcagtgcatcccacaactccttagcgtcggtcatatgcatatacacctcgaccagacgatcgccaagaacgataagaatgcatcccacaaagagagtagtgacttcctcgaattgcttctgctgttcagtagtaagaactccttcaggtttgccagtactcacccagaaacatttcatagctgtcagccacagagtgaccctgatctgccatctcttaaagtgcacaccggtgaatttatccggcctcagtgcatcggcaaaaccagccatagtaaaatcacagtgcctataataaggtttttggattgttgagattataagcatataatgatttaatatatttcataaataaatcatggcattgcagatgtatactagcattaacgcatcattagatctacacatgtaaactaagcagtaaaacatgaacagatcaaatatgcgcaacatattaaacatgtaccgaggtggtagaaagaccggctgtgcaggacgtcgaaggcagaggttccggagacctgctctcccgatcgccggcgtgcagggacgtcgaaggcagaggttccggagacctgctctcccgatcgccgatgcacgccggtgagcgggatggagtaatctacgagcgacggcgcagcacagagtaggaggcaaaccctagattgatttcgcgtgtgttgcgtgaagacggcgggtcggtttatataaagaagggtcgcttgatcagggcgcctgcacgatctccactgcgcgtaaccgaatttgacgcgtaacgtcgtgcacgcgcgccgcctgccttgttaggcgaggcgagcgagcacgcgcgtgttccccctcttctctccaccacacatgtttcaagtggctaggagggcatcctcccttttaagaaggtccccctctctagaataagcaaggtggtactaaactccacatgcatgttatcccatgaggtgggcttttgtaattttccaaagaattaatcttcgagtggactaaggcccatccattaattccaacaagaaccaccactacaagtgagcaggttgagcagccacctgccagtgccgtgcttgcgctggaactccgccagcaccagcatcaatgccatgtgattgaaaaatggcctaaggaccttggttgcacttgacagaaataaagaagataagggcagaagaaattccccattgccaagtggaggtaaagctcgagctcaactaccacgacatgaatttagatgtgaatatgtgatgttgctggagcacctccattgcaaggaaaccatcattgcgatggatttgggtggcagcgtccgatttgtgcaacagccacaagatggctctcatcgtggttgggcttgtcctgcatcatcccctacgaggatcagaccatggactgattgggggcgatgcagtaatgtgttcacctcaatggcagcaacccctcaaataggagttggccacagcggcgcagttcgtgatgtggtcaccactcgttgtcttcggtgaaacgagaagagacagataggaccttggaggtagagaacagagcagaaggtagaagaactagcctaaactgaatcaactagtaaagataggtggtttaatatgtaatatgtcactctaacaacgtgcaggtataaattcaactctacaattttttaacaaaaataacaaatttaactctaattattatacgtatattcacatacgtatattcacagttgaatttgatataacatgtagaaatcaaatttaaactacaagtagtttgtagaggtgatcttgtcaataatatatgacaaattttttcataattatttatttgtcatgtaataaatggatgtacatccaccctgattagaatcgactgccaatattgcgttaactggttgcaacatcgtagtcgcattctcgcagcagcagttacgattgagaaactcggttcagagcttgcttctcccagacccagctgtccctgtgggtgcgcgcctggaggaggaagaggcggcggcggggaggctgcccatggccttggcccgctcccgcagcgccaccttctgcaccttccccgtcgccgtcttcggaagctcctcctccaccaccaccaccgtccgcggcgccatgtatcgcggcagccgcgcgcggcagaacgccatcagctcctcctccaccgccgcgccgcctcctcctcctcctcctcctcctctcagcttcacgaacgcgcacggcgtctcgccccagtactcgtccggccgccccaccaccgccgcctcctccaccgccgggtgcccgaacagcgccgcctccacctcgaccgtgctgatgttctccccgccggagatgatgatgtccttggaccggtccaggatcttgatgtacccgtccttctcccgcaccggcaggtcgcccgaccggagccacccgccggcgagcgcctccgccgtcgcgccgccgtccttgtagtacccgctcatcaccgtgttcccccggagcatcacctccccgaccgtccgcccgtccgccggcacgctccgcatcgtcgccgggtccttcacgtccgccgcctccagcccgacgtggtggagcccctgccgcgacttgatccgggcgcgctcctccgccgtcagcgcgtcccactccggcttccacgtgcacaccgtcgccggcccgtacgtctccgtcagcccgtacgagtggatcaccaggaacccctgctcctccatccggaacagcacctgcggcggcggcggcgcgccgccggtcatcaccgtcaccctcctcctcctcccgcccggctgccgccgccgcatcgtccgccgtcgcgttcacgatcatgctcagcaccgtcggcgcgccgcccatgtgcgtcacgccgtgccgcgccacgctgtcgaagatgtccgccccggtcaccctgcgaacgcacacgttcgtgccgccatggtctgccacgccccacacctggcaccacccgttgcagtggaacatcggcacggtccacaggtacaccggcgtctccgccatggcgttcacgatcacggcggcaaggctgctcaggtacgcgccccggtggctgtagatcacgcccttgggcctcgacgtcgtcccgaaggtgtagttcagggcgatcggctcgttctcgtcggccggccaccggatcgcgaagtccggcgacgatccgacgtcggcggcgctcagaaggtgctcgtactcgtaatcgactcgggtgaccttgatcttggcatcaggaggtgatcgttcgttttcgtcgaggagctcgctgatgagaaccaagacgggacgcctggctccggcttcggcgacgagcacgagggctttctgggcgacgccgagcagagcgcggtcgacgaagacgaccttggcctcggagtggcgcagcaggacggccgccatggcggcgtcgaggcgcgagttgagcgtgcagatgacggcgccggccatggggacgccgaagtggagctcgcaaacagcaggaatgttctgcgcgaacaccgcaacctgcgcatgaaccaaaatgtgaatcaccgcgattaaattacagcatttggcatgcgaattcacagcgattttgaggggtgaaattaatgttactgttacagtggcgtggcgcctgttcatacgtaccacgtcgtggcgctggacgccgaggagcccggtgagggcggcggcgaggcggaggcagcgggcccgagtgtcccgccaggtgcgcgacacggccacgccggcgctgccatccgaggcgacaatagcgagacggtcggggtacacgagcgcggtgcgctcgaggaagctgatgggcgtgagcggcgcgtggttggcggagcagagcaccgtgccctccatcgatatcgtcgaactagcagtggagaggaggagagctgctgctgctgctactggagtctggagctcgagagaggcagccatggagtctgtgcatggctgcctatttatagcgcggcagccgctgcaggctagggtagtgaggtggtgggtggggggaggttggaatgcaagccgcagagtgcgcagaatcattgggccgcgttggttagttttctgattcattcagcggcgcggccgcccgccaaagcacactagcacagcaccggcacaatgagggttagaattagattccaatttcgatacttgtaaactactccctcactcctatcttaaatacggttacagttgacatgtatggcgtttgatctgtcttatttcaaaaatttataaaataaataaaataaataagttacatataaagtattatttatattttatcatctaataataatataaatagtaattataaaattttttaaataaaacagaccataaaacgttggatacggaaatttataactgcacttaggagccgaggggttactagtagtatagctttattatccatcttaggttacatgacagcattggaagccagatttcaggtatcatatcatataaaactactggtaataaagttggtgaagtgtcatcagtttcgcacatagctcaccctgtgaatggtcatccagcttgaccgtggatcttctcatccgagatccgacactagcgcccgtcctattcagaccctgctgacataagcactgagctacgcctacaaccgataagtcatgataaaataatcaaaataattaaaaaaaagtttatgaggaaaactactttcatttgtatcaataaatgtttaaaaaataatattgaaaaataaactacggtataaaaattttaaaatcagcactaaaattatcttcaaaattcaaattttaattgcaaccgataaatagataagcaaacaataaaagaaaccttgtgcagctctgtcccgtcaaatccatccaccactctgccgaggggacataaaacaaaaaagagaatcagtgcattcaggcatgtcccccttagaaaagtttgtttagaaaagttcttctagaatctctctccctatataaattatgggatattttaaatgtcatgttaccgttgatatgtactatacttttattataaccgtatatcatattgaaagttcatactccctccgtctcattttaaatgtaaccatgagtttttacgtccaactttaatcgttcgtcttatttgaaaaaaaaaaattaattactaccaccgttccaaaataagtgcagtcgtcgaaatccatgtccaacgtttgaccgtccgtcttatttgaaaaattttaaaaaaattagtcacacataaagcactattcatgttttatcatataataacaataaaaataataatcataaaaaattttcaaataagacgaacggtcaaacgttgaagatgaatagtgcaaaactgcacttattttgggacggaggtagtagtattttgttgttatgagatgacaaaacatgaatattactttatgcgtgacttacgtttttaatttttttcaaaaaattttcaaataagacggacgttcaaagttaggcacggaaactcatggctgcacttaaaatagaacggagggagtattaaacaagacatgcaattagattttttttttcaaaaccttggacataataaacatgaagttgttgcataaaaatcataaaactctcaacttagtatattgttagtatattaaaaaaatttgatattattggttaagaagttctaatttatgtgaaatgctcttaaatccaagccagtacattttaaaaataaccaatacatctagcatatttataacatactcccttcgtttttaaatataaagatttttagattattaagcaaatactaaggtttggttgtttagttatttcagttggaagttgtaattttgaattgcttagatctttttcctagcatgtgattggctttggacccattgaaacagtgatgggaattagcgtaagaatgcttatattgtgacacaaaatttgaatcatataaatcgttatagtttggattagcgaacaacaatatatgtaactcacggggttgatgtctaccttattcaaatagcataataatagcataatagtatctccattttatttatgaatgaatgatttaaaataacaaatgttgtcattattaaacaaatgattttttttctggccaaacaccccaataggttgcaggcaggtgggccataagtgttcacgtctacaaaaatcaacctccattttcgcatatcgcaggctcgcatgtaaaaaacaatttttgcaagcgggtcttttaacaaatcagatattttcgcatgcgaacatgttaagtgatatgcatggaaaaatcacccattttttattctccactcctccctctgtctaactcctcctctcccctactcctccttactccggatgactcctcctcttccctcgaatccctcccgacggcaggcaccagcggcaacgtcagcggtgggcgagggcaagggcgacagcaacggccctcaccctccctcacatggatctggcggtgggctcaagcgggaggccagtgcaggagcggccccgcgcggatccgtcggctgcatcctcccctgcactgatctggtagccgccgccctcccccacgtggatctggtggtgggcggtgaattagggtttgggatgactccggcggtgacaacatctggcagcagcgggctagggtttgggaataaatcagggagctagggtttcaacttttgaatttttgagattttattgttttcagacttttatttttgcatgtggatgacataagcacccatacgcaaaaatctgattttcatgtacaggtgcgtcacgaacacagaaataacgatttttgtagccccctaggtgcgtgcgggttgcccagcctcctgcaaaaatctaatttgaccgtatggaaaaaaaatacattttgtttcagatgggcaaaaaaaatcaacatattccctctattcataaacatttttatgttcaagacaagatttgaaagttttaaaacttgaagattagtgtacaaaatctattaagtacatataatattatatatgacagtaccttttcaggataaatctacatatagcttttttttttccaaattaagggtgagatgttattggtgatcaaacttttaatagtttggctgaattttactctaaatatcaaatatttatgacctttgggagtaatatgtaataagcttaaatataattataatgaaatgtctcttggtgtgacatgaata

SEQ ID NO: 27173 - DNA, 6505 bp, Oryza sativa
gttaacaaaaaaaatggtggaattcaaataaattttataaagaaattgatttttagtttgaatatataaattggctgatttactaacatggtgtctgcaactgatgaaaatgagaactcattacacgtttaaacaaaaaatgctataagtgcatgattaattaagttttagttattataaacttaaaaatatatttattcaatatttcatagtagcgtttatatagaaaattttcgtacaaaacataccatttagctatctatttatctattatatactaaaagtatattaaacttcctacaaacactcttaaaccgtcttaaaccgccatgtggcactcctataaacgtttctaagccgtcatgtggtactatctaatctcaccattgatttttacttaaattggtggacccgttattctacaccattaggttagatctattattgcgaaatatagaaacgatactaccgttctcaggtctcgtacgtacgacgtacgagtagtaggtgcaatttaaatttcaactgttcacggaagggaaaaaaaccatactacttcacaaatataatataaatatatatagttaaactaagatatataagaaaaacatagaatacccaataaatgttctttaaacaatcttctaaattattttgaaattatatatccaatttgtgatcatgttgtatttctttaattaaattataaaagttatattatagtcctaaatacaccatggcacatgaggctgacatatgtatgataatttttcaaaaaaatacatcatattttagggagggaaatatcacttcacaaatatacaacattaatttaaatctgcatatgtaaaaaataaaaacaacacaatttagttgtgtttttcaagtaggtctgattaaattataatttatttgagattaagattctcaaagtagctttatacttttagaactatttgactatatatatttgtcaaaatataaataataacatgatgctctggttattatcgtggtgttatgtctcattagatataattttttaaaaataccatcgaacgattgacctcagtcatattcaaaagagagtattctatctatataataaaaaaaatgagttgtaatgatcaacaacataaacaaatcgtgtctacactgcaccacaaatctactcaaaacatttttaaaaactactttggtcacctccatcttctctttgttcttccctaaaggacaccaaacatggacaacaaagtttattatggtgtcgcaagtttagtatggaatatacggctaagttaagacagtcccagtggagaccaccattgctaatagtactcaactttctacttaccaatgcaaaactccatgagtcctatttcattctttggttttccaaaagtctaaatcctatttgtagtcactatgtgctatattaaattttttatcggaaccaaaaagtcattttaatacttattgcttgcatgttcattggttttgtcacatgatgaatgagttgactacaccttgatcttagtgaaaaagaaatataacttagacttttggaaggagggagagtacattaaaattatgctccaagctggtcttcaggagcatggctatatcgatgcgggacccatgtttcaaggcaatggagaaaggaagtcttggtggctatgatcgactttacccatgatgatgtgaccatcaagtatatgcatacatccaagcacgagaaatataaaacatggctaaagaatacatcgagtgaatggaggatctacaagatattaaaatccaacgagttttggaatctagttcggcctccagagatagcactgacttcaaacggacctagcgccttcatgccaactccgatttgggtaatcttggacttcatggaaagattatctctctacctttcaaacgcatctggtctcatgtccaaattcatctcgagtcaacgggaatcgccaaaacaagacagtgctgttgctgaaaccaaacttgagccttaggctttgtaatagactaggcccatctcggaagtgtctccctccacctccacgaattagcacttaaccctagctttgttttcctctataaatagctttgtacatcctaaaaaaacaattgggttttgtttagttgaattttgccaagtgccattcactttgtctctagtcctcgctcgattagtcggcgactattgattcagagcccccaatagttggtgtgttgatttgccgggtcaattagatctactacttcaatcgcaactattcctttgtgcttaatcacctattcgcaatatttagattgcatcttatcttgttcttgtagtgttctctcgtttgcattgcagggatcatcaaccgcgtatcacggttggtacgacatcgtttgtggtgtaacgattgcacggcgtcctggacttgttctggttggtagccacgtcgcaaacgtcgcactcgatcaaagcgagagttatcccctcaccagaagatcgggccacgagagagagcgtcatcacatgagagtagtattcatgtttaactttaatggtgatattccattaatggatagaagtggtcgtatttttacaatatttttaaatggatttagaaaaaaaaatgagacataaaacgtaagtagtggataatttagtgtattaataatgtattaggttttagggtttgttgtcgaaccgacaactgcatcacgtcgaaatgcgtggttctctcaatagtagttggaagtaaacacaattgtattacatagtgaaaattttttaatctccctattacgtggccttagggggctatttatagccctattacaggttcctcctttagggtttaggttttacaggggaatttacatggttacccttatgatagggacattattgggggcacacagtgtcctttacatgtatgggcccctattaggctaaatagctcggccaatttatttggcaaaatcccccgaaagcgcaatggcccactgggcctccttacggtggggttcggtacttggcgaagcctgtgccttcgtgccaaggctttcacctcaccgtcttcgcccatgcggccttctaacgaggtctttgcctggcgaagcccgcgtgttccgagccacggttttcgccatgtggctttcgcccatatggttccattctcgaccttcgctgcttgcctccggtttgagcctgtcgcctaagttcttggtttcggtagatctggccgaaggccctttgtggtgtacctccaacagggttaattggttttaaagcataatttagtggtgacaatatgagaatttatatgtcactcgatcaaagtgtatttttaatctgagatatattcttattattttataacatttaagtagaaatagtgagatgtaacttcttttatcattatttttataaaacattcaataagatgcctgcgcatctacgcgggctttctttctagttttagaaacatgttaattgaaattaaggtagaatttgttcttgaccagaagaacgggccctaaatttatcaatgcaaactgacttagcaaggctaataacgacaattatcacatcatgcgtttacatgtacggttggatccatgccataacaaatttaccatattagaaaaatgccacccctattcgtgatatcagttgagtgccactggaattttgtaaaattggatcaatgtcatcgccgtcacagtttccatttttcacatggaccaaaataaccctgaacgtgggacccacacatcagtttcatcttcttcctccatcctcctctcttccggagggcatgacgatcctcccgccgcctctctccaatgggaacgactgccctcagcggcggcgcgcggggagaaggctacaaccacagcggtctccccccattagatctagttgggaagcgaatcggtagcctcgtgggcatgaagtcatcggcaagcccaatctccccaagtacactctcccattccgccggcgagcctaagctgctcctcgttgatttcatgggcatcgctgatgagtaggaacgacatctagtggaagagctcattgatgacgagggaaggaaatgccatggccgcctcaccctgtcgccgcagcccacggatagccatggcccgtcatcgccggcatcgtcttgccctctcgctgcatgaggacatccatggctcgccgcccgccatcgctgtctttccctcttgccgccctcacacatccatgcccgcctgctaccatcggagtcaccttgcccacgcgctgctgcggacggctgtggcttgccacccgttgttgctgcctttccctctcaccgcccccacacatccatgcctggagaggagaagagcgcctggccgacgaggaagaaggagaggagaataaaagaagagagaataaggagagcatgacggaaaatatgacgacgatggtatggatccaattttgtaaaattttagtgacacccagctgatatcgtgatttgcaaatagtaatagtatttttctaaatagcaaatttgcaatgataggatccaattaaccctaatactagtagtagtaaaatagtactaataattaaatgttcatcacttcagtcttcagtggtaataaatagtcgagcccagcacaggcctcaggggaagcgaaactatggcgaacgcggggctgcgcgcgtaccgggaggtgctgcggctggtgcggcggctgccggcggacgcgcggccgtactacgccaagtacgcccgcgagaacttcgtcaactaccgcgacctctccgctgacgacgacctcgccgccctcctccgccgcgcctacgcccactcctcctgggtcctctccaaggtgggtggtagtacggtacctaacctacaaacacgcccgccgcttgagcggagcgcgcgcgctcgctcgccttccaccgcatcggcgtgctggttcaccgctctttgctgccttgcagtactcgatcgacgcggatgctgcggcggggcggctcaaggaggtgtgcggcgccgagggcggagcgtgagcacgcgtgcgcgcgaggtgttcgacgaaatgcttcgccgcgtcatgccagcgtcagttagctctaccccgttgtttttacttgccttgctagcggttggcgggcatttggacttcttgttttttgcaacagtttagttgatagttgataaaaatgtgtggggaataagttgaatactctgcttctgcacaccgtattttagtttgatccctgctgccgcctgcctgtttcagttggtgttgaactcaatttgccgggattagcaaattgcgtgtttaactgtgggataaccaagcaaacacactttgcaaattttgttggtcaaatctagatgttaaattgcctaagagctccaaatgattttgagatagaattacttttgtgaagagtgtgctgtgtgaatacaaaacaaaacaaaacgaactaaaactactggcaaaccatatttcttgtgactagtgagtgtgcacgtgcaaggcacgttgaaatgtaggcgtataggcaattgtcaaagtttctgttgtagaatgtgcacaaaggtcgacttataggcatataggttagttaaagtttctgttgtagatcatgcacaaaggctatgtgaagcattaggaggagcgccaattggtgctgcaagtcccttttgtatctacctcataatcatttgcctcttcaatggcatttttaatgtcatcgaaagtccattgcaatgatcattattagcagtttatctttttttttagcaaagggactgagccctccatttccattaaagaaatgatgtagctaatacaaaggagtcatcccatttaagggttcatgtcttcagaagtgaaaaaaacagaaacacaggtgccagagctctttgctcactacaatcattttgacctgacaaaacaaaagatcttctacttgcaataactcccagaactgaaccagactttagctgaggattccggtccacaaaaaaaactctatcttctgctcttttttgtccatccagcttcatgtgttgtccagcctgcacacgctcgatctccatccatatcttgatttaaagacttcacttgttacctgctttaggagcttggctccccaaagcaactttctttgcctttcctccgaaatctgtaaaataccccaatcggagatccaattacaagcagcaaacaaaatttcagaaggatcagatggcagtttgttattctatcaactccaatcagcagtagctgtgatgtcattctatcacagttttttgttcaattctccaaggtttgatgtaaatttctgattggtttaagatcaaaagcacaacaaaccatattccaggtaaatctagccatagggcaatcaaaaatacaaattctgcaaagtctctttttttctcacagaattgacatgtttctgttccttttttccatcctctctttctcaagttatctttggtta

SEQ ID NO: 27174 - DNA, 2412 bp, Oryza sativa
ttttttccatcctctctttctcaggggtttttatctttggttaaaatcctattttgcatcatcaagcccaacccaatttaaaaagaaaattcccttgtaatttcctttttaaaaaaaggaattttgattttccagatttttttgtgtatccctattggcctggggattgtgtcatgtgttttcagagctttataaaaagatttaacactaaactctccatttttttgtcaaaatccattttaaggtgtctctccctcctggtaatattaccgtctcacataagttttttatattgatccagtctgcaagtctatctcctgtcaaatttcttctgaaagtaatagactcccaccctttgtttttaacagaagttaaggtcactccatttgcattggtaattctgtatagattaggatatctttcagccagagattgcttccctgtccatttatcctcccaaaccaaagtattacagccattccctaaggatatttcacagaaatgaagttttcttttatctccatcaatccatgccaaaaatgggaatctccctgcttgattttttgtgctgtaagtggtttcttttttagatatttttctcttaacaatttttgccataaagcatcagtattctccaacctccacagccatttccccagaagtgtcttgttcatagtttccaaatccgaaatacccaagccccccatgtctctaggtgaacacactattggccattgcaccaggtgatattttctaatcccctgatcttcctgccaaaggtatcttcttctaaagtaatcaatcttttctagcgccccttttggaattctatagaaagaaaacatatacagaggggtactgctcaagctagagttaattagagtaactcttccaccaatagactgaagtttcccttgccaacacccaactctcttttctattttagcttcagcttgtttccagtccttatttaagattcttttttgatcaatttgcagtaaaaaaatgcgaagagaaggattgcgaagcgctaatcggtgctaatctggcgctaattgcagtgttaatccgacttgtaatttacattgttagattagaggatccaacggttagaaacttctgggtacacttttctgggtggatgtaggaaagaaacaactggtactttttatattagtatagatgactttagccattggttgctggagcggacacaaaacgtagaacgggatttgagattagcattcacatcaatgaaagggcaccatcatggaaacctgaaaacaaactgaaacctctcatgcttactcggaaatctaaattgatcaaactcaaaatcaaagtaaattcaggaagacacaatgctgtcacaattcatcaaagatgtgtttcagcaaaaagaaccaagcgaaaagagaggagttgcatagaatgctatttaacagatcacacaatttaaccaaaaaggctctccagtggagatctgtgtagattgaatgaacaaaaaaatctgcatttatttaattgtcaaatacagcagcatttcttgagatgaagttattgcctctgctctgcctagtatgagctggttacaacttacaaggaacttgttacattttctatgtaccgaatgaaaataaactctatatatgagactacaccatcttctacgactacatctaagaatggcatcttcttcatctcctctggaagttgaacttcatgattgcaaaactgaacaggaaagcgaacatcacagtgaaaacaacatgcacaacggcaacaagccatagtaagtcatgatggaaaccatagtattccgtaatgaactgagccacggtttggtctttgccatcaagtttagtttggatatttccaaactgggaggcaaccaatccatacaatgtccatgcaacagggcaaatccaacagtaccacctccaccagacaggaattttctgaatttgcgagagttaaatgcatgagtcacattagaacaatatggtaatgaaatctaaatgaaaacaaaaccatacgcggcaggaaagtaacctacaggtcgaggtataagatatcctgaaaagaggttccatgcattgtagattgctggtgaaatgatagctgcaatgctctcgtttggtgtcaatcctactgccatcattccgaagaacgtgaaatacagcaatgtgaagtacatgaagaacaggtaccaaatgaacttagcaacagtccattcaaacccaatcattgagtagactagtacaccatataccagtgtctgaactaggatgtatggcaattcgatcgcaacctacaaaagagacaaggaagtgaagttagggttggagcccaaaagaacttatgacttttaagttttatgaacagtagtgaatagttcttttcattgaacta

SEQ ID NO: 27175 - DNA, 616 bp, Oryza sativa
attttattttaaacacaccgacaccacatgtcgggttttgaaggcttcacaaacccatttcccaagttttcgacaaacaacggtgtatgtgggttatttggtatacgcgctcagagagcacgaataccgaggtaccacaagggtggagagacaaggaatcagggtagtacgacctacggaaattagtgcgactactgggtaggtccgtcggtttggcacgcaaaccgaggccaagcaagttaagtgtgtgattctaataatgcaagttgcaaacaaaataataatgacttttcaattataggggcaattgatcaagggtgacttgccttgctcaaggtcttcacaaagcttcacgaatcttcgagaaaacccgcgatcgacgaaaatccgataaccgcaactatacgcaaacaatcgaaaacctaaacaaaagaccaaaagaaagatcctatttagactaattagtagtgccattaaatagatctcaattttatgtgaatactggaagttgaacggagtcaatcggaccagcggttggggagatatggatttcctaagattatttggattttctgtctaaaggaaaaggatttatcaaatcctttggaaaagaaaa

SEQ ID NO: 27176 - DNA, 652 bp, Oryza sativa
cgtcgccgggtccttcacgtccgccgcctccagcccgacgtggtggagcccctgccgcgacttgatccgggcgcgctcctccgccgtcagcgcgtcccactccggcttccacgtgcacaccgtcgccggcccgtacgtctccgtcagcccgtacgagtggatcaccaggaacccctgctcctccatccggaacagcacctgcggcgacggcggcgcgccgccggtcatcaccgtcaccctcctcctcctcccgcccggctgccgccgccgctcgtccgccgtcgcgttcacgatcatgctcagcaccgtcggcgcgccgcccatgtgcgtcacgccgtgccgcgccacgctgtcgaagatggccgccgcggtcaccctgcggacgcacacgttcgtgccgccctgcgccgccacgccccacacctggcaccacccgttgcagtggaacatcggcacggtccacaggtacaccggcgtctccgccatggcgttcacgatcacggcggcgaggctgctcaggtacgcgccgcggtggctgtagatcacgcccttgggcctcgacgtcgtcccggaggtgtagttcagggcgatcggctcgttctcgtcggccggccaccggatcgcgaagtccggcgacgatccggcggcggcg

SEQ ID NO: 27177 - DNA, 959 bp, Oryza sativa
atctgtacagccgggtatggttgttcaggatggtcgggcctgtccagcatgggtctcctgttcagtgttgattaaaatttctgattaactactctactgttttatttctcttaaatattttgctaaacgctgcttttgcaaatgagcctatattatgccatcctttggtatccttgtgcacttgcatatttgctgtgtggcttgttgagtatgtcatatgctcattcttgcaataatcaatcaacctcagttgaagaaaaagaatccagaaggagaagacgtttggcttataccccagttgagctgcctgtgggagtggagccggagcttcgctagattttattttccgctgcagttttcttcatggtgaggactaagtgcctcttaagtaagtatttatcgttgtaattaatttgatgaatctgtatattaaattgtcagtttgtgtacctcggctgattcctggacgaggattttatgcacaaataagttcggaaattactagtgaatttccgggcgtgacagtagcgcccgttccgtcgtggcgcctagcggaaaaactatctcttaaaaaccctagttgcgaaatctgtttctttgcttgttgtctagtgtccgtgccatctcagatctcaaatccccaatctatcgtcgagttcaatcccgaatccaaatccttcccaaatcaaatcgctccgcaaaagtctatttagcctccctcgggttcgatgggccgaatccctctcggcccatctccccctccctcccggctctctctctctctctctccccgctctaccgtgagccgcgccgagccctccctcccgctctcgctgccattcccgccgatgccgcccaaatagtcacgccagccgcgcgcgcgcgcaccgtggtggccgaccggccagtcaccgccgccgtcagcgcctgccgcgcttgccccgcgtctgccgcccatg

SEQ ID NO: 27178 - DNA, 5184 bp, Oryza sativa
atcgccgaccgacgccatcacgtgtgccgaaggggagtcggtgcgcgtttagacgcggaacgggactccggacgcaccctctccttcctcttccccggcccgaggccggagagatcgctcccgtgccgtcggcccatcgtcactgcgccccgtccgcacggtagtgcatctccccgttctccttcctcaatccatctcttccccttagttctcggtagtagcatgtgtagcctccccgtagctagccggcgccgccccgactgctaccgtctctcgccgtgtgctcgccgccgtcgccgcccgagctcggcaacgcctctcgtcgccggcctccctcgatgcgattcctcctaatccggcgcaaggggtgggttcccgtagccgcgtagatgctctcgccgccgggaatcggcccctcgtgacctcatcgccgtttcccccttctcccgccgtcggttgccgccaccgcaatccgccaccgtcaagcatcccccgtcgaatccgagccattggctcgtctcccctcgtcctgtgcaacatcccggtgtgctcgccttcgcctgaattgccatggttcgctccggccctcgccgccgtcgtccgccgtccgttccgaccggcgtcgtcgtctacctcccaccggcccgcgtggcagccacataggcgccacgtcggcgccacctcgggcgtgaccgggtcaagcagaccccggtccggcggtttcctcccggcccctcgcgcgcgcggtccaccgcgagccgtgaggctgcgagtgggccccccgcaccgcgtcctccgcgaaccgcacgcatgcgccgcgcctccctccccaaaccctagcacgccccgcgtgcacctcgctcacggtgagccgagtcgacgacaagcgggtcccacccgggaccacgcgggatggacccggcccaccggctctctctctcccctccccgcccgcgcgcgcgccttgggccgccttcttgggccggccggcccattaagctcggccgagccgcccctttctctcgggccgcgccctagccgcccgagggaagtgtaatttccctccctccttcttttctttttcaaaaaggatttaaataaatccttttcctttagaccaaaaatccaataatcttagaaattcaatatcttcccaaccgtaagtccgtttgactccgttcaacttccaaaattcctcaaatctcgagatctatctaatggcacgcttagaggtcaataatagggctttattttcgccgtttgctgagtcgtcccgtttcgcgtgtagtttcggagcccgaagacccgcagtgcgaggattttgaggatcaagctcaagatctcgagcgaggcaagccacctttgaacatcttgagcctatatttgaacttaattatgttgcttgaaaaatattatgcattgataggatcgcacttaatctgcttgtcccgtctgcaaggcagattagcggacctacctaatttgttgcatttgacccttccattgtaattgttataccatgttcccttgtacccacctagttgcgcctcggtaatcgtgcactctgcacgggtatcgacggtcgccttcaaacttaaaatctgagaaacatcttgggtaaaacttggattttacaaaagacttggaaaacccgacacctgggtcggtgcttgcgaactaaatgaatttccaaaatcgcggaccggggaacgtaccgggtgtacggtttcccgttcttgcacttaaggaccatttccttggaatttcatccgaacacatgacaagtacgaccacatgggtggaatgggacacccctggctgagtaactagcttatcgggggagccatgatgctaagagacatgtggattcgccggggtggtgtcggagaggacccctgggcttcctggcacagtatggtctgggacctaatctggtgttggtctgggacccctctcgttggcatatggtgaacctgtgtcggctttcgaaatgccttgtcatgaaagccttaaggtctctagtcgtggccgttctgcacgggctcgatgatccgggttagtaatgtcgtgtgggtaaagtgtaccccctctgcagaggttattaaaactgttcgaacagccgtgcccacggtcatgggcggatgtgaggtgattcctagcgtagttttgtttgactactgccttgtgaaatttgctgttgtggaatgggtttgatgtttggaaaatttgcggctgatgggatcagccaggcccgggtggccgtttgaaagctgttggccgggtgccaatcttggtcaattcaaaagactaatacattgcacatactccgaccggacgagacgcactgtctcatccgtgtcgtttgagaagcactcacttagttgtttcagaaaagagttcaaataaaatcaattgcaaaaacaacagcctttctctgaagcctgcattaaacacttatttcccatggctggctgagtactcccgtactcacccttgctctatataaataatcccccccagttgctgaagaagatgaagcggatcctgctgacgaggagttcttccaggagcaagccggctacgatgagttttagggtttcggcctagttcccaagtcgcgcctgtgatgtttggtccaagtcttggcttccgcttcccttttgtaatgcagttgtgagctcgggatctgtccgcagcccaacatgactgtactcctactctataataaagagacctctgttgctgtgatattctgtcttcctgtgataccagcactgtttcctgggactggtatcgattaacaggttaatttggagcgtcacgggctagttgcgctcgggactagttcggggcgtgacaccatatatgagagacaccattcacctatacttcaaatacaattttctaaactactcatctaatctacgatccgattacaccgttgtgttcataacaattaaatctttacaacaagatctcacattattatattttgatgaaaaatcacaaattacttttatgatatgtctaaattacttttagatttcactaagttacttcttagacatacaaaagtaaattcagaaagctttaaagtaatttacatatattatagaagtaacttataaaaaaaagtaactttaattaatacactttttcattgaacaaattatcatatatttaattatcatatatataagttactttttgatttgattaaaatacttcctataaattcataatgctctgaggtgattacttttattattgtttttagttaatttcataatttgtgctgattaatttaatttctagatagagtcatgtttttatctctacaacggatttacttcaaataacatgccaaagttacattcgttttgttctaagttatttctataatatatgtaaattacttctaggctttactgaatttacttttgtatgtctaagaagtaacttagtgaaatctaaaagtaatttagacatatcataaaagtaatttgtgatttttcatcaaaatataatcatgtgagatcttgttgtaaagattaattgttacgaacacaacggtgtaatcggatcgtgtaatcggattatagatcggataagtaatttaagagaaaatttcataagaagaaaaaaatatgcacaacctaatagcaaaaactacttgcatgcatgtctgtaatgctactagtacttttctcacgtaactgtccgcgtcgctcgttaagtctaaatcgaaatgcctcttgaaatagtttttgcgattgctctatgttcattttttcttatgtgaattattagagctatttcttctacttcaagtgccaagttttatgtttccatattataaggttcataacttggtgattctacggaaatttagttcatccagattggagctaaaatgaattttatatgcaatttacaagttaacctatttttctgttgattagatattcactaaggcattttccttatattttccagattttaaaaacatagggcccactggtcagtgagagatcttttgcagaaaggtccctagagtgtgggggaatcaaccctcactccaaaaacgtgtctatgacatagtttataaagactcccccattttcttttatatttacgtttcagttcttgaccctcctgtcagtgatttagatgtttacatactgagacctacagttgttcgaattctcaaaacaaagtccctgcttttctctacctcgttcattcgatacagaggctgagcagagccatggctgagctcgatctcgagctcaccggcggcaataggtggctcctttggggttgaggtcaaaagatgaaatgaagagcacgctctcgggattccattcctctacttttctcggattgcggtcatcggagtaacgccggcggcgagtccgagcggcggctgtgcacgggctgctactgcatgtgcgcctatagccatgtagtgatcaaatggatgcatgaatgtggcattaggaagtgctatgacgctcaccgaagcttgaccgcggcttgaaaaggtctggacagcggtgacagtggaggagatggctcggcggcgatggatagcgtcggcttcacggcgacggtttgttccggtcttcgggctgccaaggagaggaggggaatggatcaaagatcatctaaggatgcttcatatgcgaggaattgcgccgaagctcacccgagagcgaggaacggacgacgttggccggcggccggacttgaggaagaaagagagaatctccttgtcggcggctcttcagcgcgattaccttggtaggccttctcctggaaccttggcgacgatcatggcgcagcggctcagtcggagatgcactggatcatcgggaacggctaagcgaccgatggcggcgctctggacaccgaggacgccgacgagctcgacgcaatgtgttcgatccatggaaagggaaaataaagaagaggactgagttaattatgatccgtagatacggttgttaggattataatatggcgaagctcactagagaagatttgtaacgaatcaaacacctttggttgagagaaaggattggatgtttttggagatttcgagggagttcttcatggcttttcttagaggaacacgatgagggatagatggagattagaatagcgagttggtttggtaaatgg

SEQ ID NO: 27179 - DNA, 14027 bp, Oryza sativa
  unsure (1)..(14027): unsure at all n locations
gtagatgttacctaaatgaaagatggggtatggggaaaaatgtgagtgaatctctcttgctctttcttcttttgataaataccaagtggattcaatggtgtgtctaacccaggtggtttgctaaagattggatggcatatgggtccaagttgatgtatcctaggtgtacgtgagaggtagagtagtagctagtttaggtatgaaatgatttttattcctctctctcacctttagaaaaatgaaatataaattaaatgagaggtgtgtagatgatgtgttggctgtgagtgtatgacacatgggtcccacaagagcatagtcccacatgtaagagagagatgtgtagaaggagaaacctagaagctctaaattttgagtgttaaaactataccaacatgtagtttatttcctactcctctcttccatttaatttagaattttggggagacaaggttgctacaaggtagacaagaatttgatggttcaatgtgccaagttccaagatttaattactttttgagttaccatggtaatttagtaaataggcctaagatactatgttgactgcagtctaaatactgtttaagcaaattatggctctcatctcatgtggttacattttgaatttaattcagccattgaaccaggtggtagagcacactatgattagcattctgactaagtggtttagctagataagttatgactaaattttggtgaatgttcaaagtatgctaaatgatatgctgttttttccagatttctagatgagttgttggaattatttgagataccatttgatgtgataaattcaaactaaaattactatagactcagaatgttgtgtaatatttatgagaattttggtgctatttattgttgcttaatttagttttaggaatttttgtttagacatgacatgcatatgaaacctattatgagatgcaccaagaatatccaaaaacaaacctaaaataataaaatgcacataccaccaagtatatttatttccatttaggtttttcttattttaaaacatatatttccatttgtttgcttttagttcgaatattttgcttaggttagaatgcaaaaccaaaaggcttaaatttctatttaaaatttaaaccaacttatttgatttggaatttgttaactcaagattttataaaatctaattttggactagctctaatcttgtcccaacaaaactttgtgttttatcttattcacaggatttaaactctaagatcaactattatatatgctctcaaatgctttggttttcaaaaagttttaaattttcctaaaaaattttccttcgtgaaattcctggtatcttacagccgattattgtaatgaaccaacacttacagcaggtacaatcactgcaacaaatatgtcttataaagacatttttgtaatactatagacacatttttaaaatgactttacagtgttatagacaattcacagccaattcatatagacccattcccaacatcacatcagccaattcacattcatattccatcatagcatagccaattcacaaaatcaaacacatatacattcacatccacaacccattcacatatatatgtcattcacatccattattctctccaaaccgccgacatgcatcaaaacctgtaaaactaagttataaattggaacaattttatatgtaactagaaatgcaaatatatacagagacgagctacctaggactttactctaaagaatttaattgtattacaaagaatatttacaaaaatcaaatgtttgtcgcatatgcattgcaaatgttctgccattccgagacgagctaactaggacttcactctaaacatccctttcggtgacaagatatcatctagtatgaattgtgctatctcctctctaatgatttcgaagttaatttccggaatgcttgaaataaattcctgcatgttcggccccaagttagtctacatacttgtaaatttgtcgtcctatgtgtgtataaacaattgaaatacacacctcagggtcgagcaatgttaccttttctgcgaaactcctcatgttatggcagacatggaacccgcactagtcgccaacttgttgatgtattgggaagtctttcttgtgaccaagtttgggatgcccatccttatgcctcccgcctcttgccacatattggttccatgcctcgttcaaggcagatttgatggcttgatattggagttaaggtagtgtacccggctccacttcggcgttattaccagaagaatccagtgtcgcctgcgaaattattaaattgctagttacatactacagttgtacgcgtctagtatttgagtataagtacggtacatgcttacagttgattgtaggcacacataatgaagtccttgtcttgacgggcaaataaacagtccttgatatagcccaccatgtttgctcgatcgtttttcagtgttgtctcgatgaagacaactggatcgagtaaggcaacatggggtgctttacgatggacatgcttccaggttaacctacgagcaagacaagagtcagggtaagcttaattcgtggacagtcactaccatatcgcgtaccaagaaatacttacaaggagtagcacttaaggaggttggtgtcgatcgctcgcaccctgtagaggtcccatagacctttgaagtctacggcgatgaaggcagtaggcccgaggaacggctgaccatcatgctggcccaacatggaggtctctctattcttcctccttgcgttggacttctccatgtagtacccgtgcaactccttgcatgcagggcccatcttgaataaggcatcgtctccgaccaatggcatgcccaatgttgaattcggctgnaaggctttggagaagcctactggcgccttgccaagatcaagttctttggggagatggcacctttatttttcctctccccgttccagcagcttttctgcgtgtgtcaagcttgggtggagaagatttcaccctcttgcttcttttggcaggagggggaggtgtggcctgctgtcaacctccatactgtcgtccccaaaatcagtatcatactgtaattggatgtcacgccctgaaattcccctttccagctttaaaatttgtaaaataaatcgtccgaagaaattgttgttcttaacctagagatgaatccctaattaataaatgcaaaaaataatcggaatcgacatgtggaattttttcttggattctacatgttaaaatatgctaacaggatttttagtggaattttcagagccttggaaataattttaaccaattaaaatgagtaaagggtaataataaatctctggaaaaatccttttttctttttctttttctgcattttttatatattnttgggctattggtcaagtccattcgctttctgtgatggctttccttagggtggggcaagtccaagcagattcctccatcctccataacccatcagggttacggacaggtggggcccacctgcggccccttcttccacctcccgccgtcgaaaccgccgcctactgccgccggtttccccgcttcccgcgcccactccgaccaataccgcacgcccacgtcgccgctcaccttccccacaccttccgctagctcgcgcgcctgcaaatggcgggggatttgctcttttcccccactctctctctgctcctccacttcccccacgtcgccggctaaatcggccaccttcccggcctcgtcgcccctcccgaggccttataaaccatccctccattcccctccaccttttcctctttccaccgctccctcccgtgccctctatcgctcccacgccgccacacccgccgncgncgncttttccactcctccggccgccgctcgccgccgctggagccgccacgagccaatccgctgccgccattagcttcgccgccgccaaagctaccccggccgccgcatccccatccaatcctgccgtcggggcccgcttctccccgcgcgccggtgagtaccaccatagccgccgccgtcagccatggctctcgctcgtcgtggacaccctctctccctctaacctctcacacttcctctcttaaggtgtcccggagctcggccgccattcgccgtcgccctccggtcgctcatcgtcgccgtttgccgtcgtctcctcccgcgccggccgaaccccggtgagaactccctccccttctcttcctcccgcgcgagccgccgctccccgcatgcgcgtcgccgcgatgcacagtcgcctgcgtcgccggccgccgccgttggtggccgcttgccgccgccgccctcgccataaccggccggctggcttgaagccgagccgagccaggccgccttcctccttcccccatgagccgccgcccggtgggccccacctgccagtacccctccctcccccttgagccgctgaccagtggggcccgcatgtcggcgccgccccaccccttgctgacgtcagccctgggatgaattattgcgcaataaatacattaaggctttttctttattagtaaaaacacagataatcttcgaaaaatcataactaattgatccgagcttcgattaagttcattcaagtctcagtaaattcataaaaatgtatagaatccattaaaaatggttttgtttcctgtttcagtagtcttatagcatgttttgcttgtgtgctttgtttgtcgcgtaaattttgcccgtttcgtcgattcgcggtttctcgaagacgttgctgtggttccatcagtgcgagagcaaggcaagtcatacattacaattgatcatattgtccccaatttacaaatgtcccacatttctattaaatattgcattgttttacaatatcatgtgggatgggtcctattactcagctatatgttgtttcccttacgccattgataacttgggtattaaaatgactagatgttggtttaggagatgcttagccatgcttagttcaactagtgcacaaaaggggatcacattaaagcatagactttgattattggcaatagctttggattagtgccaccgcaatggtgttggttaattaaaatacactacatggtgggctgtgggtgcatggttttgctagtcgtgcacatggcgattaaggaccggttcgcgggatgccctggaagaacttatcgtacttaccacaagccagcctgggcaacggctgggcttgtagtgtagcttttctctagccgacgtacccaggcgagggtgggcgtgatggagttgggtcggccggggtgtccggttgatcggcttccggattcaccgcggcacaaaaggggggctgcccgttgcctgctggggacgggcgtgaaccctaaggtgtggtgcgatcggttagagagggttatgcgaagggtcctgtcacggcctcttttcggtatgtcgtggtggcatgtcggcgcacaggaacgtgtcgtggggctgtgtcttgtgggtacagttgtacacctctgatcagagtaaaactattcaaatagccgtgcccgcggttatgagcggtcgaccagattcaccgtgattagtctcacccctagtttagcttaatgaactggtgtagttcaggtggttggttgggcctgttgcaacgtggtgtagcattggacagtgattggttaatactgctatattgctacaactgttttactgctttcaacttctgcttttaaatgctagctttatgcaaaagaacctttagcccccttggatatatcctgcatcatacctcctcttccggtacgacttgctgagtatagtgggtaatactcagtcttgctcttttcccccacaccagagttgaagttcttctcagttggagccgtctcagagaggttggttccgtcgctgccgtcaaggattgcctgtggaatgaagtcgccttgctgctgaagtcaagcttcccggtttagctcgcttttatcttttccgctgcatttgtaatcttttatatttttgtaagacgtggatctgtatgtcaacaattgtcgtttgtgtaccctggctagtcctggacaggggtttaatacacattcagcttagaaattctggttcttaaatttttgggcgtgacattggagatcttcatctctttgttcaacggcaggagggagagatacaacagtttgatggggatgcgtcggcggcggacgagaacttggcgctagccttggagttatattgatctcaatgctgtgcttgggccattgaataaaggtcccacgtgcagccccaaggatcagaatctcgtcattaggtgagtgtgggatagtgtagccaacccaatcgggcttcactaagtccacctgaactttggcattgccggcttgcagctgcgccccatacactcgggtctccggtgtaggcttgaatgcttgaccctctatggcaggaattgcaaatcctggtgtcacccaatcgactagggtacacgatgtcggttcctgcgatagattcattagtgtccttagtatatgttgcaatgtattgtggtgctaatacaatatatgcgttattaagttgtttttaccggtatgtggtccaccgcggcggggcctttaggctgttctgccggagcctcagttgatgcgcagctgctacgcctctgcgtgggtctcacttgtactatgggaccgggagtggcatcgatcgacctatccctgatgcgtgcctccatccgagcctccatacctaacagctcggcggtgaactcttctctaagctcttctttaagctcctcccgaatttgggccttaatgcgtgcagctttctgcgccttggaaagcttgtgcttcttgtaatgccacgcatattggggaaacccaaacttccatggaacattggaaccaatgccccttgttcgtccccggtgttctccgtttcccaacgcttttgtgaggatgtcatcctcgcgtttttgcgagcagacctcttgggaggcctgtctctcagcattcagttcgacctagggtatagttaggacgcgttagacgaagaatatgatataacataatgaaacatattctatgtgttcaacttacgattttctggtacaccgcttgatcttcgggatttgggaacgaaagagttctgtcactattcttctttacccttgcccttgcccagttccttgcccgctggaacgggatatcagcaagcacttgcggggtgttagattccgctgcagcttcatcctccttgtcccgttctgcctgtttccccgcgtagcctccggtgccaagccggtgcgggtgaaggttccttgcctgcagatcacggtaggcctggctttttacccgagactctttcgttggtttggtgggcatggaactcatcccacacgggtcgggtgatgaatgggtatttctcaaatggttctggctgggcggggttgaggacgtactccgtgaccagcgttgtcttgaaatttttccaacaattccctatcttgcggatagcctgccgcttgagtcctgcctcgggctctgtagggtatcggaagctttccttgaactgcctccaggcctcttctttttcttcttgagggaccagatcgatgtggtccttcagaatagtgaagttccgcctccctaggattccgcatatcgtagggaactttttgacagctttcgtcggagccatcggatatccaacatcgtccacctctattatggtgtagacttccttaggaatcttattctaggccctaggattccggctcgatgtagtggtcgttgacatcggttcgtcttgctgcgacatgtcctatgtcactgttgtacggggagaaagtactttttaaacacaaaattgcatctacacacattctctgatggtttgatatacctctatctcctacctgtgttcgcctcgttgatggaaccatagcatccatgctcaatagggccagagcagccgggaactcgacgtcgacatcagtatcccactcgaacttgctatcaatgtcactaccataagatagtggcaacggtagcaggttctagtgggatatggatgtcgaggtcaagatcccgtctgctccggccctaaggaatatggatgctacatatctgctgacgaggcggacgcagatagaacacacaggcaaccaaaacccttcctatccaagatccctaacgttatcataagcaaactcctagattgcatccaagatcatttcgttatggaacctttattcccatagatacagcaaccatctttggatactgaatttatgggaatggggtttgtcggagatatgggcccgggggtatgtgaagtaaggggaagtcatcttcccatccagccgcgtggctctacagcctggccctactcccgcacctcgcgagttacagaagcggccgggggggcctcggggtgccacgttttgcccctcggactctctcgctgcttcgccccggggccctcgcccagctgccatgtggcgggtggagcgagcgggaaggggacctaggctgaatagccatcaatgcgcggcgccccaactatccctcactgcgtttaatgcagtaagggcagacgtgcggtgccgcctagctgacccccatcaatcggacgtgaccagtctgtgaccggcctgtcgccggtcacgtcggattgaacgggcggctatgcccccccccacgtcgcctctgtatccagcggagtggaggtaggtatgacccgtcccgtcgaaacgtcattcggaggaggaccaccacaagtcttcactcatttatgagagaatgacagggctgcctcccgtgccaagcgggcggctgcgctgggtcccactccaggaagggctgctgcttagcttccaagcgaaggcacggatcgtgacctggtcaaggtaaagtgggtccccctcccatggaagggtaggtagaggcgatgcatgtggtatccccttgaactataaaaggaggaccttgcccaccgaacaaggggacgattctgagaaaacctaaactctaggagaacaagggcgagagagctcatccggagggaaggcgtccttgtaacacttaaccataatcccaaacacaggagtagggtattacgctccacagcggcccgaacctgtataatccgattgtgtgcaagcacattagcagccttaggggcggatacgtgatttctacgaagcgagcttcttcccccggccgaaccacccgctatcgagggacttcccccgacagctggcgcgccaggtaaggggcagtcgcacactttgaagagaagtcattttcttctgccccaagtttcccggggcccttgatgatcatggtcgaggtcttggaggtggaggaggcggtggcgtttacccccaccccatccaggagtggggactctagtgggagccacggccctcgtcaccgtcgccacgactccccaactccttcccgtcgcgaaccctcgcggagggaggattccacccgttcgagtggtttcgccctctctctgcccctgggcgaagggaggccaccagccagcccaagccttgcaggtcatcccactctcctggccttttgcggtctgggggctagacatccttggaccattcaaggcggctcgaggtgggtttcagcacctatacgtcgccggtccacccccgggacgacagagtgctgctagatcccccgcgagactggggcctgctctcggccctccttcggcacgaccagccccgagcgcgccccaaatgcaagggggagtggctgtccctctcgccccccgcctcgggtcctagggtagatttggcctcggcctcgggctcaggctcgagcccgtccccaattttggccttgacctcgggctcagggccgccttggcttccggccttggcttccgagagcgacctccctcgccccccgatcccgggtggcgctccgcatgcaccccagtctcggagccacccccgggagggacgtcaccaccatcgcccgcagcgagtcgagtcccggctgaggttggctcggggccggacccggtatgcggccgtgggcccgccgaggggctgtgaaggcccccggccttggatcggccaagcccgggccgctccgatcgttcggatttggtcccccgcgaagggtcgaaccccgagaccccctgggaaggaatctcgctgcaagagaacccggatcgcgttaatgaaggaaaagaaacggagggaacaagaaacctaagatgagtaaaaagcatcgaagtgggtgccggcagttgtacctgcagggagggcggttaaaagtccacttcgggggctcaatgaagctcccccgacacggctccgtttgacctatcttccggagccgcttcttcttccgtccggcctcagcaccggcggggcgcttgtggcccgctggcggtcggtccgccacgcgctcggcgccccctccacgcggaggagagggcggtcgagattcggaaatcttccgtttctctttcgggtcgctagctgagttcgtccccgggtccgcggtttgtgccgggagacctggagctcccacccccgccgggtccgcatgtccgactcccgcctgcggtcgcgccaacgccacccatgccggcagcgctaccaccggtgccgccccggctggaccagcccctgccaacgccgacgacggacatcacggccaagatgctctcccggtcgcggtcgcagcgaaggggaaggatctcatctggaattagcatttgctcggcggagtctaggcccagcacccgttgaatcaccatcttcgcgtcctcctccccccagtcccagcgcgcacccacatgcgtacgcatggggttgttgggaccagtgtactcccacacaccacgggatcgatcctggagaggtgcgatccggcggcggaaatagtcaccaaagaccatcgcccctgtgaggcccaggcttcgcaggcccctaaggtgatcccacatcgcgtcgtactccttgcccagttccgaaaccgccagccatgcggcagatctttcgggaggaccggcgggaagccgaagtcgcgggtggtccggcaacgcggtgtagaactagtccttcttccagtcctcccatttcttgcggagatgactctcgatgtattgtcccgccgtgcctggccggggctggaagtaacatccccctaccaccgcaccttgcagcagctgcggaatgaagaaagactggaacagccgcatcgtcgggcgcaccccgatgaacatatcgcacagatgtgcgaagatggccagcgtcatcacggcgttgggtgcgagatgcaaggcatggatttcatagaaatccaaaacctcatgaaagaatccggagaacggcggaatcaaccccgccatagagaaggacaggaggtgcacggatcgctccagataccgtggccgcggccgccactcccccgccctcacgacggcgccttccggcatgatcttacgggggaggataaggtgtctatccgccgtaatgcgtgatgccgggagcactgtgtcaccagcgtcttgagccatgatggctggtggagaagcggcggagggcttggcgcgcgggatattgtgaagtggcgagaatattagggcttaaggagcgagaaggcaagtgggcagttggcgaaaggaagaaggcaaagtccttgcctccgtatccttttatcctcgcctcacccacgctcacctcctcatgagttacagaagcggccgggggggcctcggggtgccacgttgtgcccctcgggctttcgcgctgctttgccctgaggccctcgcccagctaccatgtggcggggggaacgagcgggaaggggacccaggctgaacagccatcgatgtgcggtgccccaactgtccctcactgtgtttaatgcagtaagggcagtcgtgtggtgccgtctagctgacccccgtcaattaggacgtgaccagtctatgacgggcctgtcgccggtcacgtccaattgaatgggcggctgtgcccccccatgtcgcctctgtatcggtggagtagagataggtatgacccgtcccgtcgaaacgtcattcggaggaggaccaccacaagtcttcactcatttatgagagaatgacagggctgccccccgtaccaggcagggggcggcgctgggtcccactcaaggaagggctgctgcttagcttccaagcgaaggcacggatcgtgacccggtcaaggtaaagtgggtccccctcccatggaagggtagatagaggcggtgcatgtggtatccccttgaactataaaaggaggaccttgcccaccgaacaaggggatgattctgagaaaacctgaactcatacggagggaagacgtccttgtaacacttaaccataatcccaaacacaggagtagggtattacgctccacagcggcccgaacctgtataatccaattgtgtgcaagttgattagcagccttaggggcggatacgtgatttctatgaagcgagcttcttcccccggccaaacccacgaaaggggggtctcacgacctcccgctatcgagggacttcccccaacagggttccataaagaaatgaccttgaaatcaatctaggatattggtaacgataacagatttctacaaatgttgtatttgaacgaaatgttctttttaccaatttgtcttggtcggtaccgtgcagacagtaacccgaccaaaccagatttggcgaccgggacacttcatattctcctaaatgccataattttagtaacttcatttaataatagatttctatgcatatccatcccaattccctcaaaatgacccaaaacccaaaacagtcacatatatattatttttgtacctaaaaacacaagtcatgacatataataagtttggcctcaattttgctcaaaaattatgcatcaattaccatcatttgcaactgcccccactgtccttattggacctaaaatatcccaaaattttgcaaacaaccatataaaaacaagtgtagagggtctgtccttatgcagtaaaaaaatagccataaaaaacataccaaaactcacatttcctccaaaataattcaaccatcacagcccacatcaattcatccatcccattgaacccaaaatatcccaaaaattttgcaaacaactatataagaacaagtgtagagggtctgtccttatgcagtaaaaaaaacagccatagtaaaacagccataaaaaacataccacaactcacatttcccccaaaatgattcaaccatcacagcccacatcaattcatccatcccattggacccaaaatatcccaaaattttgcaaacacntatataagancaagtgtagagggtctgtccttatgcagtaaaaaaatagccataaaaaacataccaaaactcacatttcccccaaaataattcaaccatcacagcccagatcaattcatccatcccattggacccaaaatatcccaaaaatggtatgttcttgagcaatcatgactggccattcttccatcatagcccacaatatttcatcatcatagcccacatctgaacaattttcccaacatcccattctctcccaaattcacaaattcatccatcacagccatataaaactttatcagtagctaacacatatagaaatgcacaagtcattacagccatataaaaatttaccactatcggacacatataaaaatgcacaagtcatcacagccatataaaaattcatcactagctaacacatataaaaatgcacatgtcatcacaaccgtataaaaattcatcactacctaacacatataaaaatgcacaagtcatcacagccatacaaaaattcatcgctagcacaagtcatcatatgtagacattagcatctaaacattgaatcagcaaataacggcagtcttgggcggcgccgggctcggggacggcgtggagggaggcgccgggctcggggacggcggtcttgggcggcgccgggctcggggacggtgtggagggaggcgccgggctcggggatg

SEQ ID NO: 27180 - DNA, 1685 bp, Oryza sativa
cattcgttgaagcgagcaccatgttctctgttgatccaaatatctgatcgaccaatattgtcctgtcggaccttcgctaaatgctcctcaaagtatggggttacttcagccatatgttgcagcactgcgaaatgagcctgcgcgtaggaaacttgattgggaacaattctttttctgtcagttgtgctgacacctgccaaccttccttcgtggtgagacgtaggaaactttgataggatcagtctcggccatgtaatcgatataaaactcaatggcttcctcggtcgtgttaccttcaatgatgcttccccctggttttgctctgttctgaacgtacgacttcagaattcccatgtacctctcgaatggccacatttctctcataaaagctggcccacatatttttgtttgcttcactaggtgaacagtgagatcaccaatgatatcgaagaaagccagtggaaaataaatctccaagtgacatagggtactgccaatatcggcctgcaacccatctaggtcttctggatctataatcttctgaccgattgcattgaagaaggcacaaagccgttggatcgtgtgacggacttgtggtggtagaatgcctcttatagcaactggcaagatctgtgtgattagcacgtggcaatcgtgagacttcattccaaccagcttaagatcctccaatttaacgtacttacttattgtcgtgcaatagcccgaaggaactttaatatttgccagacatgatagcattgcaatcttctcatccttcgacaatgtgtggcaagctggtgggaggtacactcttcctgtcttctcatctgtaacagggtgaagttcactgcgaatgttcatctcctgtagatcgagacgcgcattcaacccgtcctttgtcttgccaggcatattcaataatagccccagcaagttatcgcacacattcttctccacgtgcatcagatcaatgcaatgacggacctcaagatcttcccaataaggtagctgccaaaatatggattttttcttccacatcctcttcttgtcctccttgctacgttttcttttcttctaaactcattagtaatgtccttcaccatgttttgtacctgatctccggacaaatccgcaggggcagacccaagttctttcttaccattgaaaattttcttctttcttctaaaggcgtgccttagggggagccatctcctatgacccatgtaaacgatctttcttgatttcttcagccatctactgcgtgtatgttccatacaatcagagcatgccttctttcctttcacggtttgtccagaaagattacccaacgcgggataatcattaatggtgcagaacaatagaactcgtagtgtgaagttctcctgaccagatgcatcccaagtttccacaccctctttccacagaatctcaaggtcatcgataacaggctccaagaacacatcgatgtcattgcctggttgtctcggaccttggattaacaagcacaacataatatatttccttttgaagcacaaccatggcgggaggttaaagttcgcaatgagaactggccaagtgctgtgagaactgctcatgtctccaaaaggattcatgccatccgtacacaaacatatcctcatgtttctagggtcggcagcaaagtctttgtgctttcgatcgatatt

SEQ ID NO: 27181 - DNA, 740 bp, Oryza sativa
ggattcgagttcgattcggatcgacttttctccctccaatccgacctttccttctcgccgccggtcgccgtgggccaccgtcgccgctcgctagcccctttaaaaggacccccgagctctcctctacccgccgccaccttcgccttcgtctctcgtcgcggaagcgctctagcgccgtgtaacctagcgccgccgtcgtcgccgtcgctccagccgtgcgccgccgccgttccagtcgccgtcgtcactcgggaaggccatcgtcgggatcgccaagttgccgccgtcctcgtccgccccttcgccattcgccggcgagcgtgcgccgtccgagccgtctgagccgccgccgccggaggtgacgtcaccgccgacgtcatcgtcgccctctcccgtgagccggtcgtggaccgttcgatctcggccgtcctttttggacagggttgatctcggccgtccgttcccgtgaaccgccgccgtgcacccgatccaccgcaaaccctagccgctgacgcaataatcattcttttccttttcaaaaataattcattattgcgtcataattcaattaaaatccatataagtgttttaatccgatttaatctttaaaaattcacatttgaactcagtttaatgtgggtcaagttgcaaaagttgtataaaataaagatctacatattaaaattgtccataaattgaatgaaatttatttaattctttgtaaatgggctttaaataga

SEQ ID NO: 27182 - DNA, 7028 bp, Oryza sativa
  unsure (1)..(7028): unsure at all n locations
agccgtgtggccattactactgatttatggacagcaactcatcaaaagaaaggatacatgttgaggagggtgttggaacttcagatggagttaatgcttcttcaagtgttgcccctccagggggatttgatttggtggatgatatatttgatcagtatatgtctggacaaactgttgcctcttcctcacagattcgcactgagttagatttgtatttagaagagaaaccgttgcctaggacacaagattttgatattatcaattggtggaagtttgggggcattaggtacccaactttgagacagattgcccgggacattttggcaatccctattacaacagtagcatctgaatcagcatttagtactggttggagggtgataactccaaatcgtaatcagcttaaacctaatcttgtggaggcacttatgtgtgtgcaagcatggggtcgtgctgatatgttaggtaatttcatttttgcttttgtatcgttcaagtttaatttgtcctttcatgtttcttccatttcatctaattgcaaatcacattatatgttgatagctgaaattgctaacaagaccaatgcattgaacacggtacttgacgatgaatcagaatcggtatgtcctacactcccactttattgtttttattactataatatacaatgcttagttgcttcctctaattttgatttcaggaagcatctactgtcactgaagcttgaggtggagatttcataagtgaaggatgggctagaaagcctgcaattgcaaactatctacctatatattttattatgttggcaatgtaatagtatattaagacttctatatttctgtgagactgaatttgcttgctgtgtgtgatgtgttgaacaattcaactgttgaactttgaaggcttgattcgcttgaacagttgaactcatgtgtgttagtgtgtaactgtgtgaaatgatggatatcatcaatgtgttcttgctgaatttttatgatgaaattgaagtattcatgctatttttgatggtgtgttaattatgtacaatatttctttttgatgaaatgatgattgtgttgtattttttgagctgattggattgagatgctacccaatgcggggccccggtcgggttgcggggccccgcaggggtcgggggcgggggatgttttcaacccgcatcactggtcggggccgggggcggggggtgaagtcgggggtcagggtcgggggcnttncannccaacccanncccgccccgccccgttgccatccctaactacctttccactattcgcaggaggtgcgcgactacaacaaaacaacccaacggagacatcttatttgtaggatagagacgttttatctcgtctcctacagataactgagacgcttttataaatcgtcgtaggaacgtctccgtttgcaccgtctcaaaattatggaaacgctttttaaagcgcacctatattatttaagacgttgctagagacatgtaaattgcatctctataaaatatagagatgcttttatagaagcattaatataggcacgcacatcaagcattaatatttgcagattgcaaagttcatgcactaaccaagtcattaacgtgaacaatcttaaaggtaaatagatagttttttttatattgcaactctgcaaacatgcgtcctatagcagatactcttcttttttaatctgagactgaatattaaatattcatttttttttctaaataattataatattattataatggtatttaatgatgacgattaggaacagtgtgtttttttcttctttctctatataaataattatatattatctaataacgatgacacggatataataaaaacgtctcaaaactcatttctacacatgagacgttccaaaacgtctcaatattcctctctaaacgatttagttttgtgctaacctgtaaagcgtcttaaactatgtcctcaactaataaagcgtctcaaatatcgtccctattttaatttttcttataaaaaagagacgacttataaaatgacttaagtgaaacgtcttaaaacaatagttttgttgtagcgcgcgtgctctgcttcttcttgtatacggaaccactataggatccagtaatttattcttaatccgttcatcaagtcaatctcctacataggctgctatgttgcaaagcaaaagcatatactagtatattttaaaaagcgatttcatggacagacgatttggcatgcattatataactactctgagtacagccaggccagtgtttgtcacatggctgatggctcagatatacttttatgtcatggacgttgctggtttgagcaagtcggatgattaatttgatcgatccgacggcagtatgcatatgatgatgtgataagccaactaccacagagaattattagtgaagagtttttcactagtgactcagtggtattattggcccagttcctactgtataagcgaggatttattcgaggaaagagggaccctatatcataccattacccaccagttatcatcgccatctctagctctctcacacgttcgaccacagtctcgtcaccaccatctcccttacacgcaccattttcttcatgatcaccaccatctcacatctttatctattataaaaattaaagatatttttgcctatttttcatacgtcatctcagtccgattccctccccgtatgcgcccgattactcctagatcacccgtataaaaaacatgcaaggattacgtattttctttcttaaagcttttcatccgtcatcgatctcttgcgtaatcaaattcgctaattggctttcaatagagccttcgcccgccgcttgtgccatcatgcacagcataaggcagtccaaatcgatcatgtatttcataatgtaacacagcctaatctctgtccccacggaatgccccagtctttcctcagaccaactttgtcacgtattaatccatccacagccagcataagccgccgcctacgataactgatcttcataggtggctggtttaagatgggactggataaaaactcgtggcttgttagctcgctcggctcgtgtctatctcgactcgacttggctcgccgaaccagagttttagctcgttagctataacgagccagctcgagatggctcgcgagccgctcacgaggccatgaaaacatcagaccgagcagccccggatgacacctatccaaaccatgtaagcccaactaggccacggtagtacagtgcacatcctatattcagttaataaaggcgacagttgcggctcggcaccagaaaaaagaagagaaaaaagaaaaaagaaaaggagagaagaaacggtgagactccctcgatcccttctctgatgtcgccattcgccgccctgcgcccctgccgctcgcgctatccgctgtctgccgtcgctccctgctgttccccactgtcggagcaaaggagatccggtggccatcaacctgaggctgccggatctggcgccgttgacctcatggctaaccactggatttggtgttccatccgtgacaaagggacggtggtggccatgaggagaatttgttggccaacgaggagggagacgctggctggcggtgatgtaggcggcaacaccgtggcgcggtaggaggtgatgccagctcgttatcctaagccggctcggtatccaccctagtttaaggtgatgccggctctaatgcatcttcgttgggagcacctttattaagccacctgtggtaattttatatcagaggcgaaacctcaaatgtatcttcgcatggtggcctgctatcaaatcccttgtccacaaattacgtagacgggtgtttgcgccgaaattttggcctgccttaataaaatagctcgcgtagtcgaaactcatgtaacacacactggtggagaaaccatctttcgtcggtcggccgatttccacaatagtcccggatgcaataaaaaccggtgctaaagatgatctttagtcccagttcaaaagggtaacgggcatatttgatctttagtcccggttggtaataccaaccgggactaaatatcatctttagtcccggttcgaatgctgtcagggcatgtcgggccccccgggatctttagtcccggttggtcgtaactttagtcccggttggtattaccaaccggggctaaagatcctggtgatctttagccccggttggtgctaccaatcgggactaaagtcccacccctatatatatgtcttcttcctcctccagctgcccgagcaagcttcaaaatttcttcaaaaaagaggggaggtcatgccaaaatttttattgaatttattttgatgattacatacaaatcggaggtgcctaaaaggtttgcaacttcatcgtccaatgtttttttttgtcatactacatttgcacctatgttttgcacactttttttgtctccaaaatttagttgtaagttgatgagagagaaaatgtgtgtggggaagaaagaatatatagaaatttagttcatttgctaaacaaggttttataaaatagttgagaaggaaaactctagtgaaagttaatcttaaataatagaaaacaaactaaaatgaaaattaaaagaagtaaaacacattaaaattagtttaaaactttacaaatagtttttaagaattatttggtgtaatattttatgatttttgtatgaataaagatatcttataattataattattgtatgactgtcattattgtaagaataattatttgtgtacggtttttttttactcatgtagatggatcggcaatggatgtacactgaccggcggtccaaagagtttattgacggcatgcactattttttgagagtggccgaagctaacaggcaaaggggttttatttgttgtccatgcaataagtgtaagaatcagaaggagtattctgcatccaggactattcatttccactttattgagtcggggttcatgccaagctataattgttggacatcccacggagagcaaggtgttaaaatggaagaagatgaagtggaagacgacaatattccggactttgctcagtatgttggatttgaagaaaatcaaacgggtgaggaggaaatagctgctgatggtaacgacgttgcggatgatcttggtcagatgttgcaggacgccagggaggactgcgaaagtgaaaaggaggcccataaattggacaagatgttggaggaccacagaacttcgttgtacccaggttgcgagcaggggcacaaaaagttggataccactctggagttcttgcaatggaaggcaaaaaatagggttagtgacaaggcatttggcgatttattgaaactcgtcaagaacattcttccggggggaaacaaattgcccgagacaacgtacgaggctaagaagatagtctgcccgttaggactggaagttcataagattcacgcatgtccgatcgattgtatcctatatcgcggtgaggagtatgagaacctagaagcatgccctgtatgcaaagcactacgatacaagattagacgagatgatccaggagaagttgacgggcagctaacaaagaagagaattcctgctaaggtgatgtggtatttccctataataccacggctaaggtgtttgttcaggaacaaggggaatgctagaatgttgcgatggcacgctgaagagcgtcaacaggacgggatgctgagacaccccgccgattgttcgtagtggcgaaacatcgacagaaaatttaaagaatttggaaaggacgcacaaaacatacggtttggtttgagtacggatggcatggatccttttggagagatgagcagcggccatagcatttggcccgttacgatgtgtatctataacctccccccctggctatgcatgaagaggaagtacataataatgccgattattattcaaggccccaagcaacctggtaacgacatcgatatgtacctaagaccactggtcgaagatcttaaacagttgtggaagaaagaaggtgtccccgtgtaggacgaggacaaacaggaggagtttaacctacgagcgctgctgttcgtaaccatcaacgattggcctgcacttagcaacctatccggatagtccaacaaggggtacaaggcttgcactcactgtatggatgaaacataaagtacgtatcttaagcactgtaggaaggttgtatacatgggtcatcgtcgattccttgcagcaaactacctggtacggaagaaaggcaagcacttcgaacataaggccgaccaccgtacaaagcctaaacatcgcagcgggaaaacagtgtttgctatggttaaagatcttaaagtagtgttcggaaaggggcctggaagccagcctatagagagcgaagatggtcacgcggcgatgtggaaaaagaactctatattttgggagttaccatattgggaattcttggacgtacgccacgcaatcgacatgatgcacctcactaagaacctttgcgtaaaccttcttggcttcctaggtgtatacggaaagttgaaagatacactggaagcacgtaatgatctgaagcatatggaacaacgcggcgaccttcacccggaaccaaaggagaaaggaagccattacttgagtccagccagctacactcttagcaaggcagagaagaaagtatgtttgaatgcttggagagtataaaggtaccgtctggatattccacgaatatcaagcgaataataagcacgaaggagaagaagttcacaaacctaaagtctcatgactgtcacgtgttgatgacacaactgctaccagttgtaataaggggtatccttccagacaatgtccgggcaacaataacaaagctatgtgcattcatgaacgcaatttcgcagaaggtcatcgatccggatatattagaagcccttcagaataaagtggtgcaatgtctcgtcagttttgagttgatatttccaccttcatttttcaatatatgacgcatctgctttatcaccttg

SEQ ID NO: 27183 - DNA, 1670 bp, Oryza sativa
ttccgtaaagcccatttcactgttctgcaacactcttcattggtagctccttacatcgaggagcacttggctcaatgggtacacattctacacgagagcccaagacatgaagagcacgaaccaaaacagcgttgttcgtgtcgatgccatgggacacgatggaacaactggcacgtattacgatgccatcgaggatatatgggaacttgactatggtcctctcaaggttcctctgttctagtgccaatgggttaggttgactggtggaggcgtaatgattgatgacagtggtatgacaactgttgactttaacaaggttggatactcggacgaaccttttgtccttgccaatgatgtaacgcaagtcttttacatgaaggacatgtctagcaaagaaaagaagggcaaagggcttgacgagccgaagcgccacgtggttctgctaggcaaaagaaaaatcgtcggatttgaggacaagactgacgaggattacgatcagttggatgggaaaccccctttcatggtgacgattgaccctagcatcctcctatcaaatgaagacaccccttactcacgtagcgatcacaaggagggaacagtagtgaggagaaagtacgtgcggtcaaccgtcacctccaatgtattgccgtaattattatgtacacgatgtaaactattttggatgtactgattatccatataaatcaattgttgtatggcatatgttaattatgtatgattattagaatttttaacaattttaaatcatgcatatgctagttatatgcgataattagaatttttaaaagttttaaatcatgcatgtggcatttacatgtgttaattagagtttttaacaattttaaatcatgcatatgctaattatatatgattattagattttttattaagtttaaatcatggatgtggtatttacatatgttaattagaatttttaacaattttaaatatgcatatgctaattatatatgattattagaatttttaacaagtttaaatcatatatttgcttattacgtattatctacttaatttactacagacaacaataatttttcgaagtaattgtcattaatttttcgactttaaataattttaatgcattatttactattttagaaacacgtatttaatgaaattcaatattcagtgctattgtctatagtcccggttgtcaaccctaaccgggtttaaaaagaatttggaaatagcgggaaaatatctttagtccctggtggtctcaccaactaggactaaagatctacgggtatatatattcccgatgcgcgcccccgtcttcttcatcaacacttagaaggtttttccctgatctcggcttctccttcgccgccactgcctaaggcatccccgcgccgacgccgccgtcgtatctcgccgtcgtctcgcgggcgtcgtcgtcgcttcttctgtcgcgtatgccaccgctgcatatgtagggtgagagccgccaccgcctacctctctctctcgacctcgatctctctctctctccaaactaccgccgcctcgtttctgacgcagccgcagacgttgacgcggccgaccccgactacgcctcccgctgatgccgtccccgacctcgatgcggccgccacagctgaggacgtcgcgccggcactgtcgacgat

SEQ ID NO: 27184 - DNA, 10052 bp, Oryza sativa
tgaacgaaacgttaacgaaattgaacgaaaggtgaatgaaacgttaacgaacgtgaacgaaacgtgaatgaaacgtgaacgaatgtgaatgaaacgcaaacggtcgccttatacgacactacgtgaaatactatatatgttactttgcgtttagactaatacattatcttgtatgttgcagaaaagacgtcgtcgtcgttgtccctcaagccggagaggtagctagccctcgaaggaatttgtcacgcccggaatttctatccaaaattccaaacgcttacatgtgtgtaaaccctcgtccaggaatcagccgaggcacacaataacaaattgataatagagtaccattattactctaattaataagcgaataaaatgtcattacagaggtagatagttcctctcaatcaataaagatctaagcagcggaaaataagataaatggcgcagacggctccactccacaggcagcttgaccagggctacacctaatcctccacaccatcagcatcattgtagaactcttcctctgatgaatgattgcaaggtgagtatatgacatactcagcaagtcacgcagcaaatatgcaagtgcacaaggataccaaaggatggcataatagggttccatttgcaaaagcagcatttaataaacatttcagaatttaataaaacaattaagtaataattaaacaatattaatccaacgctatacaacataccctgttgtataggcccaacctttctgaacaaccatacccagctgtacagatctatctccaaaccaggaatataccattccaaaccaggagctaaacaaattattaccagttatagcatcatttactaaggtgagaggtgtgagactaatcgcgaaagacattgttagacccgcccataaccgcgggcacggctattcgaatagttttactctgatcagaggtgtaccactgtacccacaagacacagccccacatcatgtcaccatgtgcctcaataccaccacggtacctcggaaaggagctgtgacaataccccttgcataacacaatccaccgcaacgcaccattcctggatcataatcacccccttataaacaaggcattgactccccagcgacgcctgtgggcttatctccgccacttctcagtctggtgccccgcaataaaccatgctatacaaaaggtaaagccgttgcccacgctggcttgtggttggcacggttaatgtttcacaaccgaaactcgtgaaccggtccttgattgtcatgagcactactctcaaaaccatgtgctcacaacccaccattatcaggttttaattggcacattaattaattaaccaatcacgattgaccatcgtgagctatcgttaagccatcattaaataatagtgagtcataagttatcccaatagtgtgctaatgtttctaagcatggctaagcaatcatatctaatatctagctgaaccaatatataaagcccaactagtcaagttaaaataacccaaggtatcaaggaataaagtaatcaagaacaaaagggctataacaaacaataggttaattccacccaatgacattcgaaaataaatgcaatagttgaatgaaaacaatagctttaaacgggatcaacatgctcaaagggttgtttgggatctgtgtgacttgccttgctggccttggaattcttcaaattcttttcctgcaaaaacagactctccggaaacgtcggaatctaaacaggaaagagcaaaatcaccagaacagcacataaacaagcatgaacagtacatgtggatatttttaacatgtagatctcaattttagaaaaatttagagacttgaaccaactaaatccaagctaagatgaattagttatgaattttcaaagattaaatcgaattaaaacagttatattgattttaattgaattatgacgcaataatgaattatttttgaaaaggaaaaagggatttattgtgtcagcggctagggttttcggtggaccgggcgcacggcggcggttcacggaaacgaacggccgagatcgatcttatccaaaacggacggccgagatcgatcggtccacgaccggtctacgacagacggcaacgatgacgtcagcggctacgtcagcgatgacgtcagcaccggcggcggctcgggcacgcatgctcgccggcgaacgacggcgcggcggcgcgaacggagggcacccacgggtagcggacggcacggcgaactcaccggtgaccaaagaagcggcggaagagcaacggacgacgtcggcgacgaggaagaagcggcggcggagatcgggtcgacggcggcgacgatgctccggcggttgatagcgacggcgaagaggcggacgaggacggcgacgcgacggcgaccacgatggagacctccccgagcgacgacgacgactggagcgacggcgaagcacggctggagcagcggcgacgacggcggctcgaggtcacacggcgctagggcgcttccgacgacgagagatgaaggcgagggtggcggcgggtagaggagacaccggggatccttttaaaggggctaggaggcggcggcggaggcccacggcgaccggcgacgcgaaggaaacctcggggttcggaggaaagagaccgatccgattcgacctcgaatccacgaacttccaaagcgatttagacgatgattccaaaagagaaaaggtagaggagatcccgaagattgtttcccctcaaacgatttcaccggatcgggaaagacgcggccgaattggaaagcggcggcggcggacgcgacgctagggtttcgggcggcggccgacgcgaggaagacgacgactctgacaggcgggacccacctgtcagcgacggtcgcacgagcgcgcgcggctgcggactgggccgacttgggccggggagagagagaaggttttgggccgactttcggcccaaagccaaaagagacttttaaaaacctttttcaatttaaattattcatgaaatgcaattccatttattaaaaatacttccttagctcaaataaatcccagaaaaatctaggaattatagaattaagcaaagtatttaatgaaattttaactggccccattttatgttggaatttattaattaaaattagatcttctcttctaggcttttaaaataaattctaataattccatttaaacaacaatttatatatttaggatttttagggtgtgacagaattcgcgcaggcaagtgatgtaaatatatgattgttagatttttaatataattaggactattaaatttaatatacgacacttagacatagcatatatgattatctagggttctaatgtgtagcatatatgattatttgaattctaatatatgacacttagacttagcatatatgattgttagagttttaatataagattattagatttgtaatataggactaataatataagactattagatttaatatacgacacttagacatagcatatatgattatctagggttctaatgtacgacacttagacttagcatatatgattatttcagttctaatatacgacacttagacttagcatatatgactgttagagttttaatataagattattagatttgtaatataggactaataatataagactattagatttaatatacgacacttagacatagcatatatgattatctagggttctaatgtacgacacttagacttagcatatatgattattggagttctaatatacgacacttagacttagcatatgtgattgttagagttttaatataagattattagatttttaatataggactaattatataagactattagatttttaatataagattattagagttttaatacaagattattagagttttaatataagattattagatttgtaattagacttagcatatatgattatctagggttctaatatacgacacttaggcttagcatatatgattgttagagttttaatacaagattggtatagttttaattattatctaggggtctaatatacgacacttagacttagcatatatgattgttagcatatatgattgttaaagcaaatatgacctatagacttagcaaatatttcttgtatgaacagatggctgattgcgatgaggaacagatattgtacgatacaatcgcagagggaagcagccagtactggaacaaagaagaggggaacgaggatccaaaccagtacttgaacgaggaatggaacatggagagggatgcggagaggaaccagaaggggaacgtggagagggatgtggaggggaacgaggaggaggaggctagtggaagtcaaccctccgctgacagaagagggcacgcggacaacaaggtgccgcgaagaagctagagggtcaacacatcataacggaagtggacgaagacggccgacctagtgccccggcagaagcagccaagaactacgtacgacacaacggttgggttgtgcaggataacgtgtctgtcagtacggtgtactggcgcagaataagggcacgcggagatcatgagagctttgtcccagattcggagaaagagatgctgtggaccacaatgctcgagacattcacccttcccgcgggtatagagaacatagtgaaaaggtgaactctaaagaaaatggcagaacagtttcatagcatcaagggagatctgtaccagaaatatatcgtgaaggggcagacaccgaacttcaacacattcccgaagctaagggatcactgggacgagttcgttgcttacaagataggtcaacaagggtaggcgatgatggaaagaaacaaagaaaataccgccaagaagaagtaccatcaccacttggggtcaggcagctatagcatcgcgatgccgaagtgggaggagatggaggcaagcttgcttgagaggggtatcgaaccggccaccgctaaatggccggatcaatcgaagttctggtactatgctcacggtggaacgctcaacccagttgatggctccctggtcttcagcgatcagatacgcgaggctgcaagtcgactaacggacgcagtggaagcctcttctcagggcacgttccgacccgacagagagaaggacgagctgtcactcgccctgcagactcccaagcatccaggacaaacacgagggaaaggggtgattccttggaagattggattcaaggaggacatccacacgtacaggagtcgaatgaggagcaagagagataccgaggcgaagattgcagatcttgagtacagggtatcgagctacgagcttagcatgcaagaggaggtggcaaggaaggtggatgaacgcatggccacacatcggtccctagatccccagccgtacattcctcctgcaatggtcagcccttcaggcaatcgtagcagctgcgcctcaacggggcaggtaggatcacagagcatggacgccatgcaaatacaggacgaaaccacctgccccgttaatgtcatcactcggtggacaccatgtgagctgcatattccctttgagaacttatcaataaaggtaatctcgtagtttatagattttagacttgtccattccgcaagttgctgcttatatatattgattaataataaataacctctcaccatgtgaaggtggcgtcgggcatggccatcccaacggacccttcagggacttaccactgcaggcttattccagcaggatactccaaggtcgaagttgagttggtggaagccgcgtacgaggacctcgagttggactaccttggaggagacggtgagacgcatctacgagacacaagccacgccactatactatggcgcaagcggtacatcatcctccttgggcgacaagcggcgtctcgtgcaccatcttctccggctccgccatctcctccacaggctcctgcaccgtctcctcctcatgctccagcactgtctccacctcaggctcctgcaccgactcctcctcaggctcctacaccaactcctccgcaagctcctcgtccggcaccttccaagtcaagggccccccaagctccactgcctgcccccacaagggcaacgaagaaggcgaaagttgacgcctccaaaaacaaggacccggggtacgattgcacacaagaggagcttgacgcttatgtggcttcagaagtcaggagacaattgaagcctcaaagtccagaaaagaagattcttatagacccgagtgtcaggaacttcttcaggggtatgtcttcacctgccaaggaggccataaagctatcggactatgagcgaacacttaagaaagcatcttctggaaagtccaaactagtccctcagcttggagagcaaccaaaccaggagatcgagccgttggtgaccggtgaagaatttggaatacaagattttattaataacaccgggctaactacggatcagttgctacgagatccaccaatcgaaaaggcggaagtgaaatacttgtacgaactcggtaaaccgcttgtcaagcctgagtagctgcagtccctaccgatacaaatgtacaaattccatcaactgtacatggagatgaacgccaccggtagagagatgatcggagcgaggatcagggacacggacttcttgcaaggagaagatattctctagatcaatttcaagggtatctacgaactataccagctggacgccctcgacgtgtctattatgagttgttggactttgtaagtatcgttcagttagatttctttttacgtttcctttaattaattaggtccttgtatataagtacaccatatataatatatacttccttttatcgttgtagaatggagattcaaagggcccgacggcggggggttttcgatactggattcatcgaccctcggaaagtaaatatgcacacatatatatagtacacacatatataaatgtgcacttaattaagtaaatatggcctatatttacagaagtgcgtatatgtaatatataaatatttatatatatagtatacacatatataaatatgcacttaattaagtaaatatggcctatatttacagaagtgcatatatgtaatatgtttttacacatatatatgcaatatgcatacatatgtataaatacatataatacacacatatatgcacataagtaaatataggccacatgcatatattaacaaaatttgagtttgcacctaagtaaatatacacacatatattatattatcaaaataagtacaaacaaaagtaaatgcatgtatgcatatataaatatatgcatgtattacaaatccttcgggctttgtaattattgtttatgtcatatactacgactttgtcaaatcagaaaaagaaggaccggcttgatgaataggctttccgtctaatagaattattctgtgggatcaagaatctgctcgttgatgaatcccatcagttgttcttgaatagcccttaggaaatcatcgtgggtgaggttgtccttcatgtaaatcgcctgtcatttgaaaaaaaaatgggacaaaatatatgaaatcaataagctaatggatacataattaatgtatgaataaatttacatacattcaggtcctggacagtcctgatttgctgtgataggcagtgggtataatcacagacttagtatcgtaggctctacggaccttccattataattgagggatgaaatgaataattcaagtcatcaaacaagcataatgaaatatctgacgcctcaagagaggaatattggagacattgctgggcctttagcctgccagtcaactccagcctgagatgtgcccgtcaaaccactcaaaggtggcgactgttggtatttcttaacgacattactagaaatataattcccagcaatgacgcagaaatacttctggtatcttatggttacagagttcatccgcaagcgcacggatataccattgtagcatttcacccgagagtattccaagcgtatcgtatttattttatcttgtgggaagatcatgtagagagaactcaactaataatttatatattacttgtgataatcatattctaagcaggggttaagataatccaagggtagagtgacacacaagcatttctactcatcctcataataaataatctaagctagttggaaagaaaatagaaagagaatatattcctatacttctaatattcatagtatacatatattctagttaactgatatactagctaataccctctatccgatgccctcctggtacttcgagaagccacccctgactgccgagttccttacgacagcccatcataaccatccaaccggggctaaatacggaggaataccctccctaggaaattaacttaggattatatataggcgcggaggaatacccgtactgagctgtcaccatcagcggcccacctctcatccgcaatatataaccccggataatgatatcccataatctagacaccacgctaaactaccagatactactctaatatcatcgtcatgacatagagtaattgcataagcaaacactatacctgcactaaagcatctccgagataagctagcagtatattcagtataacatgaacataatgtaaagtaggtactcatatactcggaaagtatttcaataccagaaatgtatttagaagagtactctaataaatgtacaaagcttacaaaagaggaaaggaaagctactagagccatactcgaactcttccgaaggtttctggactcctgattcctattctaattctattccactagctagatactactaaactaaacttgagagaaataagagagctcttgcttgaggtgtgtgttgaagtgaagagagtgagctccttatatagaggtaggtatgacggttgtggaaggggaattgtccgaagtgccctgccctccaaccgtcattaggatgcaatcctagacgtccacgccaaaacctgcatccaacggcgccaggattagttcaaccgaaccaccaggttctgccgaacctggggctggcccaatccagcccaatttcggctggtggcctcctctattgctccactccatagacttgtgaattttggcccaattcgttgtgtcaattctgagtttttagcccattcatacataagtctggtcctcgacattgtccgattgatttatcgttggtgttgatgtcgattctcctccactttattgtcgttctttgcaaaaagttagtagacctgatactagtggaatattattattctaacatatttatgcattgcaagcatcactagttctctcctgttttagtaatattgacggtcgaaactgatcgatacgaccatcaacagcgaccagatgtgttacatattcaggagacttgacaaaaatggctaaagatctacaacatctcaaatattcctaactcatactcatgtgaatctagttcccagaatgtgcactagattcacactttcatcttaagcatgaatatacatagcaaaatacatctaaagcaaaaaaaactcagattacatctttaaatagatacataggccgaccgaccaaataactatatcagagaacagcggaagcttgactacccaaatcctcaagcacactgactaggggtttaccccattaagttcaaatcctagaagaagcagtcgaaacccacatcactcaacttaaactaagccttttcctgcaaaacataaattagacaaaacatggcaagactcagtattaatgtactggcaagagcactatcaaacctacaaacatgaaagctctaagtcaaaggaaggctatatgtggtttcaattttcagcataaagcaaattttagttcacaaaccatttgcaacgtaatttaagcaaaacatgttagcaatatgtaaagcatattaattatggcatgatatcaacataaatagatagacatcattcccttagaacacaacgggaagtaaggcaatcatatcacatataccaatctcatcatcatctcaaaacaattagttctcaaaagcatttagaaatcacaa

SEQ ID NO: 27185 - DNA, 14497 bp, Oryza sativa
  unsure (1)..(14497): unsure at all n locations
ctccactctagactcaactcctggagtaatatttaggagttggagctgtaccaaacaggcccgaatactctagtttgtcttgtgccagccaaagcactaccacactctacacattgagtgtggtctagaggtcataacgaggcttttacattaagcattgtctaatcttgcatgagcacaatatgtgttcttccatcctataccatactcgatatatgacctagaaccgttaagtggcgggcccatgccttaaactgaacgccgtggtgacggatacaatcggaacccaccacgtggcacaatatcgttgtattggacagacttagacgcctatgccgtgaggtgcatctaaacacccctcacgggacacacacacatagggaatttatcatcctatgatcatcacaaacacacactcatgggtagttcctctaggcagcccacagtacacccgtggccctacctatactacaacggcctcccgaatgcaaggtcagacaagtgcttaacttaataggccaaggtcatcccatactaacacatgtggatgtacggtaaacataatgggtgatatgatgttcggtccttaatcgactcaggcgaacactccccctatcggtctgcaactactaccatatgcataccacatgccgcccaagtcaaatcacatttttatctcattttatttcacaaataatcagagaatcacctctttccataatgttcaaaaagtgtttgcaaaatgtatagtaagtgaaccatagccatgtttttatttatcactaagcaaggctaagcatttgcactttataaaagcatagcatagtcatatgagcacaattaaagtactctaattaatcctaaggttcaaaacagcaagggatgatttttcaaaagggaagttatgcatatttttaggggacaactacaatctatcgtttggaagtatcgatagttagaaatacgcgtgcaactttacaatcaaaacatttagcctggaaacataggatttaatatgttcaaaggaagggcaacacttgccttgattgatataagacctccctgagaatagatataatccatctccttcaccggtatcgatttcgctgtctaaatgaaataacggtaacgataaataccaaaacatgtaaaaatctaaaatgatctaaaatgcatgagtttactagtgcggttaggtactggtctaagatgaatttaggtgaaagaatttatattttattactttgcatttgagagttattaattttcaaagtttaatactagctctagattaattaacctctaatcgtccttaggtgcattttaggtctaagttttgtgaaatgttggctttctgcagtcaaggggatgctcacaggagttcaacaaagttggtttcacaatttttaaggttagcatgattttattatgaattttacaagataggtcatatgctatagtctttattagttatttcgaattttagatatgttttgagtactgtatgtgtcatattttatttcataaaaactaagttcatggttcttataacctaagagacctgagatcacttcatttagactggtattaaattttatatgaattctagaagtttctataccgtcctttaattttaattcattattcaaattttagtgatgtttttggatatggtttcttctacagatttatatacagaacaaatgtacatgctattatcaaactaacaaattttagtttgtctcatttggagttaaaataaatcactcatgggttttatagtttctggtttacactatactagttattttaccaattaaatagttggtgatgattttatacagaaagtatcaagttttagttaatgtaaatcaaattaatgatttttttagcacactggaatttggttcactccaaattaagttaagatgaattttatatgaattttctaagttggagattgctctaggacgtgactacacagcactccacatgtagctgtcacatcctgattttcgtttcaggatttataaattatttaataaattattaatagaatttatattaaatgttctttaatttacaagtgaagttaaatgtgggaaataaaatttcctaaatataaagcatggatggatttaatttttattaaattctccatgattaagtcaactctctgaaattttctcggatttttcagagctcaattcctaaatgatacaaagaacagttcagtaattatttgatcattaatgatctaattataattgttaagagcttttcttgtttaaaatccttaaattataaattgttgtttaaaaggaattattagaaatgattttaaaagcttaaaagagaagatctaattttaatttgctaaatctcaacataaaattgggccagataaaattttgttaaatactttgcttaattctataattcctagatttttctgggatttatttgagctaaggaagtatttttaataaatggaattgcatttaagaaataattttaattgaaaaaggtttttaaaagtctgttttggctttgggccgaaagtcggcccaaaacctctctctttcttctctctctccccggcccagtcggctcaagtcggcccgcagcccagtccgccgagccgccgctctcctctctctctctcgctgtcgctgacaggtggggcccgcctgtcggacccgtcgtcttcctcgcgtcggccgccgcccgaaaccctagccgagccgcgccgccgtctccttccaaattcggccgcgtctttccatctccggccgaatcgtttgaggggaaatgatcttctcgatctcctcttccttttctcttttggaatcatcgtctttttcggtttggaaatccgtggattcgagttcgattcggatcgacttttctccctccaatccgacctttccttctcgccgccggtcgccgtgggccaccgtcgccgctcgctagcccctttaaaaggacccccgagctctcctctacccgccgccaccttcgccttcgtctctcgtcgtcggaagcgctctagcgccgtgtaacctagcgccgccgtcgtcgccgtcgctccagccgtgcgtcgccgccgttccagtcgccgtcgtcactcgggaaggccatcgtcgggatcgccaagttgccaccgtcctcgtccgccccttcgccgtcgccgaagatcgccggagcaccatcgccgccgttgacccgaaggccgccgccgcttcaacctcgtcgccgtcgccgtccgttgcttctccgccgcttctttggtcaccggtgagttcgccgcgtcgtcctctatccgttggtgccttccgttcgtgccgaagcgccgccgttcgccggcgagcgtgcgctgtccgagccgtccgagccgccgaaccgccgccgccggaggtgacgtcaccgccgacgtcatcgtcgccctctcccgtgagccggtcgtggaccgttcgatctcggccgtccgttttggatagggttgatctcggccgtccgttcccgtgaaccgccgccgtgcacccggtccaccgcaaaccctagccgctgacacaataatccttcttttccttttcaaaaataattcattattgcgtcataattcaattaaaatccatataagtgttttaatccgatttaatctttaaaaattcacatttgaactcagtttaatgtggttcaagttgcaaaagttgtataaaataaagatctacatattaaaattgtccataaattgaattaaatttatttaattctttttaaatgggctttaaatagatttaatcttgtaaaattcataataaattcatttgaagtcagaatgaggccgttcaagtctcctaattcatctaaaattatgacctacatgtttgtttactttttatgtattgtttatttggtttttattagtctttttcctcgttttgcgtgatagcttgtcgtttccgtcgttgcgaaggttcgcgagtgcgtcggaagtgttcaagaagattaattgaagaccgattattgcaaggcaagtcacacagatcctaaacacaatcctttgagcatgttgatcctatatttaaattctctatttatttcaactgtgcatttattttcgaatgtcattgggtggaattaacctattctttgttatggaccgtttgttcttgattactttattccttgataccttgggttattataattggactagttgagcttatatatattggttcagctagatattagatatgattgcttagccatgcttagaaacattagcacacaattgggataactaatgtttcactatcacttatggttatatttaatggtagctcacgatggtcaatcgtgattggttaattaattacttgccaactaaaacttgataatggtgggttgtgagcacatggttttgagagtcgtgctcatgacaattaaggaccggttcgcgagctactattgtgaaacattaaccgtgccaaccacaagccagcgtgggcaacggctttaccttttgtatagcatgattcattgcggagcaccagactgagaagtggcggagataagcccacgggggtcgctggggagtccatgcctctggtttttgagggggtgattatgatccaggaatggtgcactgtggtgagttgtgttatgcagagggtattgtcacagcctctattcgggtactttccagtatcgcgacgcatggtagacatgatgttgaggctgtgtcttgtgggtacagtggtacacctctggccagagtaaaactattcgaatagccgtgcccgcggttatgggcgagttgagcaatgtttttcgtgattagtcccacacctctcacaataagtattgatgttataactggtaataatttgcttagctcctggtttggagattagatctgtacagccgggtatggttgttcaggatggtcgggcctgtgcagcatgggtgtgctgttcagtgttgattaaaatttctgattaactactctactgttttatttctcttaaatattttgctaaacgctgcttttgcaaatgagtctatattatgccatcctttggtatccttgtgcacttgcatatttgctgtgtggcttgttgagtatgtcatatgctcattcttgcaataatcaatcaacctcagttgaagaaaaagaatccagaaggagaagacgtttggcttataccccagttgagctgcctgtgggagtggagccggagcttcgctagattttattttccgctgcagttttcttcatggtgaggactaagtgcctcttaagtaagtatttatcgttgtagttaatttgatgaatctgtatattaaattgttagtttgtgtacctcggctgattcctggacgaggattttatgcacaaataagttcggaaattactagtgaatttccgggcgtgacaagttggtatcagagccatctcgactataggataagccaaatggtcaaaccttaaggactaattttccgaaaacatgatttgtgaaaatttctcctttcttccttatctagaattctttgcaaattgtttcattgtctactctcctctctcgttcaacttgagtagttctgaaactagttgttgaaactagaagatgttgatgaggtcaacttatggaggtcagtaaagtggatcgaggaagaaccgaagtgccaactggtcaagatggaatgaagtttgcatcctaccttagaacctatgccaccaaagtgactttgaagaatagttagtaggatagaacgtttgttgcttgcttgtgtgtaggtatggttgcattcccgtcattggtgtggttcaatgatgagtgtgtaactatactaggttgcttgcttaatcaacttgaacaatataatggtctacacacatcagatcagtgttaacctggttaaggtcttgtctttagtgtaacccctctccttctatcttctctaatatgcaacagatggtgaacactcgcgccagtggaagtgaaaacaataacaatgaagggaacccaactcttgctcaagttctggctcaacagactcagttaatgaatatgatgatacagcagatgcagaaccagcttaaccaagggaacaacaatgctccactgccgcagaacaagttagctgattttcttcttgtgaggccacctaccttttctagcactaccaacccagtggaagcaggtgattggttgcacactattgagaagaagttggaactgctccagtgcacagatcaggagaaagtcgtgttcgcttcacatcagttgcaaggacctgcatcagaatggtgggatcatttccggatgaacagagcagaaggacaaccaatcacttgggaagagtttactgaaggattcaagaaaacacacatacctgtaggagttgttgctttgaagaagcgtgagtttagggctttgaagcaaaaggatcataccgtggcagagtatcttcatgagttcaatcgtctggcacgttatgctccagaagatgtgcgcactgacgaggaaaggcaggagaagtttttggaaggtttgaaggatgaactgtcagttacgttaatctcccatgactatgtggattttcagcagttggttgacaaagcaattcgacttgaagacaagaagaataggatggataaccgtaaaaggaaaatgactgtattccaggaggcacaaggtagtagccagaggcagcgtatcaagccactccaaattggtgaatcttttcccgctggtccaggacagtcgcaacagttgaacatcggtggtgagatcaaattagagactaatgaaagcaaagaagttaacatcgagcaagctaatcagccggtgctagttcagcaaggtcagtctcaagagaataacagtagtggaagggagcagcaggtatgtttcaactgttacaagccaggccactttgcaagagagtgtccgaagccgaagcatcagcagccgcaaggtcaggttaacaacattgttgtcacaggagccaatgcagtgccagttgcgtcttcaagagttgtgtcttcaagtgttacaactcagccaccagtttcaaagcggcagtagttttctttaaagccttagaataattatcggagttatggaataagatagactgcagtttacctatgcccttttctttctagccgttccgaatctcgggacgagattctttgtaaggggggtagatttgtcacatcgtgattttcgtttcaggatttataaattatttaataaattattaatagaatttatattaaatgttctttaatttacaagtgaagttaaatgtgggaaataaaatttcctaaatataaagcatggatggatttaatttttattaaattctccatgattaagtcaactctctgaaattttctcggatttttcagagctcaattcctaaatgatacaaagaacagttcagtaattatttgatcattaatgatctaatcataattgttaagagcttttcttgtttaaaatccttaaattataaattgttgtttaaaaggaattattagaaatgattttaaaagcctaaaagagaagatctaattttaatttgttaaatctcaatataaaattgggctagataaaattttgttaaatactttgcttaattctataattcctagatttttctgggatttatttgagctaaggaagtatttttaataaatggaattgcatttcatgaataatttaaattgaaaaaggtttttaaaagtctcttttggctttgggccgaaagccggcccaaaacctctctttctctctccctccccggcccagtcggcccagtccgccgagccgccgctatcctctctctctctgtcgctgacaggtgggacccacctgtcaggttaatttttctcgcgccgncgncgncgcccgaaaccctagcgctgggccggcgccgccgcttttcaaattcggtcgctccttttcttctccggccgaatcgattgaggggaaacaatctccgcgatccactctatcttttctcttatggaatcgtcgtctttttcgctttggaagttcgtggattcgaggtcgaatcggatcggtctctttcctccgaaccccgatctttccttctcgccgccggtcgccgtgggcctccgtcgccgctcgctagcacctttaaaacgacccccgagctctcctctacccgccgccaccctcgcctttgtctctcgccgtcggaagagccctagcgccatggatctagcgccaccgtcgtcgccgtcgctccagccgtgcgccgccgccgttccggtcatcgccgtcgctcgggaagaccgccatcgtggtcgccaagtcgccgccgtcctcgtccgccccttcgccgccgccgaagactgccggagcaccgtcgccgtcgtcgacccgatctccgccgccgcttcttcctcgtcgccggcgccgtccgttgcccttccgccgttgttttggtcaccagtgagttcgccgcgtcgccctctacccgttggtgtcctccgtttgcgtcgtcgcgccgtcgttcgccggcgagcatgcgttgccgagccgccgccggtgctgacgtcatcgctgacgtagccgctgacgtcatcgttgccgtttcccgtgagccggtcgtggaccgttcgatctcggccatccgttttggataagatcgatctcggccgttcgtttccgtgaaccgccgccgtgcacccggtccaccgcaaaccctagccgctgacgcaataatcctccttttccttttcaaaaataattcattattgcgtcataattcaattaaaatccatataagtgttttaatccgatttaatctttgaaaattcataactaattcattgtaactcagtttaatgtggttcaagttgcaaaaattatataaaataaagatctacatattaaaattgtccataaattgaattaaatttatttaatcctttttaaatgggctttaaatagatttaatcttgtaaaattcataataaattcatttgaagtcagaatgaggccgttcaagtctcataattcatctaaaattatgatctacatgtttgtttactttttatgtattgtttatttggtttttattagtctttttcttcgttttgcgtgatagcttgtcgtttccgtcgttgcgaaggttcgcgagtgcgccggaagtgttcaagaagattaattgaagaccgattattgcaaggcaagtcacacagatcctaaacacaatcctttgagcatgttgatcctatatttaaattctctatttatttcaactgtgcatttattttcgaatgtcactgggtggtgtgaacctattctttgttatggcctgtttgcattgattactttattccttgataccttgggtgattataattggactagttgagctttatatatattggttcaactagatactagatataattgcttagccatgcttagaaacattagcacacaattgggataactaatgtttcactatcacttatggttatatttaatggtagttcacgatggtcaatcgtgattggttaattaattacttgccaactaaaacttgataatggtgggttgtgagcacatggttttgagagtcatgctcatgacaattaaggaccggttcgcgagctactgttgtgaaacattaaccgtgccaaccacaagccagcgtgggcaacggctttaccttttgtataacatgattcattacggagcaccagactgagaagtggcggagataagcccacgggggtcgctggggagtccatgccttgtttatgtcacagcctctattcgggtactttccagtatcgcgacgcatggtagacatgatgttgaggctgtgtcttgtgggtacagtggtacacctctggccagagtaaaactattcgaatagccgtgcccgcggttatgggcgagttgagcaatgtttttcgtgattagtctcacacctctcacaataattattgatgttataactggtaataatttgcttagctcctggtttggagattagatctgtacagccgggtatggttgttcaggatggttgggcctgtacagcatgggtatgctgttcagtgttgattaaaatttctgattaattactccactgttttacttctcttaaatgttttgctaaatgctgcttttgcaaatgagccaatattatgccatcctttggtatccttgtgcacttgcatatttactgtgtggcttgctgagtatgtcatatgctcaccttgcaataatcaatcaacctcagttgaagaaaaaggatccagaaggagaagacgtttggcttatacccaagttgagctgcctgtgggagtggagccggagcttcgctagattttattttccgctgcagttttcttcatgatgaggactaagtgcctcataagtaagtatttatcgttttagttaatttgatgaatctgtatattaaattgtcagtttgtgtacctcggctgattcctggacgaggattttatgcacaaataagttcggaaattactagtgaatttccgggcgtgacatcggctaactatggttaatgtggtatgcttttagtgagagtaattattatatgtgatatcattggaaggatttatggctgtgttatctttcctctattattgtattgcattgcatttcattcgaagttatgtcgtgaacctatggtcgcgaccgtaccggtacagcatcgtgtattgtcgtaacacgatgcagcttcacaccttgttgggtgtgaaggcaggaatattattgcatttgcattgcattgcactttagcattttggggtatggaagttatatactctattgagttcatgagagggcttctttctcctgaggtctttgcagatctggtttatcctccttactcttgaacctatgaacactagatgtttgcctttatatttaatgttatgttcctttgttttcttataaatataatttaatgatttggtaggttaaataacttgataaaataattctcttgctgagatttattctcacacccctacagtgttttcaggtgcttaaagtgacatgctcgcttggggaaaacgggagtagaagcacagctgcattccacactgccaccctaatttttaaagttgtcatgatttttataataaaggaattgtacccttgttaagttgcactagatgaatctgagagttgaaattagtttatttcatccctgaatgttcctttctcctttttttttgtagatggctacttgcaatgctatacttatatttgacgcttccgcaatgcttatgttttagaggagttgctgtcgaaatttctccttctttgttaaatgtatgtctatttagtagcatcccgatgtctttgtagtttctggggtgttacaaagatcatccgcagcattgttatcgccagcatccctgtccacctcgcccgtttgatttccttcaaatccagcgtactgagcccagtcgggaatgttctcgtcctccacttcatcttcttctatttcaaccccttgctcaccgtgggatgtccaacaattatagcttggcatgaaccctgactcaaacaggtgaaaatgaatagtccaggatgcagaatactccttctggttcttacacttattgcatggacaacaaataaaaatgaatagtcctggatgcagaatactccttctagttcttacacttattgcatggacaacaaataaaaccgttacgcttgttagcttcggccactctcaaaaaataatgcacgccctcgataaactctttggaccgccggtcagcatacatccattgccgatccatctacatgaaatgaaaaaaaaatcatacataaataaattttgatacaataatgacagtcaaacagtaatgataaaataatttaaaactctttcgacgagcaattcttattaacaatttttgaagttctaaactaatattaatgttgtacttctcttaattttcaatttagtttgttttctattttttaagattaattttcatcatattttaaactatgagaataaaatttctatatattcttcttccccacataaattttctctctcatcaacttacaacaaagttttgtagaaaaaaaaatgtgtgaaacatagctccaaaagtaatataacaagaaaaaaaatattggaggatgaagttactaaccttttagacatatccgatttgtatataattactaaaaaattttcacaataaattttggcatgacctcctctttctttgagaaatttaagcttgctctcgggctagagaaggaagaaggcatatatacgggggggatctttattcccttggtgttaccaaccaactggggctaaagatcggatctttagcccctgttagtaacaacaaccgggactaaagatcccgggggccctgacaacatctgacatctctacaaccgggactaaagatgatctttagttccagttgatgttaccaacggggactaaaagatcacatatacgcgttgtagccgccgaccaaagttggtttctccacgggcgggagttgcagcttcatcactcttcttcgggtgcttacgtgccgcccgccctcccgttagctagctagggaatactatgtctgcttgcttgatccactgagacatgcttctagttatatattactaacttgaaatgcagtagctataattagttgttgataatactattcgtgaagagtgtctcgatcaaggttaatgaactatagttatatatgctccacggagacatgctgttagttatatgctacaagtgataattaattatactccctccgtttcaaaatcttactatttttgaccctgacacagtctatgagatactactttgaccaccaatatttataaaagtaagatgttttaaacaaaaattaattatatattatgatagtttgcttaatgataattaaaatatttgacttgtcattaagttaaaaatatttatattttaggacggagtgagtaattgttataattagttgttggtgtgcgtgaattggttggcaaaaatatccgatcgagcgcgtcggcaggccaaatgcatgcattctgcagactcttgcagcatgtgaagctccaggacaagagtgaccagctaaggcacagttcgcgtcacgcactttttgcatgattgcatccgggttccggtgatacttgttgcccaacactggagacaagcacaactgataaaacacgcgcggcccatttcatcctgtgttaatagcccacggcccatctcccttcccaccttatcctacctaggaataagttcaccggaggtccctcaacttaccgagttctttgaggttccttaacaacaaaaaccataaatgtgtacatcaaactcacttaaaccgttcaaaggagatccatggcagtatttttgactggttttgctgacgtggcatccaagttagcaaaaaataaaaaataaatacgtggggcccacatgtaagtgaaaaaaaatgtgaggtctctcttttcttttctttttttttcttctcttctcttctcttcaaatccaaatctaggcctgcggtagaggtgttagaggtgacggcggtggcagcggcgcacagccaaaggcaggcggagcggcggcggcagcgagtgagtgcgggtgcggagcaacggcgtcgtcggcagcaaacagtgggcgagcgcgcggtggcgggcgagcggcggctccgggttgccgccatcagagttagtaccgagggagaaggagggcgcgtcaggaacctcgtaacttcaccattgctcctcccagtggtgctcctcatcaccgtcgatgtcgagagagaaggatggtgcatcgagagcctcataacgcttctgctcctcccctccattgccgttgtcggtgaggtgggactcatcaccgtcgccctcaaaatcgattccgagagagaaggatgaagtccatctgctagcaacggcgatggagggatttggtggagaactcagtaggttggcagaggggggaccagcggcgagcgagagcggcagaaggcacaacagcggcgagaaagcatggcagaggggggaccagcggcgggcgagcatggcagcgggaggagtagagtggctggagtaggccgcaaaggggggacggctgcaggcgacatggcaaagggacggagcagcggccgccgcgacacttctcgagcttctcaagctgtagctgccgtcacgcttctcgagctccacctccacgagctccggccctcgatctcctccaccagctgcggtgcctccaccgccctccgcgtctaaccctgctccgcccggcgccgaccccgcaccgggtcgagcacgcggcacacgaatggtggcggcaacacctaatgccgcctccccctcgctttcccgccggccgtttcccgcccctcccgccggccacctgccccactcccaag

SEQ ID NO: 27186 - DNA, 3415 bp, Oryza sativa
caccaaaggtgtcgggctaggatggcaagctcgccgaagattggatgatcggctgcgaatttggagaacatgtacgcgtagagtcggccgagccgaacccaacggtactcaccctcgagccaaacgtcaaacgacgacgtccgtcgactaaggggcggcgacggcggctcgggataaccggcgacggcgagctacggcggccggcgacgaaggagaaggtgcgaccgagcttctcgtcgctcccacgcacctaatggcggtggcggcaagcggcggcgacggcggagacgtctgcgcggcggcgccggagatggccggcgacggcggcgaggctaagcagcggcggcgcggcggctaggaggcacgggagaggacgggagttggggcaaacgaaagaggaggactagggggtcctagttatagccttggattgaagagatcggactcctcctacaagaaatcgatccgggaaatcaaaaactcggttttggagataaactcaaaaacgagttcgattcggataaaatactcaacgattagctccgatttttgggggtaaagatagaggaggataagaggaatatttcccctcaactaatttggaaagaggagcaacgaggaggccggatttggaaggaggagcggcacggctgcacaggctcgggacggctcggctctgtccaggggttgaagacaacactgtagcgagagggaggacaaacagacttctatgcgggctgagaggaagggacagaatgggctggattcggcccaagctgagtaggaggatttttattacttttccaattaaattaatcaatgaaatgatctttgaattgttaaaaatacttcctatgcccaaataattccaagaaaaatcttgaaaatacttggacactcaaagtacttaacaaaattataatcagaccatttaatgattaatttaatatgtggattattactgaaatgttctttgtattattaaaattaggaattgagctccgaaaaatccgagaatattccagagagtataattaaccatggagaatttaaaaaaaaaaatccatccatgctttatatttaggaaattttatttcccacatttaacttcacttgtaaattaatgaacatttaatataaattctaataataatttattaaataatttataaatcctaaaacgaaaatcagggtgtgacaaatctaccccccttacaaagaatctcgtcccgagattcggaacggctagaaagaaaagggcataggtaaactgcattctatcttattattccataactcagataattattctaaggctttaaagaaaactactgctgctttgaaactggtggctgagctgtaacacttgaagacgcaactcttgaagacgcaactggcactgcattggctcctgtgacgacaatgttgttgacttgcggctgctgatgctttgtcttcggacactctcttgcaaagtggcctggcttgtaacagttgaaacatacctgctgctcccttccactactgttattctcttgagactgatcctgctgaactggcactaattgagtagcttgctcaacattatcttcattgctttccttagtctctgatttgatctcaccaccgatgttcaactgttgcgactgtccttgaccagcggaagaagattcactaatttggagtggcatgatacgctgcctctggctactaccttgtgcctcctggaaaacagtcattttcctttttcggttatccatcctgttcttcttgtcttcaagtcgaattgctttgtcaaccagctgctgaaaatcaacatagtcatgggagatcaacgtaactgacagttcatccttcagaccttacaagaacttctcctgcctttcctcgtcagtacgcacatcttctggagcataacgtgccagacgattgaactcatgaagatactctgccacggtatgatccttttgcttcaaagccctaaactcacgcttcttcaaagcaacaactcctacaggtatgtgtgtcttcttgaatgcttccgtgaacttagcccaagtgattggttgtccttctgctctgccttggcgaaaatgatcccaccattcagcagcaggaccatgcaattgatgcgaagcaaaagaaactttctcctgctcagtacactggatcaaatccaacttcttctccaccgcatgcagccaatctcctgcttctactggattggtggtgcttgaaaaggtagggggtctcacacgtaagaaatctgccagcttgttttggggaggtgggggtggattctggttctgattgtttgcctgctgattctgtgcctgctgcactaacagattgatcagttgtgtttgttgggccagaatctgagctagcgtgggatctcctccattgttagcagctccacctccacttccacttccacttctggtgcgcgtgttcaccatctgttgcatattagagaagatagaaggagaggggttacactaaagacaagaccttaaccagtttaacactgatctgatgtgtgtagaccattatattgttcaagttgattaagcaagcaacctagtatagttacacactcatcaatgaactactccaatgatgggaatgcaaccatacctacacacaaagcaaacaacaagcgttctaccctactaactattcttcaaagacactttagcggcataggttctaaggtaggatccaaacttcattccatcttgaccacttggcacttcggttcttcctcgatccactttactgacctctataagttgacctcatcaacatcttctagtttcaacaactagtttcagaactactcaagttgaacgagagaggagagtagacaatgaaacaatttgcaaagaattctagataaggaagaaaggagaaattttcacaaatcatttttgttggaaaaattcgtccttaaagtttgaccatttggcttatcctacagtcgagatggctctgataccaacttgtcacgcccgaaaattcactagtaatttccgaactaatttgtgcataaaatcctcgtccaggaatcagccgaggtacacaaactgacaatttaatatacaaatccatcttaataataacgttacatacttacaaagaaaagaaaatagcagcggaattaactgtctagcgatggcttcagctccactcccacaggcagctcaactggggtataagccaaacgtcttctccttctggatcctttatcttcaactgaggtttgatgattattgcaagaatgagcatatgacatactcaacaagccacacagcaaatatgcaagtgcacatggattccaaaggatggcataatataggctcatttgcaaaagcagcatttagcaaagatttaagataagtaaaacagtagagta

SEQ ID NO: 27187 - DNA, 31909 bp, Oryza sativa
cgtgaacgtgaaatgcaatatatatatgttacttcgcatttatcctaatacatattttttgtatcttgcagaaaagacgtgttgtcggagtcgtccctcaagccggagtggaagagctagccctagaaggaattcgtgcaggcaagtgaagtaataatataaatgattgttatatttgtaatgcaattaagaatattagacttgtaattagacttagcatataagattgtgtagtgttctaatattatttgagttttaatataagattattttattgcaaattagacttagtatgtaattattgactacggaattggtgcgactcctagcaattgactattgtagtcttaattagacttagcatatacgcacgaaacacttagcatacatgactattttagtcttagcatgtaatattatttgagttttaatataagattattttatttgtaattagacttagtatataattattgactacggaattggtgcgactcctagcaattgacaattttagtcttaattagacttagcatatacgacagttacacttagcatacatgactctttcagtcttagcatgtaatattatttgagttttaatataagattactttatttgtaattagaattagtatgtaattattgactacggaattggtgcgactcctagcaattgactattgtagtcttaattagacttagcatatacgcacgaaacacttagcatatacatgactattttagtcttagcatgtaatattatttgagttttaatataagattattttatttgtaattagacttagtatataattatttactagctagggttgtataatatacgtcacctagacttagcttatatcacgatttgtaattagacttagaacgtaaggttgtgtagggttctaatgtacgacatttacacttagcatacatgacttagattgttaaaacataaatgtctcgtgacttagcagatgtttcttgtatcaacagatggctgaccgcgatgaggaacagatattgtacgatacaatctgtcacatcctgatttttgtttcaggatttataaattatttaataaattattattagaatttatattaaatgttcattaatttacaagtgaagttaaatgtgggaaatgtcacgcccggaatttctatccaaaattccaaacgcttacatgtgtgtgaaccctcgtccaggaatcagccgaggcacacaataacaaattgataatagagtacaattattactctaattaataagcgaataaaatgtcattacagaggtagatagttcctctcaatcaataaagatctaagcagcggaaaataagataaacggcgcagacggctccactccacaggcagcttgaccagggctacacctaatcctccacaccatcagcatcattgtagaactcttcctctgatgaatgattgcaaggtgagtatatgacatactcagcaagtcacgcagcaaatatgcaagtgcacaaggataccaaaggatggcataatagggttccatttgcaaaagcagcatttaataaacatttcagaatttaataaaacaattaagtaataattaaacaatattaatccaacgctatacaacataccctgttgtataggcccaacctttctgaacaaccatacccagctgtacagatctatctccaaaccaggaatataccattccaaaccaggagctaaacaaattattaccagttatagcatcttttactaagatgagaggtgtgagactaatcacgaaagacattgttagacccgcccataaccgcgggcacggctattcgaatagttttactctgatcagaggtgtaccactgtacccacaagacacagccccacatcatgtcaccatgtgcctcaataccaccacggtacctcggaaaggagctgtgacaataccccttgcataacacaatccaccgcaacgcaccattcctggatcataatcacccccttataaacaaggcattgactccccagcgacccccgtgggcttatctccgccacttctcagtctggtgccccgcaatgaaccatgctatacaaaagataaagccgttgcccacgctggcttgtggttggcacggttaatgtttcacaaccgaaactcgtgaaccggtccttaattgtcatgagcacgaccatcaaaaccatgtgctcacaacccaccattatcaggttttagttggcacattaattaatcaatcacgattgaccatcgtgaactatcattaagccatcattaaataatagtgagtcatgagttatcccaatagtgagctaatgtttctaagcagggctaagcaattatatctaatacatctagttgaaccaacatatagagctcaactagtcaagttataataacccaaggtatcaaggaataaggtaatcaagaacaaaaaggctataacaaacaataagttaattccacccaatgacattcgaaaataaatgcaatagttgaaaagaaacaatagctttaaacgggatcaacatgctcaaagggttgtttgggatctgtgtgacttgccttgctggccttggaactcttcaaactcttctccggcgaaaacagactctccagaaacgacggaatctaagcagaaaagagcaaaatcaccaaaacagcacataaacaagcatgaacagtacatgtggatatttttaacatgtagatctcaattttagaaaaatttagagacttgaaccaactaaatccgagcaaagatgaattagttatgaatttttgaagattaaatcggattaaaacacttaaattgattttaattgaattatgacgcaataatgaattatttttgaaaaggaaaagaggatttattgcgtcagcgactagggtttcgcggtggaccgggcgcacggcggcggttcacgcgaacggacggccgagatcgatccatccaaaacggacggccgagatcgatcgggtccacggcggctcacgggagagggcgacgatgacgtcagcagtgacgtcaccaccggcggcggtggctcggcggctcgggcttgcatgctcgccggcgaacgacggcacggcggcgcgaacggaaggcaccaacgggtagagcgcgacgcggcgaactcaccggtgaccaaacgagcggcggaagatcaacggacggcgacggcgacgacgaagaaacggcggcggtcttcgggtcgacggcggcgacggtgctccggtggtctacaacgacggcgaaggggcggacgaggacggagacgcgacggcgaccacgatggcagccttcccgagtgacgacgacggctgaaacggcggcggcgcacggctggagcgacggcggcgacggcggcgctagggcacacggtgctagagctcttccggcgacgagaggcgaaggcgagggtggcggcgggtagaggagacaccggggagccttttaaaggggctaggaggcgacggcgaaggcccacggcggccggcgacgagaaggaaagttcgggaaaatcgaatccgaaacaaactcgaatccacgaatttccaaacgattttagccgatgtttccaaaggagaaaaggtagaggagatcccgaggatcatttcccctctatcaattcggccggaaacggaaaggagcggccggattggaaagcggcggcggcggcgcgaaactagggtttcggccggaggaagacgatgggccccacctgtcagcgggcgaacgcgcgcgcgcgcgacggcggactgggccgacttgggctgaggagagagagagcggttttgggccgactttcggcccaaagccaaaagagactttttaaaacctttttcaatttaaattatttcttaaatgcaattccattcattaaaaatacttccttagctcaaataaatcccagaaaaatctaggaattatagaattaagcaaagtatttaatgaaattttatctggccccattttatattggaatttattaattaaaattagatcttctcttctaggcttttaaaattatttctaaaaattccatttaaacaacaatttatatattttgaattttcagggtgtgacaggaaataaaatttcctaaatataaagcatggatggatttaatttttattaaattctccatgattaagtctactctctgaaattttctcggatttttcggagctcaattcctaaatgatacaaagaacagttcagtaattagttaatcaattaatgatctaattataagtgttaagagcttttcttgtttaaaaatccttaaattataaattgttgtttaaaaggaattattagaaatgatcttaaaagcctaaaagagaagatctaattttaatttgctaaatctcaatataaaattgggctagataaaattttgttaaatacttctcttgaatctttagttcctagatttttctgggatttatttgagccaagaaagtatttttaataaatggaattgcatttcatgaataatttaaatagaaaaatgtttttaaatcctccttttggctttgggccgaaagccggcccaaaacccctctctctttctctctccctccccggcccagtccgcccagtccgccgcgccccttcctcctctctctcagccgctgagaggtgggccctacctgtcaggcccgtcttcctcctcgcgccgctgccggccgaaaccctagccgccgccgctttccaatccggtcgatcctttccgtttccggtgaaatcgtttgaggggaaataatctcctcgatctcctcttccttttctcttatagaaacttcggtcaatttcgtttggaaatcgacggatttgagctcgattcggatcgacttttctccctccaaccctagctttccatctcgccgccggtcgccgtgggcctccgtcgccgctcgctagcccctttaaaagcacccccgagctctcctctatccgccgccacctttgtcttagcccgccgtcgcgtctagcgccgcctccgcgtagccctagccgtcgctgtcgttgccgtcggttcagccgcgccgcgccgccgttgcagccgccgtcgtcggtcgccgtcgccaccatcgggatcgcgaggtcgtcgccgtccccgtccaccgcttcgccgccgccgaagaccgccggagcaccgccgtcaccgtcgacccgaagaccgccgccgcttcttcctcatggccggcgccgtccgttgctcttccgccgtggttttggtcaccggtgagttcgccgtgttgtcctctacccgttggtgtcctccgtttgcgtcgtcgcgctgtcgttcgccggcgagcgtgcgaggccgagccgtcgtcggtgatgacgtcatcgctgacgtcaccgctgacgtcatcgtcgccttgtcccgtgaaccgcggtagatcaagttgatctcggccgtccgttttggataggatcgatctcggccgtttgtttccttagaccgtcccgtgcacccggactgcctttgatgacgcaataatcctccttttccttttgaaaaatagttcattattgcgtaataattcaattaaaatccatataaatgctttaatccggtttaatctttaaaaattcataactaattcattgtaactcagtttaatgtggttcaagttgcaaaagttgtgtaaaataaagatctacatattaaaattatccataaattgaattaaatttatttaattctttttaaatgggctttaattagatttaatcttgtaaaattcgtaataaattcatttgaagtcagaatgaggccgttcaagtctcataattcatctaaaattatgatctacatgtttgtttactttttatgtattgtttatttggtttttattagtctttttcttcgttttgcgtgttagcttgtcgtttccgtcgttgcgaaggttcgcgagtgcgccggaagtattcaagaagattaattgtagaccgaatattgcaagtcaagtcacacagatcctaaacacaatcctttgagcattttgatcctatatttaaattctctatttatttcaactgtgcatttattttcgaatgtcactgggtggtgtgaatctattcctttgttatggcctgtttgcattgattactttattccttgataccttgggttattataactagactagttgagctttatacattggttcagctagatattagatgtaattgcttagccatgcttagaaacattagcacactattgggataacttatgacttattattatttaatgatggcttaatgatagtttacgatggtcaatcgtgattggttaattaattacttgccaactaaaacttgataatggtgggttgtgagcacatggctttgagagtcgtgctcatgacaattaaggaccggttcacgagctactattgtgaaacattaaccgtgccaaccacaagccagcgtgggcaacggctttaccttttgtatagcatgattcattgcggagcaccagactaagaagtggcggagataagcccacgggggtcgctggggagtccatgccttgttttataagggggtgattatgatccaggaatggtgcactgtggtgagttgtgttgtgcagagggtattgtcacagcctctattcgggtactttccagtatcgcgacgcatggtagacatgatgttgaggctgtgtcttgtgggtacagtggtacatatcacaccctgaaaaattcaaaatatataaattgttgtttaattggaattattagaatttattttaaaagcctagaagagaagatctaattttaattaataaattccaatataaaatggggccagataaaatttcattaaatactttgcttaattctataattcctagatttttctgggatttatttgagctaaggaagtatttttaataaatggaattgcatttcatgaataatttaaattgaaaaaggttttaaagagtctcttttggctctgggccgaaagtcggcccaaaaaccgttctctctctcctcggcccaagtcggcccagtccagtccgcagccgcccacgcgcgcgcgcccccgcctgtcaggtcgtcgtcttcctcgcgtcggccgcctcccgaaaccctagcgctgcgccgccgccgtctccttccaaatccggccgctcctttccttctccggccgaattgatagaggggaaatgatcctcgggatctcctctaccttttcccttttggaaacatcggctaaatcggcttggaaagcgtttgattcgaggtcgaatcggatcggcttttctctctccgagcccgacctttccttctcgtcgccggccgccgtgggccttcgccgtcgccctccaacccctttaaaaggacccccgagctcttctctacccgccgctaccctcgccttcgcctctcgtcgtccgtagcgccctagcgccgagtagcctcgagccgccgtcgccgccgtcgctccagccgtgcgccgccgccgttccggtcatcgccgtcgctcgggaagaccaccgtcgtggtcgccaagtcgccgccgtcctcgtccgccccttcgccgtcgccgaagaccgccggagcaccgtcgccgtcgtcaagccgaagagctccgccgtttcaacctcgtcgccgtcgccgtccgttggtcttccgccgctcctttggtcatcggtgagttcgccgcgtcgcgctctacccgttggtgccctccgttcgtgccgaagtgccgccgttcgcaggcgagcatgcgcgtccgagccgccgagccgccgccgccggtggtgacgtcatcgctgacgtcatcgttgtcacatcctgatttttgtttcaggatttatagattatttaataaattattattagaatttatattaaatgttcattaatttacaagtgaagttaaatgtgggaaataaaatttcctaaatataaagcatggatggatttaatttttattaaattctccatggttaattatactctctggaattttctcggatttttcggagctcaattgttaattttaatcatacaaagagcagttcagcaattgtttaaatattaaattaatcattaaatggtctgattataattttgttaagtactttgagtgtccaagtattttcaagatttttcttgaaattatttgagcattggaagtatttttaacaattcaaagatcatttcagtgattaatttaattggaaaagtaattaaagttcaccttttccttttcgggccgaattaggaaaagtcctctcactctcggcccagtctcctctcagcctgcagcccttttcctctctttcccgaagtctgctttatttccctcctttaatcagtccttggaagtagaagcccagccgaaagtctagtttgcctccctggcactattcatcttcaagcttggacagagccgagccgccggtgctgtgccctgtgcagccgccgcttcctccgttaaatccgccacatcccgagctccgtttgcaaaatttgttgaggggaaatattcctcttatcctcctctatcctctcccccaagaatcggagcaaaccgttgagtattttatccgaatcgaactcgtttttgagtttatctccaaaaccgagtttttgatttcccggatcgatttcttgcgggaggagtccgatctcttcaatccaaggctataaataggaccccctagtcctcctctttcgttttccccctctcccgtcctctcccgtgcaccgtagcccgccgtcgacgccgcatagtccgccgccgccgccggccgggttgcagccgcgccgagtcgccgtcttcgccgtcgccgccgcttgccgccgccgcctttaggtgcgccaaggtgaagagaagcccggccgcacctcctccttcgtcgccggccgccgtagctcgccgttgccggtcaagccgagccgccgccgccgttcatctcgtcgccggccgtcgtcgttcgtcgtttggctcaagggtgagtaccgttgggttcgtctcgtcgttctccacgtgtacatgtcctccaaatttgcagccgaccatccaatctccggcgaggtcgccaacccgggccggccattgatgatgtcatcatgacgtcatcattggttttttctttttcccgtttttctaatagattaaatcttctgaaaatcataactaaataactgtagatccgattcgagtggttcaagttgctaaatttttctaaaatcaagatctactgccggccgggttgcagccgcgccgagcagccgtctccgccgtcgccgccgcttgccgccaccgccattaggtgcgtgggagcgacgagaagctcggccgcacctcctccttcgtctccggccgccgtagctcgccgtcgccggttatcccgagccgccgtcgccgccccttcgtcgccggccgtcgtcgtttgtcgtttggctcgagggtgagtaccgttgggttcgtctcatcgtcctctacgcgtacatgtcctccaaattcgcagccgatcatccaatctccggcgagcttgccatcctagccggccacctttggtgatgtcatcatgtcatcatcggttttttctttttcccgtttttctaatagattaaatcttcggaaaatcataactaaataactgtagatccgtttcgagtggttcaagttgctaaatttttctaaaatcaagatctacatgttaaaaatatccacatatactgtttatgcttttttttgtactgttttgttgatttttattctttcgctttagtttccgacgttccggaggagagcgttttcgttgagcaaggttcggaagtgtttgcggaagctcaaggcaagtcacacagatcccaaacaaccctttgagcatgttgaacccgtttaaagctattattttatttcaactatgcattatttttgaatgtcatcgggtggtgaacctttccccgttaattaatggccgaagatgatcttatttttctatgggttataatttgattagcatgaaccttatatattggtttggttcagttaaatgctatatgtatgtttgcttagccatgcttagaaacattagctaattaaaggggattaaatataaattatattatattattcttattaattatggttatatttaatggtagctcacgatgattaatcgtgtgatgttaattaattgataattaaaacctgtttaaggtgggttgtgagcatatggttttgatggttgtgctcatgacaattaaggaccggttcgcgagctactgttgtaaaacatttatcgtgccaaccacaagctagcgtgggcaacggctttatcttttgtatagcatgattcattttggagtgccagactgagaagcggcgagaagtccgtgggggtcgctggggagtccatgcctctggttgtagagggggtgattatgatccaggaacggtgcactgttttgagttgtgttgtgcagagggtattgtcacgatttccccctttgcaatgccgtggtggtatttcggggcatggcaacatgtgtggaatcgtgtcttgtgggtacagtggtacacctctggccagagtaaaactattcgaatagccgtgcccgcggttatgggcgagttgagcgatgtttttcgtgattagtctcacactactcatcaatgttaataatgtgataattaatttgactcctggtttggaatggataattcctggtttggaggtttgatctgtacgaccggggttggttgttcaggtttggttaggcctgagcagcatggatgtgctgtttagtgttgattaaaattgatgattaactactctactgttttacttatcttaaatctttgctaaatgctgcttttgcaaatgagcctatattatgccatccttcggaatccatgtgcacttgcatatttgctgtgtggcttgttgagtatgtcatatgctcattcttgcaataatcatcaaacctcagttgaagataaaggatccagaaggagaagacgtttggcttataccccagttgagctgcctgtgggagtggagctgaagccatcgctagaccgttaattccgctgctgttttcttttctttgtaagtatgtaacgttattattaagatggatttgtatattaaattgtcagtttgtgtacctcggctgattcctggacgaggattttatgcacaaattagttcggaaattactagtgaatttccgggcgtgacagtttagtggtgtgagagtcttcagttttgtaataatgaaactcagttaagatcaataaaagttaaagtaattctctgtcctaagtagtttcccccggtttctcttcttgtgccctgtccatgccagatggtgctcactcgcagcaacgggaatggccccaacaacaacaataacaataacaatggagagaatcccacacttgcccaagttcttgctcaacagactcagttaatgaacatgatgatgcagcaacttcagaaccagcaaaaccagggaaataactatgcgcctccccaaaacaagttagcagaatttcttcgtgtgaggccgcctattttctctagcaccactaatcctgttgaagctggtgattggctccatgccatagagaagaagttggatttgcttcaatgcactgatcaggagaaggtctcatttgcatcccatcagttgcatggccctgcctctgaatggtgggatcacttccgtctgaataggactactgctgaacctatcacttggcttgaattcaccgctgctttccggaagacgcatataccatcgggagtggtgtctctcaagaagaaggaattcaggtcgctcactcagggatctcgctctgttacggagtatctgcacgagttcaatcgtcttgctcgttatgctccggaagatgtacgcactgatgaagagcgccaggaaaagttcttggcaggacttaatgatgagctttcttacccactcatgactggggattatcctgatttctagaagttagtggataaggctattcgccaggaggacaagtacaatcgcatcgagcagaagaaacgtcggattgctcaattcaagacacaacaggggaatagtcagaggccgcgtcttactttaggaccccagtccatgccacagggaggttcttcgtctgttgttcgtccgcagcgtcagttcttcaacaacaatgctggcaacaacatccgcaatcaagctctacgccctgttgcagcctcgacacagcaacaacctgccaagagggagcaaggcagaaagcccgtggtgtgtttcaactgtggagacccaggacattacgctgacaagtgtccgaagccccgacgcgtgaaggttgtccctgctcagagcaactctaccgcaccagcgccaaaggcccgtgttaatcatgtcgctgctgcagaagctcaagatgctccagatgtgattttgggtacgtttcttgttaacttagttcctgcaacagtgcttttcgattctggtgctacacattcattcttatctatgagttttgcgggaaatcatgggatggaagtagaagatcttagacgtcctttgatggttagtaccccaagtaatcaagcactctctttgcaacgtagcctctctgtcagaatagaaattcaaggagtaccatttctggccaatcttatcctgttagaatccaaagaccttgatgtcatcctagggatggactggttagccagatataaaggtgtgatagactgtgccaacagaaaagtaactctcaccagcaatgatggtcgagttgtaactgttcatgcattgtcttctgagtccttaaggtcaagactgaaccaaataactttggaagagattcctatagtccgggagtatcccgatgtgttcccagatgatttacctggtatgccgcctaaaagggatatagagttcagaatagatttggtaccaggaacaactccgatccataagagaccttatagaatggcagccaatgagttggcagaagtcaaaaggcaagtagacgatttgcttcagaaaggatacatcagaccgagttcatctccatggggagctccggttatttttgtggaaaagaaagaccatacccagaggatgtgtgtggactatcgtgcactaaatgatgtgactatcaagaataagtatccgctgcccagaattgatgatttgtttgatcagcttaaaggtgccactgttttctccaagatagatcttcgatcagggtatcaccagttgagaatcaaagaggaagatatacctaagacagcttttaccactagatatgggttgttcgaatgtactgttatgtcttttggacttaccaatgcccctgctttcttcatgaacttgatgaataaggtgtttatggaatacctagacaagttcgtggtggtctttattgatgacattcttatgatcggagcgaggatcagggacacggacttcttgcaaggagatgacattctctggatcaatttcaggggaatctacgaactataccagctggacgccctcgacgtctctattatgagttgctggattttgtaagtatatcgttcagttagatttcttactatacgtctcctttaattaattaggtccttgtatataagtagactatagaaaataatatactcccttttatcgttgtagaatggagattcaaagggcccgacggcggagggttttcgatactggattcatcgaccctcggagagtaaacgtcacaatgcttgaccaatatccacaagaaacagaggacaatctcgtccatctcctgaaggcgcagcattacaagacgttcatactgttgccgtacaacatagagttagtttaattttactgtcttcctacataccaaatttcattcccgtacgaacttgctaagtgtttcatatgtaatgcatcccacgcacattgcagattccactgggtgcttttactcttcgacctgtcggcctgcaccgtcaacgtatatgacttaatggataaaaaagagtctacgtttgactattttttcgaacttatagacaggtaccgtcataagttcctctgttaattaagaaaatcttgttatgttaattgctactacgaatcatagctttaaactccatgtagggcttggtatcgattccgtcatttggtccgcggcaaatggagagaaagacttaggcggaagttcaaatttcctgtgagtacacatgctctatatttatatttctccgattcaaatacatacaagtgtatattaattagatctctcgttgtttgtcatttatttgtagtgcgcaaagcaaaagcagggaactaacttgtgcagctattacgtgtgcgagtattgccactgccttgcagaccaaatcatcaccacaagagagctcgatgtacgtacaaataaattcaaaatttcattacgtaacgatttcttgtttaattactaatcaatttcatacattcatatagtttattcgcatgagggataacctgaccacacacaaggaatttatcgcggcggttcaagaacaactcatgggattcatcaacgaagaaatccttgatcccaagggtgaattctactacgacggaaacacaattcaccggtccttagcttctgagctagcagcgagtactactactacgtcgaaatcgtagctatctaggacatataatggattgtaattaatacatgactacatatgtttctatatgcatgtgtacacattttctataatgtaaatatattttggtcatatatatatatatatatatagtaaatttgtttgtatatatacatatgcatttgcataacatatatatgtataagtacacagggccatgcaaaaaaaaaaaggtcagctcgatctttagtcccggttggtaagatcgatctttagtaccggttatttcacccgggactaaagataaagatagcgatctttagtcccggattggtactcccggtttggaaaccgggactaaaggggggttataaaccgggactacaaagggtttctccaccattgacagactcaaattttcagggaaaatgttttgcaaaatattttagttgcactcttctcgattcttctgttgaagtgatgttgccttctcttaatttcttttaacttggatttaaactttatttgcaaagttaatcgctctcttttaaaatgtaaacctctctatcactactaggaaaatgatttgttgctacgaaaaaaatcgtggcaacaatgctaaaatcgtggcaatagatacatattgccaccattttaaaaccgttgctagccgtggcaatagaaacagtagcaataggttattgcaacaatttttatctagtggcaacaaactttgataatgccacaaaataatcgtggcaaaaaaacatattgcaacacttaacatcgttgcaacaaataattattgccaccacttcgtgcgtggcattagttgtgcttgccacaaaatagtttcgttgcaatatctaatatatgttattgccacatagcattaatcgtggcaatatatcatatgggttattgccactaaaatatttttgtggcaataagtattattacaatgaaatgaatttcttctagcttttatagaaaagaaattgtgttacatcagtaattggatggatcatttggtactattgcaacatgagtagaaatatatgttaaatggcaaaacccttgcaactcatgcgcacaagaattatgatgtctgatatttccgcgaataagacataatatatttcagatacccaaagtaatgatgacaatatgagtatgttaaatttccaaatgctgaaatacaagttgtctgataaaactaaaagttctgaaactaatgagtttgtaacattgttgtcgaaactagcttttctagccatcacttgtttgattttgtcgtggtttgctccagccattcaacagtaacagagttgattgttcctcctgtacaaatgtatggacatatagttacaagtcgtatttaaagtaaagaaagtcaccatgtaaaatgcagagctattttatctagttttctgctagcatgtatagttaccaaaacttcataatttcttcaaataaaggacattgccagagtctgcagtgcaactaattttagtatctaacatgattaaattgagttagaagtcatatgccataactatcatgccactgtatggacatgtgtgttctttggattgatggaaacataaacaaatgtgattagtgctcactatatctgacattttttaagccatgcccctgttatttactgacttgtgagacccactgaaatatatatgctttgttacatatgtggtggctatatatagtactgtgttgctaatcatttatatggcatgcatgcttatcttagttagctcagataaacaaaacaaaggtctatggggcagtaacagaagcttagatgccccatatactaataaactaaacaggcaactgtttttgtcagcaaaggggacgtgccaaatactaatacaatccaatgagttaagtagcaaaagtaccagatcattacctggatgctacaccaaaccccgagctgatttagatatttctttcattcattcttccattttctcctctggcctgttacaggatttggccatacacaataagaaattattttttttacaaacagaccatgagcaggaaaacatattgtaaatttttttgcaaaagatcatttcaacatagcagcttgctgaagatttgtaattacctgatcagttcgggaccgtacaaaatttctagcaacattcctaagatgttgtgaagaaatattttgccgggtagtacttgttgttccttgcaaattagcgccgttaaaaagtgctttcacaactgtgttgttctgaatgcttcgagccttctttgttgtgtcatgtggttctctattctcagttggacaatctattgccagatcagacttcacaccataaaacaagaaatatatatattatgattccacatttgacatatataagatatcaaatattggtgaatgtgaacattttggcaatcattacctgttgttccgatgctacgctttgcgtagtaatcattttgagaatatcctcccgtagcatttccctttccttacgttcttctgaatcttcccgtgacattgtcatcatctgaatcttcaccgtggtaaacccactgtatgtaactttcatcgaatccattccttagcaagtcactttgcacttcggagcgtgttttgtgcaccacattaaggcatcttctacatggacagggggcattatccccaggattatcatcttgaaatgcaaaatttaaaaattcctgcaaccctttttgccactctgcagttgccctactcatgcgcatccaactcctatctactgacatgcttcctgcttatcactatacaatattactaatagtatcaaaccacccatttaatgaaaaaaaaacaaggaaaatatggttggcactttatgatcttaaggaaaatggagaaactgtgtgaacataaactcaccttgccagaacttgtctctgtaggctgaccagaaaaaatattcctgtacaaagatatgaacagataaattagaactaaacaaaatcatgaggatttgagctgaaaaatagacattggacagtaacagatatattggtattcccatggaaggtgtttcttatttttcaaaattcatatgggaaattggacaaactgaagaaattaataaatatgagagaccgtgtatagcaaatttggatattgtgcagtataaccaaggtaaccttgtgggagacagaaattcagaaacaaagacagaaattcagaaacaaacataactcatctgagctattctacgctagcaatgctcgccctgcctgctctgcttgcctactaagatagctaatctgaagttctaaactactcactgtcgctgccgctgcggccgtcaccccatctgcagcaagcaacatcctttgctctatgttaccgagatacagggatacggatatggataggatacatcattttctgaaaaacatggatacgggatacgtctatatatgtatacaaaaataatatgaatttatgcctgggaaatcaatagcagtagtaaaaaaaataaatcatgtcttccagtctgatttctctctatcttctccaataactcaatttaattacctccacaacccattggatggcagctttgtgccctggcctacgtggtagtgtggtggcgatggcatagggcgtccggcggtggaggcagtgctacgcccagcggcggcggcggcagcggcgcgacgcggcatattcggcatccgacgatacacccggcttccgtcaacggcagcgctgcgctcggcttccatcgacggcggcggcgctgcgtgcaacttccatcgatggcgccgcggccgaccccccatctgcagcaagcgacatcctccggctccgcttcctcgtcgacgccggggccgaagccgaccctgtgtaccctcgcatccttccattgtagtggctctctcatgcgttgactgaaccctcgtcttccccagcgaaccctcgtcttccccggcggatgtggcgcctctagccaggcacctcgcttggatccctcccgcacacatctccggcatgttgcttgtggaactagggctggaggatcagatcgggatgaggaagatgaattggaggggatgcaggcgtcatccggtcgccggcgcaagtgaggcggcacagaaggcggtgagcgccgacggattgggaaatttggctagaccgtgaaaaaagaaattgtgtattcgaggaggatgaggggatgaaaacggaggatacctgaaggctgaaagctgaatcactgaacggagtggaggaattcctcgtgacgcggttgacggcggcaccgtcgcggtgaaatcaccaggcgctgctcctccgtgagactttggaagtcacgggagcactgcccagccgtgtgaatggaatagattagattgataaatagtactaataactgaactaactttttcgggagttaatcgatcttttcacgcgcccaaaaccgcgaaacacagaaatatttcgcgctaaattttgggaggttcggctgagtcgtggcaaatattgtgtgcttattgccacaaaaatcgaagtcgtggcaatagggcttgtacgttgcaccgatattttttttgtggtgatagcttagtttttattgcaacgatattttatttgtggtgataacttatttttgttgcaacgaaaataaaagatattacaacgattatacatcgttgcaacagaatatacttatttgccacgaaaagttttatcgtggcaatagtatgatatattgccaccaattatttttcgtggtaatactttcgtggcaatagctaatttttcttgtagtgtatttattttctttaatctctaactttagctctagattatatttcctttgactcctttaccgaacatctccaacatccacaaatacccttttcattcccgctcaaccatctctagagccgctcaaccatctctagagcacatgaaatatcaatctctctagagttaatacctttttcatttagagcttaccatacaaccagcaaaaccagttttatcttccaccaaatatttcccctttgatctctacccaaacacatgaaataccaattcttaatttccccataaccaaaaccttccctttggatctccacctaaatattcccatagtccatgagatatccttttcaatatccctctaagtcaatatacctatccttcagaagtttaccaatctaccactaattccgttcctataaaaatccccatccacatatatttctgaatccagttctatactcccacaagtatttcccctttgaaatctcgttcatctaaattatccattcaagatttcaaagactaccatttaacttgggccaataattccctgattgacccgactctttgttatatcccattaaccatttttatctttggggttaaaccagtataactccctttccgttggaatttaatttggatcaacccctatctaaacctaccctctaaaacctttgtcttcttttaatcgatccaaaatattatgtgttcaagttcctattttaatcaagccaccaatttgattcctacggcttgatttcctcctcggcacaagaactatactatcacaaataattgagtgattgctcttgtgctaagaaacttatttctaatcccttctattcaaaatccaacttcctttagccacaaatattccaccaagaatccataccacatataatggaggttaaaatcctatttattttacctccatccattttaccaccatcccaaaaatttatccaaagttagaaattaaattattgcctttctttccctttgatttttttaaaatattaaagaaaatctttgtgacaagttttgtatttggttcttattgaattctattggagcatgttgatccttattgaattcttttaaaattggagcatctttatttttatcctttttaaaatttatatctcaaaaataatatctttgatattattttaaaaatattttaaactcctttttgctttcaaaactttatatttaaattctttttataaagttcaaaagataccaaacattcctcttttaaattttatctccattaaaatctatttcaaaccttccattcaaaaattcccctagttttcaattcctttgaatcctattcaaatttcttgtccaaagttaaaaagtccaccaacctcttcctttagatcaatttcctttgaattctatttgaattccttgtccaaatttaaaaaatccacaacaatctatcctttagttttcatttcctttgaattctattccaaattcttccacacaaaattctcatgtttcctattcctttggaccaaaaatccttcattaggccgattccttctttcctttctttttcctccttttccttccacctctactctatcttgggctgcgcccggcccagccgagccgaagcccagtcgagccgcctaattctcctcctctgtgggcgcaccacggcattgtgccgccgccgccaccatgggcgtggccgcctcgcccaatccgacgcgcccccggccagttgcgccgccgtgccacccgctgccggcacgcaaacaccgtgccgccaccgatgcaaaccgggggcaccccgtgccgccccctaagcctaagccgccgccgccatagccaatccgcggccgccgctgctccgccgccatcactcaccgattcactgctgccgcccgctgttcccgtcgccgccactcgacgccgcgccacgacctcggttgcgtgtcgccacagccatcgcccaccgctttcgccgtccaatcgggagccgactcccatctcgccggctctcaccaaaccggctcacacagcgccgtgccgtgtgtaccaaaattgaacacttgattttgcaagtaccacaggatcactcattcaatgagatgagtaactaacagtagggaaaagaacaggaatacaataatgaagcatgcaacagcagatcaatgctgagccatttgcgtctggccggacgacgaccggcatcctatgaaatcgtacgtgaacatgtttaggttgcgatacagacaaattcagcatggagatgaccagtgatcatgagtgtttatatgcctggaataccgtaacaatactgaaaaaagacgagatcaactgagtgttcaacctactccatcgatgtacatagaacaactgctgaactgcccaataatttccaagcatgcatgcgtacatagggtgtgaagatattatcatgcaccctgatggagatatcttacatgcccctgcactggtaacgggatttgcagccacggccagtgtacctgtctccgcgaccagggcaaatagggttgcaagccgcacctctgccaagcggtctgtagacagtgttgccaccttgtagcacccttctttgcgggtacggcaccgaatccatctcacttagttcctccgcgtggcgggtgcgcttgccgccggccacggcgacgccgacggtggcgtgatcggcggtgagagcgccggcgccgctcaggaggagtaagaatgtcatcactacaatggaggagatgagcagtagcagtggcttcatcactggttattcggcgtttccaacgctgccaactagcaagctaccttagtccagtcctgtatatatagggtgtgtttagtttatgttaaaattgaaagtttgattgaaattgaaacgatgtgacggaaaagttgaaagtttatgtgtgtaaagaaaaagttgagaaataaaccatgccatagttgggcactgcttgcactgctagctagtagtaacaatagtgctgtatactctctccatctagttttgatagacatatttttaaatctgaaaaatttatttatgatagacatatttaaatccaaccacctatcttcttaatgattttctcagatttaatgtgcaactcttcattctttcatacaagattggctataatggacatcgagaaattaaatattaataactatcaggaagtattatactccgtatgatttaattatagggttagatggccattaggcgatgcatgcatgcatgcatgcatatttacatgcgacggcgacggccggccaaacggaagggtctggagctccacgacgactactccccacatgctgatgagcggtgttcttgttgcatcacgtacgtgccgttcgatgcgttatcattgtcattgtaccggccggtggcatgtttatgtcatgtgtccttgcacaaacgtacgggggtggttgtccattagttttctgggtaactagcgccaaagtactacctccgttttacgttttaggttataatatgttttagttttttaaaagttaaactattttaagtttagccaagtttgtagataaaagtagtaagattttcaatccaagataaatttattataaaaatatatatttaattattgatttgataaaactaatttagtattataaatattactatatttatctataaacttagtcaaatgtcaaacagtttgatttttatcaaagtataaacatcttataaactgaaacggatggagtattacagaacgtacacaacctaattagtatcggttggatcatacccatatcggaaaggttccccctcactggtatccgcactcgccccctctaagaaattaagaaccacatcgataccggtccgcatcgtctagtgcacaaccaaaactgattatggggggcaatcaatgtcagcctacataagagcatctccagcagggacactaaatatagcccctaaacagattttgggtgttgaggctaaaaaactcaatccagcagagcccctatgtcacgcccggaaattcactagtaatttccgaacttatttgtgcataaaatcctcgtccaggaatcagccgaggtacacaaactgacaatttaatatacagattcatcaaattaactaaaacgataagtatttacttaagaggcacttagtccccaccatgaagaaaactgcagcggaaaataaaatctagcgaagctccggctccactcccacaggcaactcaactggggtataagccagacgtcttctccttctggatcctttttcttcaactgaggttgattgattattgcaagaatgagcatatgacatactcaacaagccacacagcaaatatgcaagtgcacaaggataccaaaggttggcataatataggctcatttgcaaaaacagcatttagcaaaacatttaagacaagtaaaacagtagagtactttaatcattaattttaatcaacactgaacaacacgcccatgctgcacaggcccaaccattctgaagcaaccatacccggctgtacagatctaatctccaaaccaggagctaagcaaattattaccaggtatagcatctataattattgtgagaggtgtgagactaatcacgaaaaacattgttcaacccgcccataaccgcgggcacggctattcgaatagttttactctggccagaggtgtaccactgtacccacaagacacagccccacaacatgtcaccatgtgcctcagtaccaccacggtacctcggaaaggagctgtgacaataccccttgcacaacacaatccaccacagcgcacctttcctggatcataatcacccccttataaacaaggcatggactccccagcgacccccgtgggcttatctccgccacttctcagtctggtgctccgcaatgaatcatgctatacaaaaggtaaagccgttgtccacgctggcttgtggttggcacgattaatgtttcacaatagtagctcgcgaaccggtccttaattgtcatgagcacgactctcaaaaccatgtgctcacaacccaccattatcaagttttagttggcaagtaattaattaaccaatcacgattgaccatcgtgaactatcattaagccatcattaaataatagttagtcataagttatcccaatagtgtgctactgtttctaagcatggctaagcaatcatatctaatatctagctgaaccaatatatatagctcaactagtcaagttataataacccaaggtatcaaggaataaagtaatcaatgcaaattggccataacaaaggaataagttcacaccacccggtgacattcgaaaataaatgcacagttgaaataaatagagaatttaaatataggatcaacatgctcaaaggattgtgtttaggatcggtgtgacttgccttgcaataatcggtcttcaattaatcttcttgaatacttccggcgcactcgcgaaccttcgcaacgacggaaacgacaagctatcacgcaaaacggggaaaaagactaataaaaaccaaataaacaatacatataaagtaaacaaacatgtagatcatatttttagatgaattatgagacttgaacggcctcattctgacttcaaatgaatttattatgaattttacaagattaaatctatttaaagcccatttaaaaagaattaaataaatttaattcaatttatggacaattttaatatgtagatctttattttatacaacttttgcaacttgaaccacattaaactgagttcaaatgaattagttatgaatttttaaagattaaatcggattaaaacctttatatggattttaattgaattatgacgcaataatgaattaattttgaaaaggaaaagaaggattattgcgtcagcggctagggtttgcggtggaccgggtgcacggcagcggttcacgggaacgaacggccgagatcaaccctatccaaaacggacggccgagatcgatcggtccacgaccggctcacgggagagggcgacgatgacgtcagcgatgacgtcagcaccggcggcggctcgggcggcgcaagctcaccggcgaacgacggcgcggcggcgcaaacggagagcaccaggacgtagagcgcggcgcgacgaactcaccgatgaccaaagcaacggcggaggagcaacggacggcgccggcgacgaggaagaagcggcggcaaccttcgggtcgacggcggcgacggtgctccggcggtcttcggcggcggcgaaggggcggacgaggacggcgacgcgacggcgaccacgacggcgaccttcccgagcgacggcgacggctggaacggcggcggcgcacggctggagcggcggcggcgacggcggcgcaaaagctcacggggctagggcgctacacacgacggcgggcgaaggcgagggaggcgatgggtagaggagagctcggggatccttttaaaggggctagcgagcggcgacggaggcccacggctgccggcgacgagaaggaaaggttggggaaaaacgaatccgaatcaaactcgaatccgcctatttccaaaggaaattgaccggagtttctataagagaaaaggaagaggagatcgaggagattatttcccctcaaaagattcggccggagaaggaaaggatcggccgaatttggaagaagacggcggcggcttgcgctagggtttcgggcggcggcggcttgacgaagacgatggatccgacaagcgggccccacctgtcagcgaccgaacgcgcgcgcgcggctgcggactgggccggactgggccgagggaaagagagagagggttttgggccggctttcggcccaaagccaaaagaagactttttaaaacctttttcaatttaaattattttttaaatgcaatttcatttattaaaaatacttccttagctcaaataaatcccagaaaaatctaggaattatagaattaagcaaagtatttaatgaaattttatctggcccaattttatattgagatttaacaaattaaaattagatcttctcttctaggcttttaaaattatttctaataattccttttaaacaacaatttataatttaaggatttttaaacaagaaaagctcttaacaaaaataattagatcattaatgatcaaataattactgaactgttctttgtatcatttaggaattgagctccgaaagatccgagaatatttcagagagttgacttaatcatggagaatttaataaaaattaaatccatccatgctttatatttaggaaattttatttcccacatttaacttcacttgtaaattaaagaacatttaatataaattctattaatgatttattaaataatttataaatcctgaaacgaaaatcaggatgtgacagccgagcggagagagctcagagcaagatacataaaataatcatttgcacatatggaattatagtgattgtaggtattaaagtgttaaggtggaggttggaaaaaataacatgataaaaccgtagcaaaccacagctacattcacttgcctctaatgaagggttggtatcatacacgatctgaaggaccaccacctaatcacaaacaaagcctcagaaaacacactcaaatatgcatatagaacagtaaataacatgcatctacggcctcaacacctcaaaacgcaaaaacaaggaacgccgcttggactataaacagtactgttgcttcaaacctttatatctcgaaaaataaaaatgatatgactgcaaataaatacattttgggaatctacagaatgagacctacaactttcgtgtagaacccatatttttattctgccatttagatgccctaaactgcaaatcaagacaagattcagaatctgcccaagaattcagactgccacacttaaaacagccatatctggagttctactcgcccaatcaaagtgtactttaccaatatggaaagctaaggaaaaactctacaatttcctagttataaactttcgcagcaaaaatcattttgatcctctaattggcgaaatacagagacacagcaaagctgacagcgcccagaaacactaatccaaaacacaacacctaatcccatcctctaaccctccaataacgacgaattacaaccctaaaacaacctataacctctgcacaggagagttaagcctctttggagaacttgagagaatatgatgggaaaaccaacccaccactcttcctgctcgtctcctcttcctcgatctgtttttccaatcagattcttgattagggctatggttcttggagatccatggagtagggttaataggggagacgtgagttccataggtgcccagggggaggtgtggcggcgtcggctgggaaggtgggagtcgcctctccctagggtattaggtgggggaggtgggctggactactgcgacgtggcccaaattgattcggcccaattccaaacatgttattttatttttaatttcagggtattacaatattggtcagatattgcaggatgcaaaggagaacgatgaaagtgaaaaggaggcccataaattggagcggatgttagaggaccacagaacgtcgttgtatccaggttgtgagcaggggcacaaaaagttggatactactctggagttcttgcaatggaaggcaaaaaatggtgttagtgacaaggaatttggtgatttattgaaactcgtcaagaacattcttccggagggaaacaaattgcccgagacaacgtacgaggctaagaagatagtctaccctctaggactggaagttcagaagattcacgcttgtccgaatgattgtattctatatcgtggtgaggagtacgaaaacctagaagcatgcactgtttgaaaagcactacgatacaagattagacgagaggatctaggtgaagttgatggacagccaacaaagaagagaatttctactaaggtgatgtggtatttccctataataccacggctaaggtgtttgttcaggaacaaggggaatgctagaatgatgcgatggcacgctgaagaacgtcaacaggacgggatactgagacaccccgctgatggttcgcagtggcgaaacatcgacagaaaatttaaagactttggaaaggacgcacgaaacatacagtttggtttaagtacggatggcatgaatacttttggagagatgagcagcagccatagcacttggtccgttatgatgtgtatctacaacctccccccttagctatgcatgaagaggaagtacataatgatgctgattattattcaaggccccaagcaacctgataacgacatcgatgtgtacctaagaccactggttgaagatcttaaactgttgtggaaaaaggaaggtgtccccgtgtgggacgaggacaaacaggaggagttaaacctatgagtgctgctattcgtaaccatcaacgattggcctacacttagcaacctttccgggtagtccaacaaggggtataaggcttgcactcactgtatggatgaaacaaaaagtacgtatcttaagcactgtaggaagtttgtgtacatgggtcatcgtcgattccttgttgcaaaccacctggtacggaagaaaggcaagcactttgaacataaggcggaccaccgtacgaagcctaaacatcgcagcgggaaaacagtgtttgctatggttaaagatcttaaagtagtgtttggaaaggggcctggaagccagcctatagagagcgaagatggtcacgcggcgatgtggaaaaagaactttatattttgggagttacccaattgggaattcttggatgtccgccatgcaatcgacgtgatgcacctcactaagaacctttgcgtaaaccttcttggcttcctaggtgtatatggaaagtcgaaagatacactggaagcacgtaatgatctgaagcatatggaacaacttggcgactttcacccggaaccaaaggagaaaggaagctattacttgagtccagccagctacactcttagcaaggcagagaaggaaagtatgtttgaatgcttggagagcataaaggtaccgtctggatactccacgaatataaagcgaatagtaagcacgaaggagaataagttcacaaacctaaagtgtcatgactgtcacgtgttgatgacacaactgctactagttgtaagaaggggtatccttccagacaatgtccgggcaataataacaaagttatgtgctttcatgaacgcaatttcgcagaaggtcatcgatccgaatagattagaagcccttcagaatgatgtggtgcaatgtgttgtcagttttgagttgatatttccaccttcatttttgaatataatgacgcatctgctttcaatacatgtttcctttcgagaggtacatgggcgttctgaagaagtatgttcgtaaccgtgctcgtccagaggcaagcatcgccaaggggtatggaacagaggaggtcatcgaattctgcgtagaatttattgaagaccttcgcccaatcggggtacctgaatcacgccatgaagggagactatggggaaaggggactctcggaaggaaagcaataatgacggtagacaataatttattccgtaaagcccatttcacggttatgcaacaatcttcattggtggctccttacatcgaggagcacttggctctagttcacgccagaaacatcggtaagtccgatgcatggattacacggcatcacattgatacttttcccgcgtggctatgacaacatctcatgggtaacgagacgattaaccaacaactggccttcctagtgaggggaccatctggctcgatcgcgacattccaaggaaatgagatcaatgggtacacattctacacgagagcccaagacatgaagagcacgaaccaaaacagcgctgtttgtatcgatgccatgggacacgatggaacaactggcacgtattacggtgccatcgaggacatatgggaacttgactatggtcctctcaaggtccctctgttcttgtgccaatgggttaggttgactggttgaggcgtaacgattgatgacagtgggatgacaacggttgaccttaacaaggttggatactcggacgaaccttttgtccttgccaatgatgtaacgcaagtcttttacatgaaggacatgtctagcaaaggaaagaagggcaaagggcttgatgagcctaagcgccacgtggttatcctaggcaaaagaaaaatcgtcggatttgaggacaagactgacgaggattacgatcagttggatgggcaaccccctttcacggtgacgattgaccctagcatcctcctatcaaatgaagacaccccttactcacgcagcgatcacaaggagggaacaatagtgaggagaaagtatgtgcggtcaaccgtcaccgccgatgtaatgccgtaattattgtgtacacgatataaactattttggatgtattgattatccatataaatcaattgatgtatggcataatttactatcattcatatgctacatttaattgaatatcattcatatgctaattataattaactagagaatttttaaaagtattaaatcattcatgtggcatttacagatgttaattagagtttttcacaatttaatttactatctttcataggctacttatatatgactattcgaatttttaaaaggtttaaatcatgcatgtggcatttacatatgttaattagagtttttaacatttaatttaatataattcctacgctaagtatatatgatgattacaatttttattaattttaaatcatgcagtatgtacatacaaatcttaattagagtttttaccaatttaataatatcattcatatgctaagtatatatgattattggaatttttattaattttaagtcatatatttgcttattacgatttatccacttaatttattacagacaaaaataatttttcgaagtaattgtcattaatctttgtaatttaaataatgttaatgcattaacttctattttagaaacacatatgtaagcgaaaataatatgcagtgctataatctttagtgccggttcttaaccctaaccgggtttaaaaagaatttagaaatagtgggaaaatatctttagtcccggttgatgattactcccggttgttctcatcaaccgggactaaagatcgagggctatatatattcctgatgcgcgccctcgtcttctccaccaacacttaacgttttcggccgatcgatctctctcagcctctctccttcgctgccactgcctagggcaaatccccgcgccgacgccgccatatctcgctgtcgtctcgagctcgtcgtcctcgccgccgcctccgcctcctcctccgccgccgcatctctggggtgagagccgccgccgcct

SEQ ID NO: 27188 - DNA, 4477 bp, Oryza sativa
aatttacttgattgtttcgtcctgacaaatctgcatgcttttggtcaacaaacctaggattacttgacattgactcatataaaccttagcttcttctcttctgtgatgtcacattctttttggggtggctgttgtttgttgtagctgattgtagatgctatttaatacttctgatggttgtcatattccatatattctcttcatgttacttttttgttcatgcttatttattttctttatttttggatgtttgctgatgcatattaattaatggaatgctaacttcatttcaggagcttgagaagttaacacaaaagttcagtgaaaatgtgctggatgcaactaagaaatttgagaaattaattactgataagaatgaaattgatgggttacctgccacagcacttggcttagcagcacagactgccgcgtcaaaggtatataagctataaacaccattattgaagcttaaaagttctctcttgattcatcacactgacaagccattttgttagggtcatgaaaatgcttcggctgaaaacggaccatggatcatcacattggatgcgccaagctatattgctgttatgcagcatgcacggaacagagcacttcgtgaagaagtttatcgtgcttacctaacccgtgcctctagtggcgaccttgataacaccaatatcatcagtcaaattctaaagttgaggctggagaaggctaagctactcggctacaagaactatgctgaggtgcttgcatttgtcactgtttccacattaaaatcatgtatacaattatctaacttttctaaactagttttaaatcctgaaggtaagcatggctcagaaaatggcaactgttgaccgtgtagaagagcttcttgagaaactccgtgctgcctcctgggatcatgctgttaaaggtagccaatcaaattattgagtatcttctttgtatttctcttgtgttatttatgtatcatctttgttttcatacatacctgtcttagtgtgagcaaatttttgtggcatattctataaggagtaggcatcttttgaggttcgaatatcttagctgttggtttctgtgtgcagatatggaagatctaaaagcctttgctaaagagtctgcttctccagaagccaatgacctggctcactgggacctaagcttctggagtgaacgactccgggaatctaaatatgatatcaacgaggttctttctttgctctctagaaatgtttaatggatttcttatgatcagtactgttttgatggctaaactgtgatgggttactgcttttgtccatatatacgttgagctgaactctattaaatgtgctcctgttgcgatgatgggccattgagttgatttctagcattgctactgcaggaagatttgagtccttactttgcactacccaaggttatggatggcctcttcagtctcgcaaataggctctttggtgttagcgtagagcctgcagatggactggctcctgtaagcagttgttttcttttcttcagcccactatatgttaatgttctgcagctattgaccactgagttacctttttcaggtttggaatagtgatgtcaaattttactgcgtcaaagattcttcgaatagccctgttgattatttctacttcgatccatattcaagaccatctgagaagcgtggaggggcttggatgaatgtggttttttctcgcagtcgtgtgcttgctcgcaatggttcacctgtcaggcttcctgttgcccatatggtgtgtaatcagaccccaccagttggtgataaacccagtcttatgaccttccgtgaggtaagcaataataaatatggcaatggtaaattattccagatagtctccaatgtatgagtattctgttacatcaatatgtggaaaactgtacactaaagtactgatgagagcatcagtaattatcaaattcacctgaagattgtgacacacctgcttccatatcaattaagtagtgctatactgattatgagggtaatttcttttttttttggcatgtgtcttttgtaggttgaaactgtgttccatgaatgcggtcatgcgctgcagcacatgcttaccaaacaagatgaaggatttgtttctggtattcgtggagtagaatgggatgctgtagagctgccctctcagttcatggagaactggtgctaccacaagtaagatggatctgtatcattttgtttttttaacttgtagccttgaacctgtttgttaaacagttgttttgttggtgccaggaatactcttttgagcattgcaaagcattatgaaacaggcgaacttcttccagaggaaatttatgcaaagcttgtcgctgcaaagaatttccgtgctggcaccttcagtttacgtcaggtatgttttatattttatttttgtctgtattgtgtataggtcatggtcacatacacacatcacactaatatctaacaagtgtatgaagtaatttatgcttcctttatgcctatgttctttctaaatggctaatccttgccatcccttctgcagatacgttttgctagtgtggacatggagctgcatacgacttacgatccaaatggttcattgtccatatatgatgtcgaccgaagagttgctgagcgaacacaggttcttgctcctcttccggaggataaattcctgtgcagctttagccatatatttgcaggtttgcaatgctttaacctacatgtacattcattcatttatttgactgcagatctcactattttttttattgacaatctgcaggaggctatgcagctggatactacagttacaaggtatattgctgtaaacgtttaaaacattacgttccttctgtggcatatgagtatgctgaaactagtatcttttctatgtgcacagtgggctgaagtattgtcagctgatgcattctcagcatttgaagacgttggtttggacaatgagaaggtacagtttttcttgttttcccccatccagggaggtgctctggatgtgtcaaaatgacttgtttagtagtcattttcttaacttaatttgtttatttggccaaacgtatattttgccctacaaaacaatgtgtggcacatagaatacagaaaggatataaaaatcaatgatattgactctagctatgactttatctaggcaattgaggaaactggcagacgattcagagaaacagtccttgcgcttggaggtggaaaatctccactcgaggtaggcttctggtgcctttgacagcatctcttgacatggatgctttatttgtgcaataagcgtatgtaaagggcatagtttgcactaacttatgtggaataagacgacgtacgctaactctggaaatgaaaatgcaggtgtttgtgtctttccgcggacgggagccatcaccggaagctctgctcaggcacaacggcttgctacctgttgctgcattgtgataactcatgctcgattgtccccttcttttttcttttaacttgcgaaaacggcttgtaagatgttattgattgatggcatatcagcaacacgctaaaagtgccgtgtcctgcttacaacatgaaaaacaagttgctgtgcacaaccattatataatgatcatcgctgcttcttgccgttcactccgttgtttctctctttaacattgtggtcttacacgatacagatttacaacaatgaactaatacgtttcttgatttatgaggcacatatcccaccggaagagtcactgaatcgtactccctccatccacaagagctgtacgtataatgtttgtataatgtttcttagtttttccacaagagttgaacttattttgtttgtgcctcgatgaataaatggatcggaggagttagtgttctccttggtcatagtgaaaaaagagttatacgtacaactctcatggatggacggatgagctcagcgtctcagtcgaatctaaaaattgacggaggaagctgagagacggacgggagtcagtggtgggcgagcatccgctccagctgctcggcgacgtctatgatccacgcctcgtgcgaccggtcgccggcgacgaactctctggcgacgccgtccacctccaccatgctgcaccctggcaccttgaccaccttcctctcctccatccccctccgcacgcccaccacctcctcccacttcccccgccccgcgtacaggttcgacagctgcacctgcaccccgctgcggtcgtccagccccagctccgccatcatcgccgccacctcctccccgccctccgtgtccccgcgcgccacgcacgcgttcagcagcgcccccagcacgtacgagtcgggcctcatcggcatcctccgcaccacctccagggcctcctccaccatccccgcccgccccagcacgtccaccatgctgccgtagtgctccacgccggcctccatgccgtgcaccgccgacatgctccccaagatctccct

SEQ ID NO: 27189 - DNA, 6365 bp, Oryza sativa
ccgccctgttggggcgcacgcgggccctgagcatctcctggaacacgtcgacggcctccgcgaagctcccggcgccgacgtaggcgctgaggatggcggcccaggcgatggtggttttgtggggcattgcgtcgaacagggcgcgcgcgtggtggaggcgggcggccctgccgtaggcggtgaggagcgaggtccaggagcagacgtccctgcaggagacgttgacatcgaagacgcggcgggcggagcagaggagggcgcaggaggcgtaggcgtggatgaggccgttggagacgtaggcgtgggcgtcgcaggcgacgaggatggcgagggcgtggagcgattctacgaggacgcgcggcgaggcggcgtggggaagaggagcgagggaggcggaggcggtgaggaggaaggagaaggtgtaggcgttggggaagaagggattggtagcgatgatgcggcggaggcgcgggaagaggcggagggcgcgcagcggggagtgggagtgggagggcgggaggagggagcggaggagcgagttggggaagaagcggtcggctaggagcgaggagacgaccaggtgggcgtgggcctgccggagctgcgcggcggtcagccaagggcgggacagtagcagatgcagtgccgccggcggcgccaccatccagaccgagccagagccagcaaacaagcagctcccctgctccaggtcgaaggaaaggaaatgaaagtagtgggggaaaagaaaaactgggccgaatttgttcaagctcatgtgcgtgggctaactcatgcatgccggcccagcccaacagatgccactcggagttgcgggagaatgaagatgaggaggggacgacaccagcacgtcacgtcacgagcagcagcggcggcggcggcgaggaggagtagagtaggtgaggtgaatcgggggagggaggaatccaagaagaagcaggtaattaatcgatcgatcgggagggggagatggctcgcgcgggcgggcatgggatggggaacccggtgaacgtggggatcgcggtgcaggcggactgggagaaccgcgagttcatctccaacatctccctcaacgtccgtcgcctcttcgacttcctcctccgattcggtccgttttttctcttcctacctcttcctccttatccttcccataattcctccatggacctgcactggattcacatttatttctgcttcctctactcaggcatagccacatttctctggatctgcattaccctttttcctttctactactagatctgccttgctccttccctaactgggcttccacatttccattagtcttggcgacacagctatgcatatgcaccaaccaaaatttcatttccactctccctgccttccacaaatgtgctctacctcacccatgtacactagtaccatcaactctaaacccattctgcctcccttctaatctgaacttgtttctgccattgtcaacacagtatctataaatcaagcctttcttctgcccttccaacagctgccagcgtcacaccaaacaaactaacttaagcatattcggaaattcagttcagtaacggtgttactggatatagacctttaattgttcttaaatcttttctacgatatgaattctctggactataagcttattaaatcaacgttagttaagcttccattgacaagacagcatatttcctgttggccagccaactactccagtgactatgttctagtcagtctgatttgcacaattgtcattatctaaaattttgcataattgtggagtagttgttacttggaaaggagggattggcttggtgcttttccaagccctgtatgcttcttattatgtccattaaaccactgtcaaaaacaaagcttgaaagataccttgaacattactgtgcagaatatatgtgttctgtactttgccctccgtgtatacatttagtccagaatgcatattgaaccttttcaatatggtccggattaaggcactggtaactatcataccttccatttttgctccaaacaagatgcattcacaacataatcgctccatgttgattaggaactcgagcatgtcagcaaaacagagtggactgggggtagcatatcttatgcatgcatgtttattcaagttaactaatatgcttacacaggtttgtatgcatttgtgcagaagctactacgaagagcaaacttgcgtccttgaatgagaagctggacatcctagagcggaaactggaggtgcttgaggttcaagtgagcagcgcaacaaccaatccatccgttttcaactagtaagtgcagttaagggctgcttgtctgcacataagtagtgctttcaatgtgttatgggttcaaaaggacagagctttggatgtctgtattgtgggtgcaagaggagaggttgttcctgtgtgtttctctgtctgtgtgtgtgtgtgtgtgtgtgtgtgtgttaatctgtatgcagtgccagtagcgtgcaaggcagcttcttttctactcaattccatgtacaattgtaacgtgttccaagtttgtgtggagataactaaccgattgttgagtgcaaacctgcaatgttgcctgcttgcttgttggaatgtggagtttttcccttgtaaaactgtaactttttaggggaatattgcacgtttgcacgcagtcggacaaacgccggcccgaattttttatttatggtaattattatccttgaaattaaataagtagtaaatcatggaggggatttaggaaaatagaatggacgttatctactaggacatccagtgatggacgctgctgggaacaacgtccgagtgtggacgctcttcctaaccacgtcctcccatggtgcagcctagcagcttcttcctgtatgtcttgactgccgcggtgcttccttaccgcactaacgctgcctctagtgatttgggcaggcagccatccaggggtgtggcgtgtgcccttctcatatgctcgcgtcagggataggtaatggcgctgcagccttttcaaatgtacaggggtaagacaatcgatcgccatccacctcaagatttcaagaagagctacgttacttgtagaagccagcgttatgtgtggcacacttacactcggtgatgacatccccttcccccaatctcctccattttgtaggcgccctcgatagattttcgtttttcttattccaaagtgaatccattagcaagattcgtatatacgtatatgttcatgtgctgcaaaactaaagcagatcaactgactatttgtctattatgcacccctattacatgactaaacattaacttgtatgaaacatgtgttcctagctatatatgtccgcatggatgctattgtcaggttttcttactacatgttagtttggtattttaatttggtttacgacacccgtgctgctccaaatggcacatcatcattgttcatgataagccgatcgatgagcatagtcgcttggagtgatggagcgaggacagcgctgccgcgatgaattgatagaaggagaggagagcttggacctcaccgagaaagcccacgactggtctcgccaggccacaccgccggagacacaagggatgtgacgaaaaacaacgagggcggctagttgcggcaagcctcagcggcgtactgagactataaaggtcacgatttgaacgagagaggaattacgaggactgctgtaggcagcgaagcaagcccaagcttatacgagagtctagctagtcggcgatggagcagcatgcaggtcgtggacgccgttacaaagagcgtcctcagctggacgttgttgtgaacaacgtccatacatggacgtttcacaaaacagcgtccttcttattttcataaatatcagtttccatttactaagtatttaattctgagactattaattactatagtaaacaaatcgggacgccggcactgaccgaacggttggtgtctctaaaatgtgtatgatcagcctgttaagtaatccacactttttttttcttttcccttgaaggagagcaatttcttatttggggaatggcgctattatcatttgaatatatacagcaaaaatcgggaccataaaaccaaaataagagaaaaaaaagggtaaagaaatcctggaaggaatttattgggaaaaaaaatgtggtgctggtgtttcatccgtcttgacaaccacataagagaagccggtctctcgctgtctgccctgtgtctcgctagggacctcacaaaatgaggagtggtagaatagttggagcccacaggccgcttctcttctcttctcctgcttctgcttctgcttctgctgcttcttctattcgaacttaccttcctcttgctcagatcttcttaatcttccttcttctctcatctttcgtattcaaagctgtaaatgactgcaggccgaaggtaggatccagcaatattttgctccgatcctcgcaacatatattcttgtttcaaaggtaattaattcgttgcgattgtttcttaattactccattaatttccagatactatatacatgcttgcttgctcggggatcaatataatattccattatatatgtttgaaagagggagttctctctcgctcgcttaattttgttgttgatgcagttgctcatcaatgaatgaatcaatcaatgggaaaatgaatgagttattcgcagtggcaggtagggcgggggtggcgatgatgaatatggtgtcgagcagcagcatccaaccggggcagatacatagcatatggcagcgacgacaaggaggtgagagtagagggagatatgtggtgatgagcagcggcagcgtcaggaagagcagcagcagcaggaggagggtggtggcggttatccgggccgtgggcgacggcgcaggtgaatcgacgagcggcaaggacgaggaggaggaggagaagaggcgtcgggaggagctggagcggttggtgggtggaccggaggacgcgacgttcagcggggcggacctggcggcgctgataaggagcaagtacgggaggtcgtacgacgtgacgctgataaagaaggagttcatggggcggaacctgctggccatgaacgtcatgtggaagtaccgggagcagcggtccttcccgctgacggaggaggagtacctgctccgcctcgacgacgtcgccgcctccctccgctgctggggcgccgtcgcccacgtccgctcctccctcgccaagctcaaggaccgcccccgcatcggcaaggccgtcagcatcttcatcgacatgcccaccgacgactccggcgcccgctccaacgagtggatctacaaataatataatcccttctatttatttatttatacttcatcgccatctcgaattctcgatggatcgatcgttaattagctaccttgctccttaattccttcatgtatttgcttcagcttcagctcaacgatcgatcacacattcacactcttggaattgtatgtacggccacttattaattacctcaagattcatcctctctgcattgtcttgtgctgcttcttgctagcttcagctccaccgacaccgatcgttaattatgctcgatcctctacttatttgcttcggctcgacgtaccatcactctctcgctcctcaatacattagtatgtacttcaacttgatcactgatgatgcctcgtgttatcttcttcatcctcggctcttcctccagtgctcaggtagagtaggacgtagatgcgccgctggattgttcacagcaaatatgcgccgttcgatctgtcacttgactatctatcacgggaaggcccagtttcggcccagtgagttacttgtgtttgtggactaaactgcaggtccatttgaggcccaactagctagtctaaaccctccaactctctcgtctctcccctgcaccatcgaacaagagagacaaaccccttccttccgccaatggccgccgccgccgcccttcgccggagcctcgctgctggccccgccccggccctcctcctccgccgccaactcctcatgcgcttcctctccacccagacacagtcacagacgcaaacccccgccgacctcgccaccctcaagaactccattcgcagcgccgcccacaccccggaagccctcgccgacctcttcatctccggcctctcccacccggccttcctcgccgaccgccccatctttaccctctccgtccaccgcctcgcctctgccggccgccgcgacctcgtcacctccatcctctcctcctccctcacctccctccccgcaccccacccctccgagggcttcctcatccgcctcatctccctctactccaccaccggcatgcccgaccactc

SEQ ID NO: 27190 - DNA, 20112 bp, Oryza sativa
  unsure (1)..(20112): unsure at all n locations
ccttccgcactctccccgccgagctcggcatcaagcccagcgtcgtctctcacaacgtccttctcaagtcctttgttgccagtggcgacctcgcctccgcccgcgccctgttcgatgaaatgccttccaaggctgacgtcgagccagacattgtctcctgcaacgagatcctcaagggctacctcaacgcggccgattacgccgcctttgatcaattcctcaaggataacaccactgccgcgggtggcaagaggcgactcaagcccaacgtgagcacctacaacctccgcatggcttcgctgtgctccaaagggaggagctttgaggctgccgagctgctggatgctatggaggcaaagggcgtcccacccaaccgtgggagcttcaacaccgtcatccaggggctctgcaaggagggggaggtgggtgctgccgtcgcgatattcaagaggatgccagaggtgccgaggccgaacggaaagggggtgctgcccaactctgagacctacattatgttgcttgaggggctagtcaacaagggtgtgtttgctcctgcattggaggtgttcaaggaatgcctgcagaacaagtgggcgccgccgttccaagctgtacaaggactgatcaaaggattgctcaagagcaggaaggccaaacatgccaaggaggttgccatggcgatgaggaaagttgtcaagggtgacgccaaggaggagtggaagaaggttgaggctgaattttcgttcgagcctactgataagaaagcctaactgctaggaatgatggatggcacaatcagaatgtcagttagacgattattttacacttcaaatccattgtctgattgcatgtcttttgtgcgcttgtggccaactctatctagcctttcgttccgtttagcgcataagattattttccatatgaggtatttgcatttcgaacaaatacaggtactactctttggtggtttaccgtgtagaccatgtaacttgaatgatcacatatgatgcaactctttccagttccttatcttaatttatctcaaacttggtacatttcaatcctctatatctttatgtgaataacccaaaaaataatacagattagtcatcatcatcactgttataattgttggatgaagatgctctatgtactgttttctgtttggttactccatctgcttgcctgaacaatgatgttacagaatgtggtgttgtattaatctgccgtctggatgtgcaagtttgttatgttgtacgaattgttttcaccagctgaattacaagatgctattctgagaagagtcgagcataattgtgaacataagggacaagttcagcttgacgatcgtgtgacatgactttggctgtatctgtatggagtgctgaggttcttcaggttattgcattggttggcaggcaccctttaccgacttattaccagttatagtccctcaagttgagaactgacatgaatgagtgatactgaagttgcatcttgcagccggtcgggtgcgtccaactgtgctgattggattgcagaggtgcctgctactgctgatgttggtgggagtctacgtttgaagtggataacatcgagccactggtaagtgtctcctttttttcccttttcatgtgtcttcactattggcatgctcattgttcatatgggatagaatatcttgtatgcatatactttttttttttggctggttgtaggttgttatcatataatttcatgttatgtttgcaagtcgcttcttgccaatgctaaattgctcgtgctgaccatcatgttccatattaagttgttgtgtcgggcatcgtcggcaagctctcacttgctcgtgctacaaaatacagagagacagcgtgacagtggctcgtcgcagcaggtactctgcattccctgtgtgctgcctatatgaccactgggtgtcaaatcttgctgttgcttttctttcatttctctgcatctttcctttgcctgctttcttagtttcctccaataatggatatggagtattaggagcaagtatttatatggctttgacaataacctgcacgtcacattattatcttgtttttgtcttcttttgagccgtcttttgtgtggctgtggttcaatttctccactattctctcagacaaatacctattgtagagtaagttattttacccctaataataaaatcatttattgacctaaccacctttgaacctgccatactatatacatacaactgttttagagtgatgtcactgctgtctcaaaaggtagtcaaaatcttaattagacttgtgtcgtatcaagccagaaagaggcttttaattacagtatactataagggtttactaagaaacagactttgataaaagcacaccatccaaccttattgtcttcaatacgcataaataaataaatataatagatgcagtgagttttcgattcaaattcaaatgctcttaattgaaggaacgtattggcattattacattgcaaagtaaagacaattaagcagaatcaatctaagtatatccagcgctaaaaagaaagggaaggaaactaagataagttgtggtgttggtcaccggctgcggccttggccttggcctggagaggaggatgatcgtggtgggcaatgccctccacggcgcgcagcagcgcgtcgatcctggtggtgcctgtcccaggcgaaggaggagcagcggcaggaggaggaggaacgtgggcgttgccggtggcgttgaaggcgacccgatcggcggcggcgcggacgaggtcgtcggcacgatcgcaggaggcatagaaggcgtcgatgcggttcttgaggtcctggatggcccccgtggtgcggacgggctcggcgatgaaggcggccacggcgtccaggagggcgtcgtactccgcttccatcgagtccaccgcgctgtccatggcgtggcggcggcctcgatctctcgctcgcgtgcacaacacaatcacaatgcaccaaggaattgaaggaagaagcagagggctccttcctcttcgtgttcgatcttctctttaatctgttattacttctattattactacgttggttttatagatatatacacgtattacgtagtaacaaaccgcctctctctctgcatctccacccaccccgactccgtcgattcggtctcccttacccttttctagtaggatgggaagagatcgatcaacatacatacgtaggagtaatatgcaggtaccacacatacatacatgtcaaaaaaccttaacaaactgtcacatactctttcgtttcataataaatttatttttttgactccttccatttatcctaaaataagtttattttaagtaatcatcattgtatcaaaatttgtgaaagtaatataagaaataattatattagaagtacataaaacgaagaataattatattgggatgggataaagtatgaattttctggggtttttcttatgttagtatatgtgtgggatgtgtgaaaaatgaacttatctttatgacagaggagtacaatataaccatatactcctcctatataattaactttggtcatcaacattttattatgaaaatacatatatttcaattgcatatacaaaatcatgtagtacatatacagtgtcttgacaaatatttacatagtattttaatcttatcaacacttcgaaatatatgtatagcaaaaaaagcaatttaccttatttaaagactgtatatatgccttaataaaaatatattatagtactcctccgttctaaattagatgtcgttttgatttttttttataatgtttgatcattcatcttatttaaaaattagtgcaaatataaaaataataagtcatacttaaagttttttttataataataaagcaagtcacaaataaaataaataataatttcatgatcttttgaataagatgaatggtcaaatgttacaaacaaaaaaattattttagaatggaggtagtaatatgttttcgtgattgatgaacttcattgagactcaaattcatttttgtttctgaaaagagaaaaagaaaaatctttctgttgttcacaaagaaatcagtaaaacagtcgtagcattgggggtcggggtcttttgcaggcttgcaggttgaggagcactagacgctgtggagtggagggaggcnnanatggcggaacagtagccaccatgagctcctcccactcccatgctcatggcggcctcctccccacctcccgccgccgctagcagcagcgggcgactcgccagggtgcgcctccacgacctggcgccctacgatggcgccgcgacccccgcctacggccgcgccgtccatgccctctccgcctccctcacccgccacggcgccgccctcctcgacctccccgacgcccacgccgccatcctccgctgcgccctccaatccgctcgcgccttcttccgcgccaacgaccaacccgccttctacctctaccgcgcagggggcagcgcaaggtttaggaattctctcttctgccttccattctgaatttctcaatctcaatcgctctcctctgaatcgcagtaggacatccgatgacggcggcggcgacctggtccctgcttgcatggacgacgccttcaggtgtttcggtgaggctgcccgcgctgctctctctgcgattgctcgccatctccgacttcgtaccaagtaagtacaaatacaatgcaatgcctgtttttttaatcccttcatctatgactagtaacatcttgctcttcacacttactcacaattgagttggtctctatacattttccagtgtattcgaccacttgctcgatgatactccattgcctgttaatgaggtctcatcctcggagttgctggtggcttattccaaccaacacctccacaccgatcatgcttcttctactgcctgtctcggctcttcagtgcctcaagttgacaggggcttccttgtgctcattgcttctgatcatccaggaattgaggtatccatgtaacaactgtgcaaagttcaattttttttaacctttattggttttagttttccttgaaatacattactgttttcttagtttatttatgctttttagctcatcttttctccctgctattctggtcgacacatttcagttttattcagtgaattagcctataagtgctgcctggcctctagttcacattgtttagctacttctctggtaggtttgtgacccaaatggccaatggtacctagcagatggcatttcagggcctggtgacctgttgcttctgactggaagggcacttagccatgttactgctggtttgcgcccaacttctcgctacaggatcacaaatgagactaggtcagtactatggtaacaactgatggtttcatcatctcatttcgcctccattttttcgtggttatatttgtatacttccctacatggatgctactgaatgatttgatatgataaacttcttattgcaatttcctttgctgttgtagagcatcactcacctttaggctaatgccacatgccaatgctatactggattgctctcctattgcagcagctgggcactgcgtaccccagatgtaccaacccatatctgcaagccaatttatggatgacttgtgtgctgaagaacgtgctgtttcgaatcattcggaagcaccttctgtgagtataaatccagtaccgcatcaattcaatagcatgcatggcatacatccatattcagctatagtgatgcatgagagaagcacacctcaactctctaagagtgggaaagtgacatgttgaaaaagcaagaggatttctgtacatgtaattgtgtctttctcatgtgcgcaaaactaccggattgctcatatcttgccaaatttggattgcaggaatctcagggcagcttcattagtgaaccatctctcagaagtgtcctatcagatccattgtcgtaagtttttccttgcggaatgtaccacttcatcaaagaagcccacgtcatatgtatagattgtcttattctgcatggatcattcttcatatgtatttacctataagttatatgctagcccccattttctttgagagagagactgggagacagagtgatagacaatcaggcacacatacaaaaatgaaggggagaaggagcacatttttacttagcttaatcaaaattgaataactgatataaacctacataaagttttgttccttttttttccaaactagtgtggatgtcatcaccatattatttagttaactacgcatcgcagtcagacaacaagcacgggtgatgaaatggtatttggtctgttgcagtggggcttttcttgaggatgctatggttctgttatgtggacactctttcggtggcctcatgctgaagaaagtcattgaaatggtattttttcaaaaaacttcatactcaggcttccagatggctattaattctcttgttgtaacttatgagggcaaagttctctcttttactgtagattgcactcttcaatgtactagcttcaactagcaattcaatttgattattgtccttaacacagatactggcattgttcactaaatttgtgttttttgtttgaaattaaattatttatttatgtcttctttattatttaatagagggccctagcggtaggttatccaaaactggaatgtactacttaacagagaactgtgactattaggactttaggagtgctttttagtagcaatggcacattcttgtaaaaaggtattttacgcctgaagcagttccttgtatttcacacagcatatatcataaaacaatagattatgtttctacaataactatgcgacatatatttaataaaagtgtattttcaagtcatttctattttacttatcttctgatccagtggggtgacaccaacaatcatgccagtttttctatttttactatgattaggcaagatgcaccatttgcaatggagaagttgatccggccaccctgtttcctaatctcggtatatttctgactactaattttcttccacgaaactggcattatctatgtctcacctgctcacgtactgctgttagtattttggatataatagctttaagagcagtagctacagtggtgaagatggaagatgataggagactctttcataatgctgctcttcgcaaacacaggaaagaggtgaccgaacgtatggatgtgctgaagagcactggaggtagcagagtacgtaatgctgtggctgtgattgtgaacataccctcaagcaatcaatggtggtgcatggatctgaataattactttcattgttttaatcagggcaatggtgagctggtgttggatgctgaaaaccctacatcacccaggggtgtgcagtatccatttgtagtgggcgagagggtcctgatcatggtacaaggagcacagttgcttttggctcttgcattactaagaaataataaagggcagaaatgaattcttatcgttaagagcatttgcagggaaacagaaggacgcctgataaatttgttgggaaggaggcagtcatcacatcgcagtgcttgaatggctggtgagtccatttggatagctcgctttgaaaaacagatggcatttttgggggtgatggaagaagatgtatgtgaagttgttgcgacttagaactaattacaaatggtgaatcgcaggtatcttgtgaaggcggttgatagcggggaaagcatacggctgcagtatcggtcgctgaagaaagtgtcggagctgcagcttcagtcagagatgaggttgcagccactcaccttcctgcacaacaaataccccagtagtggcagctgagttgattgactatcatcagtcttaaaacaaaaaaaaaagaaaggagaagcatatactgtagcagaatagtcatgaggcatgcatcgccatcaagcgtgttttgttgtagtaatactaataaaaaggtcagttagaaaagtgtggtgatagttaatctggtgatgatatgaaaagggtctatcctattggaaggagaaatgtcatgtgggggttattaaaaggacataaagagtttgctaggaagttccaaattcctagcggtggatgcagcgggtcagccaagccaaaccacaaaccaaactgacttttctactgcactgcaacgcaccagtagatgccagttggtaattcttgatccaagcgtgaaaatgtgtaactggaccggctgggcacttgcagaaaaagtcgataaatgtgttgtgtttgctgtgacatcactacgtcagtgattgtttggatgtatgctcctgggaactcaattggactcacgataccgccatccatgtccatggcgctgagccttctcttcgccgctgcaccacgagctgttgcctcgttccgcgcctcttcggcgtcctccccggcactcgacagcggccgccgcccgcagaacgtccccggcgacttcttcgtcggtcagccctgcacctaaactcatcattaatcgctcgccatttatgcgctgcttcagttgaatttgtaattcgctgtctggctgcagatcaccgatgcatcgactgccagacctgccgctggatggcgccggtaactagtctttcatatatgcataatatgcttgatgcttcagctgctttgcttggtgatggtgatttgaattgaattgaattgcaggaggtgttcaagagggtggacggaaaagccgccgtggccgcgcatcccatctccgacgaccacaggaccaaggccctgcaggtagctctgcctctcttttactgaatttcaatgcaaaattaaactatgcctgccattgatgcccaggctctgctctcctgtcctactgcctccattcacaccgagaaacctgcaaaagacattcttcaagtgcaaaacatgttccccctccccatcgacactcatcttctccctgtatgacttgctctcctcattccggatttcacccaatttatctcaattaaattaatactctcatgttatatatgtcatccatcctgcactgctcaaatctttccagggtgtttatcattgtggttatcattctgaagactcgtttggagcaacttcttatcttataacccatccagatggaaacatactagtcgacaggtagattccaatgcacttactaaattgtttatatccctagtacccatcttgccatggccagacaaacaacttatcaagttccaatcggatacattgatagttttccttctgacaagtattcaatttcacaaattggtagcatttttcacaaattggagatcatctctagcaagtcttcttgtccagcttacatgtggttatcagtaggtcttctgatatttttctgattttctagcccaaggtatacaacgaaactggcaaataacatcgaagaacttggtggagcacgctacatgtttttgacccacaggtatgtttgaactaaaagttgtataacatgtttatctattttttgtttttctgaatgcgccgcttctttattttaaatattttatttggatattgaatagcgtctaatgagttacttacagggatgatgtagcagatcataggaagtgggctgagcggctaaaatgtgagaggattatccattcgggcgatgtaagaccctcatgcaaacgattgcatctttttgtagcaaattttacctatagttcataacttgaagtacgtagaggacaattattcatagtttgcactacatgtactagtgtagagtctagcttacctatttttccagcgagttttgctctcagatgcctctcctgatattctttactgcaattaccatgctcatgcaggtagagcgtgctaccgtagatgttgagcggaaacttactggcaatggtccttggaacattggagctgatttcgaacttatccatacccctggccatacccaagtaagaagttcaacttaatgaaataagttgtttaagcaattacttgttgccttcagtatggaaggcttctctggattgggtgaaacattcttaaacatagaacactaaagagtagcagggtgaaagatatgtgcgctgttgttggacattaagagcattttttttcagggttcattcattaaaatgagcatttttttttcagggttcggtctgcttgttctacaaaccagtaaaggcgcttttcactggagatcacgttgcaaaatcagaagaatctgatgatttatatctctttcttatgtacagcaggcaaccaggtagaatcctccctagattttgtctaactggacataactgtgcaattgtacaattagcttacaaatcggattaataatctatctattgcataaatttgcagtgagcttgcaactggacagcatgagaaaattgttgaagttagacttcgagtggtttttacctggtatgcgctcattcaagcattgcggatagagtataccttcttaggaaatgagaaagtccctgccttagcatttagtttctgttgttttctttaaaacggcatgattgagtcactgaacactgattgctagttttttcccttttccaggacatggctatcgaatccattataaagatgtacacgctaaggattcagcaatcgagtccctcatagctataactacacaagctaggggcatcttataattctctctaccttcagacttcagtgtacataaataacgatcaattctggaattaagtgaccaagaggaaatgtacttttttttgaaagaccagcgtaggcggctggcattctatttatcttagaaggagcaatgtacaaattggcgatataggaaatgtaaaaatttacacccatgatggcaaacaggtttgtcaccatgtctatgatcttctctaaatcttggtacctcccatgcttcaaaattttatctcgtccaggacttggttgcatactagttgtatgaatgattcgttactttggaagacgcttgtttctttcctgccaaattttctattgtagtcagtaaaatgcaggtgtacatgcttgagatgccctagagtaagcggcaggcccaagttgacaggggaaaattgctcgctgcgatgcgaagtttcctaaaatgacatccagatcagtatccgggcaactgattggtgtggaggtcggttgcttcgctgaatcttttggcaacatgaagttagtaactgatctagcatctctaatttagtccagaacatatttattgcatcctatcttccgaaaacatttgcaccaaacaggtcgtaattatcaataactgaaccttgagagaactgaaaagaaaaacccagcatcatactagctggtccggttaacagtctagtaatactgtttacacccaaatttgacatctagggataaaataagaaaacttgccaaagtttggaagtctgccggttttcctctgtgagggccggtctgaccggcgtgtgttggctggtcagaccgccgacaatgggccggtcagacctgcggtgtgtggccggtctgaccggcagagtccgagctctcttcgggtctcgagttttcttgctcgggaaagctatatttcgtgtttactttggtttctatcccgagttggacgtggagaagggcttgtagagggcaagaacaacctctatttaaggggcaaggccgattcattgtaataccctgaatacaatctacttgaatcgttcttttactatgttttctattttaccctagtttagtccatctttgtcggtttgcgccgtaaaccgtccgccgccgctgcaagagtgcgacacctctttgtaggtttgtcctaaaaaccttctgttttgcccacgagacgggtagttatcctcatatcgatctaaatcggcctagaggctgattttgatctctaaatcggctccgctagccgatttagctgtttttctataaaacccatcttgatttagccttttggctagatcgaggtggttggcgatttcatatcactgcaaggcgtttagttgttgcgatcgtgcttgtctacttgtcacaaaaagttatcaacaaatacttatctcaaaaacatatctataatgggtacagactcatttcatactagaactagagtagtttattattgatcgagtgttaaaatgggcactcagtaaaaaaaagaaagaaaagaaaaagggaaaaaatcgagccgtacgtgcaggatgttgggaaacggatcctctgactttggtggatgttggcgtttgctgtgacgtcagtcgtgagggtcgttttgtgcatctgctgccctgcgcagagcgaacgctgctagttgtagcacgcacgctgtcgctgacgctgctgttccgccatggcgttgatgatgagccttcgcttcgcccccccagcgtccgtcgctgctccgccgccgcgacgaccacgagctgttgcctcttcggcgtcctctccggcactccaacgccgccgcccgcagaacgtccccggcgacttcttcgtcggtgagccactgatcgagccctgcacctgaaatcggtctccatttaatttctcttcctgatgcgcttcagttgagtttgtttgctgcagatcaccgatgcatcgattgccagacctgccgctggatggcttcggtaactagtctttcatatatgcatatgcttgatgcttcagctgctttgcttggtgatggtgatttgaattgcaggaggtgttcaagagggtggacggaaaagccgccgtcgccgcgcagcccatctccgacgaacacaggaccaaggccctgcaggtagctctgcctctcttttactgaatttcaatgcaaaattgaaccatgcctgccattgatgtccaggctctgctctcctgtcctacttcctccattcacaccgagaaacctgcaaaggacattcttcaagtgcaaaacatgttcccgctccccatcgacaatcatcttctccctgtatcacttgctctcctcattccggatttcacccaatttatctcaattaaattatattcatactcatccttgttgcactgctcaaaacttccagggtgtttacctctgtggctatcattctcaagattcatatggagcaacttcttatcttttaacccatccagatggaaacatactagttgacaggttaattccaataagcttatgaatttgttcatgtccctaagtacccatctttccatctccagacaaaaaaaattatcaagttgtaatcagatacattaattgctagtgttcctgctgataagtattcaatttcagcacagcgtactggtcaatgtgatagcatttttttcctcacaaattggagatcatctctcccaaatcttattgtccagtttatatgtggttatcactaggtcttctgatattttctgattttacagcccaaggtatacaacgaaactggcagagaacatcgaaaaacttggtggagcacgctacatgtttttgacccacatgtatttccggacttaaagctgtatcacatagttctcttttttaattgcctttttttaacgcactcccttttattttggatattgaagagcgtctattgagttacttacagggatgatgtcgcggatcataggaagtgggctgagcggctaaaatgtgagaggatcatccattcgggcgatgtaagaccctcatccaaacgatttcaaagaatcatgatcatccttctgtctgaccctagaaagacatcgcttattcctgagtcctgactgatcctcatcgagtactcaatcaacactgtcaaactttataacctgcagtacaagtactgattagcagtacagagaggacagttatatcgtgtcagagcttgcatgacatgaacatagtgtagagtctgatttacctatttctccagtgaatgttgctctcagatacttctcctgatatttactgcaattactgtgctgatgcaggtagaggatgttactgcagatgttgagtggaaacttactggaaatggcccatgggacattggagctgatttcgaacttatccataccccaggtcatactgaagtaagttcaacttaatgaaagaagttgtttgagcaattacttgtagctttcagtatggaaggcttctctggattggatggaacatccttaaacatacaacatcaaagacaaagagtattagggtcaagatatgtcatatgtgcactatttttgcgcataaagattagattggattatcaccatatcctgtcccaaattttcctcaaccttagagacgaaggaacatgttctgtcaaaaattgtccaaagctcataaactgagatttggacaaccaatctaaccttcttcagcatatatagggttcattcattaaaaggaacatttttttcagggttcagtctgcttattctacaaaccagtaaaggcgcttttcactggagatcatgttgcaaaatcagaagaatctgatgatttagatctctttcttatgtacagcaagcaatcaggtagaatcctccctagattttctaactgaaggtaaatgtgcaattgtaccattagctgaaagtaggactaggattaatccatctgttgcacaaacctgcagtgggcttgcagctggacagcatgagaaaattgttgaagttagacttcgagtggtttttacctggtatgcgcttcttaggaaatgagaaagtccctgccttagcatttggtttctgttgtttcctttaaaacggcataactaagtcactgaacactgattgctagttttttttttccttttccaggtcatggctatcgaatccattataaagacgtacgtgctaaggattcagcaatcgagtccctcatagctaactacacaagctaggagcgtattataattctctctaccttcattgtgtataaataacgaccgattctggaatgaaggggcaagagagaatgcacttgccattttgtcagcgagagtggcacttcatatccttggaagatgatggtactgtttttgcttcacgacatttgcaatatatcaagtcgaaaatgtcattgatgcacaagaatctgtgcctttaatgttctttttttccagcagaagaatacttgtttatgatgacatgaagtttcctgcagttactctggcatctctaatttactccaaaatttgtttcttgcatcttgttttccagaaacatttgttgcaattgaacattaactatcaataactgaaccttcacagaaaactcaaaagaaaagcccagcatcatactagctggcctgaaacaaaattgaacgatgttacgcaatgggaacttaatttcggaatataatcacgtgttcttaatgatatcaatgaacaaaattgccctttcctcgaagttacacctcctggcaccgattccacaaaaagaatgctgtcccattcttcatggtacagaaaaattaaaagaggggcaaaaaaaaaacaaaactcccgttgtatactctttagtgttacataaggtacaaaactgaaactcttggccagagaaatcctccctgttagagcaacgcttccaagtattcgtcgacatatgccaaacatggccaatgatcggttcttattctgaccaatgtggaggcataacctacttccatcgaaaagaggaggtgataccttggtggtagaaatattaggacacgcacaatgcccatatccctcttgcttagatgagcataagtctctgcgccaacctcaaattcgtcttcatcaatgcgctgaagcgaaaggtttgtgtccactgagtatggaaccaatgcatcagcaccaacaataggagctgaatcactttcttcccacacaacgtttttaataattgcattgcctcttaggatggtaataagtgaatctccagcaacgctgacaacgaagggagccaggtatctttcaatagctctgatcaaaacctttggagtcacctcaagaagtttgacagatcgtgttccattaatcgcagctgaccctttccctcctgtcaaagggaaggtctcccgacctgtgttcgaacaactgttgcaggcctcccatagcgcatggaacagatcctggtaatactcagctgcatcctctttcagaatatcaggaggtacactggccttcagaaacatgtcctcaatgccaactgtaatgggttgaatggacccagatatgacttggcaattctctgtgttggcggtgatgacaacatcaataagaccaggtgatggttctcgaggctctaattctatcactactgaagcacaataacttgattctaaccggtggccgttatccaaaggcataatgtccataccagaacctggaggttctcctagaaggaaaggtacatgacatgagggaattttcccaaactgtgcacttgatgaaaagttaattgtcgccgcataaagggccggcaaaccatcaaccccttcagaacctggaactgctgaatcggatccccaagcatggttgaatggctctgaatcgaacctaaatgtgcaaggtatttttattttgagaccaactgagtggaggtagtcaggaatgcatgcaaagtgcctcctaaggatttccagtgtttcagcacccttagaatccatcacacgaagagcttcttgtgtgtaggcgattctctcgatggtaggttgtggtgtcttttcttgctccggaggagttgagcttacatcctgtatacttagaatttggccagatgctctgctctgaatgctgaagttaggcaatgtgagggcccaagactgtttcacgaccagtggcacaactctttcaagatgaatgtaagacgccaaatcaggcatgctcttaagatcttgagcaggacgtggtgatgggacatcaaacaaaggacctggatgagatggtgtaacacctgcaggttgctctccgattcccatgagatgcctcagcttctttccaggaatgcaggacagcatccgcaaacaaatcctggatgtaatatttgaagaagtgagaagataatagaaaaacagctatcacaaaacaagaaatatcagaaattcagaatgcctaccttgcatggtcccggacctccaggtctgggtaggacttgatagtgagtacaagtaggcatgagaggggaaagaagatgcgagagctgtgatggtgcttcatcatgacacgacaaatgccaacgaccttgctgccctgagaccatgttttcagttctgtctctggatcatgcttcttggcaagagaagccatctgcttggtgagcaactctattaggcggagctgaggaactgtctcattctctgcgatcttctcaaagagtgggtagtatgacgccagttggtagcctggttcaagcctcggaagcagattctcgtcaagcgtttgcagcaactgctcccctgcccaccgatgagtgttgcatgctagaagacggttgatgaaatcagcaattactgggactaagcctcgatgttctgatgtcatatcaaccaacatagcctgcacacagagtgacctagaaatttgagaattgctaaattttcaattcactgtctggaacataattagggttcttccaagttgatggatgcggctatcattaattttcctttcagtagatttctacctgtaaatggtggaagatagtagaattcaggagctcaccagctccggagcaacctgagccatcagtactgtgaggggcagcagcaaccaagaccacatgcagcgcccggaacgccacacaagtctcggtactccatcccgggagccacctgaaggctgaaacacaagccaggccatcatcgacaagcccaattgtctggtccacatctctgcctccttcaatcttgtcagcatcaacgccagcagcaacaagagctaggcaatctagcttcttggccttgactgcaagggggtcgaacacgccaggataaaaccatttcgcgaggccgggcaccgcatatctgaattttccagatccaagcagccaatgtaatgccagcaagcgcgctgtgagcgggcggtgtgcctcacaagcagccaaagctagacggcgtgccattttacgctcgtcttcggccccgaaagcatctggaaactggatgaacagcgtgagcagagagtgtagaagcatgaggctggacgaatgtgccatcccgccaaactgcaccttgacgtgcgctgcgatcgccggagcccacccgaccacagccgcggacacctctgcaaggatggccgccatctccatgcccgatgcaggcgtgaggacctgcggcctgtccatgatcagagcgagcactttccttatgtccctcaaattcacctcggaaggcggcggcacggggttggcaggatctggtgcgggtgcgcggagatgcgcgggcacaaagaagggggtgggcgggccggacaccgccaagatggaggtggtggaggggagcctgccgaggcggacgacgtggcgggcggcggaggcgaggaggaggaggtaggactgcgcggccggcgagcgctcggcggcggcgagagcgtagacgtggccgaggacgtcggcgaggaggcccgggagcgcggcgtcgagggcgcgcagggcgcgcaggcgagggcgcgggcggcgcggtcgggtgcgtggttggggcggttggcggaggcgagcagggcgttgacgagggcggagagggggtcggcgtggtcggtggagacgggaagggagagcgcggaggcgaaggcggatgtgacggtgaggaggaggtggtcccggagcgggtggtcggaggggaaggagaggaggcaggagagaaagagggggaggtgggtggggtaggncggnagcaggtggtcgtcgaggaaggagaggaggaggggcctgaggtgggaggggaggtcgcggcgcgggagggaggagagggcgaggtcgaggagggggaggtggagccatcggtggcggcgcggggtggggaaatcgtcgatgagctgctcccactcctgaggcgagagggaggcgggaggcggcggcggccggtccatcgctggcgccggcgaggggaggggaggagaggagtgatgcggtgtgtggtcgggtcgggtcgggtcgtgtggtgtgtccgggtgtcagtgtcagatcggatggtggggtagggggaaggagacgtacgtgttggtggttccgccgcctattgcagaattttttttatttataattttttttattaaaagttttaaaaaataattttccattttgaaaattgacggaagtagtcccctaccgccctctgggagggcgccctctcagagggcggcgaaaatgacgtggcagacggccgttcgctctcgggcgacggccgtcaacgaaatttgcaggcggcccccttgccgccctccgctagggcgattttatactgtgcggggggccgcctgcaaatgggcggcgagggggggcatggaattttgcaggcggcccccttgccgccctccgctagggcgattttgtactgtggggggggccgcctgcaaatgggcggcgagggagggcatggaattttgcaggcggcccccttgccgccctgggggagggcgatttttgcctcccccctataaagcccagtccttcctctgtgaaatttcattatattcactaaaaatccaaaaaaaacgaaagagagagaggggagggcagcagaaggggagcgccgaagccctgctggttcgctcaattcatcacaggtatgctcccatacatcttttgcatttgtactaatatgttatgtttgagtatatatgttgcgttttagttttagttccatatattttagcacatctgtagcacacagcacatatgtgtagatccagagcatagaatataatagtatgaattgagacatagacaatagtgttaattgtaagatgtagtttagtttgatctggagaatgtaacgtaattttagaaatttagagaacaatattgtagagaatgtaacttagggcgtagtacagaaatgcgaggttaacgcagttattgttttcatcaggcacaatgtcaagtaaggtcacatttcagatagttcacggtgaaggaaatat

SEQ ID NO: 27191 - DNA, 7832 bp, Oryza sativa
ttatagttggttgttgaaaggatttaaaatagaccaagaagtctacccaatgtcagtgtcagttgtagtgagtcgtgcaacagaaggttatttttggaaagtaatgccgatggacagcactgatgcttggagacggtatgtggaaatggcttttgaacggtcatggcccctcgttatatttgtgtcggtacaagagaaagatataaatgtttcaatgcaaaccgaagatgtagagggtcctatcaatgcaggggatgttgttggaccatcgatgcaaaatgaggaaaatcaaccaagggaggagcaggctatgggcatggcggatgagggggagagagtcggtataattgttgatgaaatggagagggaagattcggataatgaggaagcggacgacgacgcatcatccgatgaggaaggtgatgtaatggccactgattgggcaaatgaggacttctctggacttgttatatcagagggtgatcatgtaccctgggagtataaggagaacgaggtaattgagggtgcaaggtatgctcataaggatgagatgaaggaggcagtgaagcattgggtagtttccttgcagagagagtttagggtggtcaagtcaacaaattatgtgtatgaagtgaggtgcatgaagggtaaatggaatgattattggaaagttagcattgtgaccgagcacaagtgctacttacaaggggtggagaagtatcaccgaaacatcacttcagcttttgtggcaagtgagatgtacagcagtgttgttggtaacattggctttgaaccaaaatcaattattaggcacatcgagaacaaattcaagtacaccataagctatgcaaaggcctggagagccaaacaaaagatcattgagatgaggtatggcacatttgaagcttcttatgataatttgcctcgtttgttagccaccattgcccagaggaataataatacgtactatgacctacatacatttacatcggttgatgatcgaacaaagagtatgctgcaaagagcctttttctcattgggtgcttgcatcaatgcttttgtgcattgtcgacctgttctatgcatagatggaacttttatgacaggtaaataccgaggtcagatattgacagcaattgggtgtgatgggaacaaccaggttctacctatggcttttgcatttgtagagagtgagaacactgaaagctggtactggttcctagagagagtgcacattgcagtggtgcgtatgaggcccaacgtttgccttatacatgatcgtcatgcgggtatgttgcgggctattgactacttgcagaacggttgggatgagaagggacttccagctaagtggcttgatgttcggagtcggtggtgcatgcgtcacatgggtgcaaatttctacaagcaattcaagaacaagcatcttatagagctctttaagaggctctgtgcacagaaccaagagaagaaatttaatgagttgtgggacaagttggatgagttgacaacgaagcaaacagatgagcaatctcgcagaccactagttgaaggtgacgagcctcccatacctcttggtgcattacatgatgacccaccaacaatgagaaggaggtcagggtcgtccatcagaaatttcactcagtggattgagaatgagcctaaggagaagtggtctctattgttcgacaccgatggatctcggtatggcataatgacaaccaatttggcagaggtgtacaactgggtaatgcgaggagttcgggtacttccattggttgctattgttgaattcatccttcacggcacgcaagcgtactttagggatcgatacaagaaaattggtccgtccatggccgataacaacatagtgtttggcaacgtagtgacaaagtacatggaagataaaatcaaaaaggcacggagacatcgagttgttgctcaaggcacacaagtgcatcggtatgaaataatgtgtgttgataggagcaggcgtggtatctatcgcaagcaagccgtgcaggaatgtgtcttgaaggcggatggtggatgtacctgcagttgtatgaagccgaagcttcatcaccttccttgctcacacgttcttgctgctgccggtgattgtggcatatctcccaatgtgtacgtctcaaattatttcaggaaagaagcaatctttcatacatggagtgaggagatatatgggttcgggatctcaggatcttacacaacgctgagtgcccaagttttttatattccagatccatctaagttaagggtgaaaaagggtcgacgccaaactagacgcatcagaaatgatatggatgagtcagaagcaggtgggaggactttacgctgcagcaagtgtgatctgcgcggccatacttacaagaaatgcccgaagaatgcagaagttccaagcggcgcagatgctagtccatctggacaggcaagtgatggtaggcgaccacctggtgaaggaacaacaagcaggcgcgcaaggccaaggcgtcgtcgcgcagcaggcgattccatggtgtaacaatgctttcgatttaggaaataaaatgctgttgtgatgtaatgagtgttcggactaaatacttctatcgtgtaatttcaattcaatgttgttgtaatgagtacctccgactattgttgtactagtagtattgcgaactattcggtgttgtatcataatgttatcgtgatgagtgttcggactaaacacttttgtttgtttgtactcttgtttaatatgtgttagtaattcgcttatgaacatttattacttatgttgaactaattatttatatgtttctgatcaacctatttaatgcaggtatggcgtacgacacaccggcgctgttgaaccgtgggattgacaggaaccaccgctcgttcctgtcagcagtcgagggtgcacagctcggcaccttccgtccacgcacgtcgcgcgagtggttgcgtgtcgacccccgtcacgttccttggtacgcgtatgttcacatttcaactcaactttgctttgtgtcgtagttatgtttgaagtttgctctatacaggttgcgtgcggcaggccttctaccactttgtaggcttgttgaggcggcggcggacgaccgtgacccagcgaagcggtgggatgcagaccggtcactccttgccgctcttgtagaccgctggagacctgagacgcacacgttccaccttccctgtggggagatggctctgacactgcaggacgtgtcgtacctgctcgggctaccgctggcgggagcaccagttggtcccgtggacggtgtttttgggtggaaggaggatatcactgcgcgcttcgagcaggtgatgcgccttccacacctaggaccggccaacacccttcctccgtactctacagtcgggcctagcaaggcttggttgctccagttcactgtaagtaaataagttgttattatcatacatgcttatttgcgaccggatgagtgttttgtactaaaatttcattcttaattgtaggcggaccttctgcaccctgacgctgatgattactcggtccgacgctcccttgaggcgtacctaatgtggttgttcgggtgggtgatgttcactagcacccacgggcacgctgtggacttccggctggtccactacgcacggtccattgcggatgcttagccacaggacgtgccgcagtggagctggggttctgccgtgctagcagccacgtaccgtgccctctgtgaggcgtgcacgaagactgacgcgggagcgatcatcgctggctgccctatgttgcttcagctttgggcagccgagaggtttgccataggtcgaccagtggtggacagcgcaccctacggggttggtcgcagcgcgcagtggccagaggacggtcccacgatggggacttactggtgtcgacgtggggttagtgcaacttcgctgcgttataagtttatcagtcgtcttcttttttttcttcacataacatgtctaattccgatcatgtttattgcagcgtcgttacgctcacgtccaggtgagacgaggttacccggacttcgtgttcgagtttgaccgtctccagccgagcgacgtcatctgggagccgtacacagaagaggccgtcgctgcgagagcaccgctaggactttcgtcgttgtgcacacgcgaccgggcttattggctcaccatcctgccgatggtgttcgacattttcgttgagcctcactgcccgcagcgtgtgatgagacagttcggacttaggcaggtgtttccgggcaacgtgcagccgaccgtcctccctgccgaccactcgtgagttcggattgttcatttctaaatttttatgataattacttcatcgagccatataatttacctctcttcacaggttgactcgacggggacagctagcaggcgcactttgggctccacgtgtacagcagtacgttgacgactgggtgttagctacagaggaggtgatcaacgagctcttcccacacacggaggagaactaccgtgactaccttcgctggtaccttcctcgcactcgtgcgcgtgtgaccttcactccagacgccccagagccgcacgttgccgctgtgacggacgcgtatcccacgcaccgtgaccgagactacttcgtgggggtacatcgaatttgtattagttcttacaattatttcatttatcttgcataatataggacaactactgaattttttatttccatcttgcataggctgatgccgcacaggatatcagtgccgatatcaccgcagtccaagtgaggttgaacagaggtttgcacttgactgacgttgagcagagggtgaccttcgaccggatgcaggagaagatgcgtgcggtcatgcgcgtcttctcctgtcgcagcgccgtggacgtcgtacctccagctggtccggtacaaccacggcctcgcgcgcctaccgtcggagcaggacctcgacctacggtacctgtttcgcacggtactgctcagcccagaggtttcttaagttttgtttctgtttttgtacgaaaacatcaccccgtcgtaacttgatgttccatcctcgcaggacctcgtttgccttcgagcgcccctagctttggagcagtgcgacctacagcaccggtttcgcacggtacagttcagcccagagattagttcatttttgtttcagcttttgcacgaatatgtcaccatgttttaacggcacgtttcctcatcgcaggacctcgtctgccttcgagcgcgttcgcaggcacgaccggcgcttccgcgagctccgcaggggcgttcgccacctcttcgggcgcgttcgccagctcttcctctcacggagcgtcgatccctcgcccacacggtactttactttttattaatactattaaatacctgtatgaaactgatggtccttgtccagcaggatttgcagccggggtcttcggtactggggcctcttcgtctcacgccggtaggactggtcctactagccagttctacgacgacgacttgcacggtgcacaccaccacgacgtactaggctcctctcagcttggaggagctccagaggcgcacactcaggagcagccagaggtcacacctgtacaggcaggacgggttggccgtgccgtacccccggactgactcacatactcccaggggcacattagggcgcagggtaggagggacaggggtaagaggcctcgtcagtagtgttctacctcttcagtccttatgtgaccgtttcttttggcttacaaacttgtaaagcagtactacttttgctattactactgcagtactacttgtgtttgtctcgtctagatagttcttttcattcatatggtgctagaacaacttatgctcacgacaacacactttcggcgcttcacggtagtgtcagatccagtagcgcgcacagtccacaacagcacacatgaaaagcggcagctcgagttgtcactatcaactttcggcgctgcctgttgacataaagtgaatcacgcccacgcgtgatcgtcttgtcacatctaatgaataatgtatctcattgagttcacatatattgcagtgaatcacgcccagagggcggtaggcgactacttccgtcaattttcaaaatggaaaattatttttgtaaaacttttaataaaaaaattataaataaaaaaaattcgcctattgcatcgggtctcatttttgtggactaggctgatgggcctattctcccaacggaaaataggaaataagttcatttcacgtactgtatttgaaccgtaatatcgaatataacctatctctcaacttgtaataccaaggtaaatattagtgtattacatctattttcaactgacatggcgtgagtcagcgtgtgacctacataggtccacacgtcagggacgcctctctctttcctctcttccttatctctctctcttccccctcaacacaattgcggtcacgatagagacgactgatggtgtcacccagcagcgcaagcggtggcgcctcattaagagaggtggaggttgagcacggctaggcatcaaattaatacaatacctaagtacctaacagagacaataaataaataattaattaccagtgtgtttcctgatcggaacaacataggaatgatacacaaattagcaagatgtagcatggacgggtaaagccctatgcaactatggtaggcgtgattcccatcgtcaaggtgagaggtggagacgaagctagcgagtaagccactcatgtcgacgattgagcccctgatgagacgattagctggatcttgaaggaacaatcatagatgcttgacgacaatgtgtccatggcaagggaaggcacttgcccactcaggcttggatataaaccgcgacgagcaaagcaaatcatccggatttacctgcgctgctcgcgctgctcatgtggcaggcaattaggcctgattcgacagagctgcccactcatttgccaccacagcctcctcatctgcctcaccgtccttgagttgctgttggagtgacaggccatcacggctagagtagaaggatgttgctcctcccttttgcagctaccgtggggtcagggattggggagctttcacaggaaacggggggcacctcgggctaaccatcgccgaataggagtcgtagaagctctgacaggagctctaggtgctgatggcgctccaacacctcatgtgcttagtcgtgtcttggatatttgttgagagaaaaatgattgagagagatggggagagaggaggggaggaaaatagaccactcgagttaaatttgacgagggattagatttacactcgatttaagttgtgagacgtcgtaaatgtgatactcaaactcgattcatcgaacttttttttccagaaaaatatacctacacacaaaaaattcgctcattttatcggaagaagaaaagagagagagagagagaaacagcgcgagacgcggatggaatggcaagggaggaaactggtggggtgggagtcgccacgacacgcggcgacgcacggctgtggtggccggtgacggtgagctgatcgactgcccctcccttccccttccccctccccctccgtcgcatcgcagctgcagctagctacacgaggagacctgctgctctgctcaatttcaacttgaattctgcttccgacgacgagacgagacgcaatcctcgctgcctccgccggatgtcggtggaccccgatgcttcccccctccgccggcactccgctgccgccgccctccctcgccgccgctagcacctcttcctgcttcctcccctccctcctccctat

SEQ ID NO: 27192 - DNA, 26792 bp, Oryza sativa
  unsure (1)..(26792): unsure at all n locations
caccaccttcgcttccggaaccttccgcggcgccgggggagaggaccccctcgtctccaagctccggacccagctgggcgtcatccacccgctcccggcgccgcccgtcaaccgctccgtcctcggccttttcgccctcttcttcttcgtcggcgccgccttcgacaagctctggaccctgcgcaagcgccgccgcgccgagcgcgaggtcaaggtcaacggcacgtggccgcaggtgcccacctccagcttctccctcttcctcgaggagaaggacctgcagcgcaaggagtccgtcgagtgggtcaacatggtgctcggcaagctctggaaggtctaccgccctggcatcgagaactggatcgtcggcttgctccagcccgtcatcgacaacctccacaagcccgattacgtcaaccgcgtcgagatcaggcagttctacctcggcgaggagcccctctccgttaggaacgtcgagcgccgcacctcacgccgggccaacgacctccagtacgtcctcacttcttctactactctcttctttcttttccatacccaattcggttgggagctaccgttgcagcaagaaacatggaaatattcttcacattgcttgtcccaaacgttgttctagctagtactactactagtgcttgagaagcacataacacattggtaatcggtatggtaaccccactaccattgcactgctcatgtgaggaaattggaaagcaaagcatgatgacattggtcttaggaatatttgtcgccatttgcctgtaattcacataccaaaatggagtattactcttttttgggtatctatcataggattagcaccaccatgaaacaaaatactaggatgactattccagcagttcacttcttattactacagtctatgggtgggcatgtatctgttaccgtataaatatgttcattctagtttctgatttctactttcttggtcattgttgatgccctgattttttttaaaaagcaaacggcaacactgctgtctacattgttattgtatctatatcatgttttagtgttggccagcaaaaggcagcgagtaactcatcctgtatttcaggtaccaaattggcctccgttatactggtggtgcacgcatggcattggccctctccttaaagtttagtgccgtacctgtcgttgtgccagtctgggttcgagatttcgatatcgatggggaattgtgggttaaactaaggcttataccgacagaaccttgggtgggagctgtatcttgggcatttgtatcgctcccaaagattaaatttgagctgtctctgttccggcttttcaatcttatgggtatgacttgcttgtccaatcttattatttcctatgcaacctgtacttaaatttcatgcctttgtaaggttgattttctcgtgattccaaaagaaagcatggttggcaccttttaactcatatgattttctggaaacaaacatgcagcaccaactgacaatatgccctgtgaatcatgtaacacagcattgcaaatagcccatttctgcacatatctagagtataccgcgttccaattggtacggttaatgttttaacagtatttgtaacacacttgtactatagtatatacttgccaattaccgcagtccattattactctagtaccccctttatatattgcatttctgatatttcgtgtcccaaagatccaggggttttctgactgatatcttggaattgtaagtttgtaaccatgaatgtcttcttacaaatgaattggaagaaatgggagaaaaaaaattacgatcgtaggactttagtttttcaagcctacaatttcttagtttatgtatgcacaatggtgtcaatctgtttaatgttctgaaactggatatgttgtgtatttgtgctttgtttcctattcgtttgttcatgttgggtagttgtcagccttttatttcatttattttctgtttccgttatataaatttgtatgttataagtttgagcctttgctaatggtatattggtattttcaattttttgcatggatatggtgcttgtcttcaccagcaattcctgttctgtcaatgtaagtactatcatctcaaacatctacgcagaatcatggttagatgctactacatagatattgctcaatgagcagggactactaatgcattttaaagttgctttcttagtttctttttgtaatggcctaacctaccttcccactgtcacctttaccctctctgccgccttcttctcttgctttcttgttcactctagttctaggtggttaaatattcttatccccatgtgcttagctggtgataaaacatatgctattacttgtttaagctatcaatattagtttttgcttcttacttagcctagactctttattaaatacatgttggtagatccatgaagattctgttgaattagtagcaaccatatttaacaatctatataaaatgcaggtgcctgcattgttattgtttgtatcatgttttcggaaaaattctgcaactgtatcctaattcaacaccttaaggcttagcttttcatttaatgctgctctttaatagacaaaccttgttcaccctttggccggtggttctaataagtcacctgtgactctacctcctctaggtttctcacgaaacttctaacagaagatttgccacgtctctttgtgcggcccaagaagattgtccttgattttcagcagggaagatctatgggacctgttgcaggagatgttgcaagtgacgtaatccaaaatgttgcaagtggcatacttcaagatgttgcaagtgatgtaattcaagatgggaataaggacttcgttggagaactatcagtgacattagttgatgccaggaagcttagctttgtcttattcggtaaaaaagaactctttggtttccaaatggaaatatttagcgtatgtttattagtttggaaattgcacccagcatcttgttagaagaatatcataaatatttagcttctattgagtttatctgctcagaaaaaacaaatcaaatcattaaataattttaccacttgggcaagctggagatgaaataaaaaattagttcgcctatccttacagacatctgtgtcactttgatagaatatttaggtataattttttttgtcacttgcagggaagactgatccatatgttgtcatgattcttggtgatcaagaaataaagagcaagaagaatagtcaaacaactgtaattgggcaaccaggcgaaccaatctggaatcaagtaaagctctgagacagttatactttaagctcatgggcattttgatggaacctttttcttgtatactatcatgctcataagcacttgacatcaaacaggactttcatatgctagttgcaaaccctcgcaaacagaagttgtgcattcaagtaaaggattcagttggtctaaccgatgtcactattggcactggagaggtagggtttcatcttttgcaaagtttgtttcaattgaaagttttccttagtatcctctctaagctgatgtatgtgatattacttggaaatttgtagtttagtgtactgttttacagcagtttgctaggtcaagcaaacatactatatcagtgatgagtgaagtgtattttgtttgtatttttgggtgtcctttgttgaagtggaacgtgtttctgagtatattctatttgccaggttgagttaggatcacttaaagacacagtacctacagacaaaattgtaactttatatggaggatggggcttacttgggaaacggtcaaaaggggaagtactccttcgcctcacatacaaagcatatgtcgaggacgaggaagatgaaggggtaaaaaatgagtttgctgcgggctatgtttcagacgaggatgtgctagattatgtccaagacagtacaagtaagcaaagtgacatggatggtaaagagagagagaccttcatggatctgctggccgcgctgcttgtcagcgaggaatttcaaggcattgtgtcgtcgtctgaacccggaagcttgagagatagtgagcaggctgctaaatccagagatggtgaaaatgctgcagcagctgctgatacagggactgtatccaatagctccacaggtaaccaactgttgaattcactatgctggttacctgcatagtattgttggttggcttgtgtttagatttccattactacatcaccttgattgattttctgattttgtttgtgattcagatactgctctagtgtggcttgctgccataacaagtgtgatggtgctggtctcatccaaccttggtggttcaggctatttcaacccttgaagagttgatgcatgaagaatctgatctgactggagtatttggacgatccatctgtctgaatctgatcatccgcagctagtagcagaggtcgttttgttttgattttttttaactttatttttgccgacaagtgtatattccattcccatgtatctaatgttgcagaggaatcaaagaatggcttggcttttggcggctgtctctcctccctttttctatttcatacgattgacatgatgtagcatatcctttttgtgcaaccatccacgcacatgatttaatttgtgtgaatgggaaatttggagttgcgttcatctctcctcttggaattggatcaaagattgcaccattcattcatcaatagatagcagattagcagaagacatgatttcgtttgttttttttcctaaacaaaattaagggagcaagtgcaggcatgctgaatttcgtttctttttgtaaaactgatcggttaccgacaaaattcaaagaaattccatcaaaacctatcgaattccatcgaatcatcgctcgactttggttatcagtctttttttgagaactggttatcacttatcagtctgtgcccgtcgagaagaaggtcccagatgaaacgggtttgggcacactgactgactggcgggccccacgtgtcagcaacgccaaaggtcaggagagaaatggcgggaatgaatggagccatttcccgcgcgttccacaacctcccaccttttggttttcccaatctcccgcgcgcttgctcttcctgggctttttagtctactcgatctaactccaaatcccattaaccccgccgccgccgccgccgccgccaccaccgcgagacgcgagaggagagtgaaagaaagattcagagagagagagagagtaagcatgatgtccttcagccagcccgacgccttctcgccgtcgcagttcacctcctcccagaatgccgccgccgactctaccaccccttccaaggtagtaatctccattccattctcatccgtgtgtgtcttggtttcgagaaacaagggggataaaatcatctttcttttcttttgattttgtagagccggggcgcatcgagcaccatgccgctcaccgtgaagcagatctctgaagcgcagcaatctggcatcaccggggagaagggcgctcccttcgtcgtcgacggcgtcgagacagccaacgtatgctgcaacacaacacggaaaatgccccccccctccctgctttaatttcctcttagcttgttgatttgggtgtttccttgttgctttttcaggttaggcttgtgggattggtcagtggcaagacggagcggaacaccgatgtgtccttcacgatcgacgatggcaccggccgcctcgatttcatcagatggtgagcccatttcgccgattcaatcgcttctgtatcttcctagtcaatactatttctgcttcaactgccatcactggttgtttactactacttgtagttcagcttgctcgttctagacttccaaacaattcaaggccgggaattcggaaaatgttttttcaatcctgaatgctaattactactagtataaacattctactacaaacggtgtcttttggtttctagaagcattggttgagcatcagcacatatctggtctgtcttttcgtattcaaggcaatgatataagtagtactcctacatctttagttctgaaattaggttaattactacaacatcctgttgttcttttgccaatggcttcagcagatttacatggttatttatctccatccattttacagggtcaatgatggtgctgattctgctgaaaccgctgctgttcagtacgtaccagtcatagctcccatttatgcttctatatatgcacttcatcatcttttatttttgaggattgttagcatctttctccttgaggatcatcaccttttctcataactctattttttttcctaattaaaggaatggaatgtatgtttctgtcattggtagcctcaaggggcttcaggagaggaagcgtgctactgctttcgctatcaggtacgtaacattcatatattctgctggtgcaaatatgcaataagacatgcaactaattttctcttattttgttcatttcaggcctgtaactgattataatgaggtcacactgcatttcattcagtgcgtgcgaatgcatttagagaacaccaaatcacaggtatgctgctgtgatgtacaattgttctatacaaatactctcgtgatagcaatctcgtgttcattagttagaaggttcatgagtttgaacaaaaaaagaactaatgcttaccttcaacactgtagattggtagccctgcaaaaacatattctgccatgggatcctcatcttccaatggcttcagtgaaatgaccactccgacctctgtgaaatccaacccggtaagttgtatttacagttattgcattgatcaaacaatcaaactcctgtgctgccgtgatttattccctcatccttacaggcaccagtgctcagtgtaacaaatggatcaaaaactgatttgaacacagaagtgctgaatgttttccgcgaaccagcaaacgtgtaagttgcacatccgtcttccttgtcatctaggaaaaagaaatgcttgtcctgttaaagacttaaagtcaattactcaggaatgaattccgaatgcatgtctctgtttcttttgcctttttttatctgcttagaaataccagctcccgtgaaaacctgatgctccatcaatatctacttttcctagattttccaattaaacacaagtagaattggctaggattgctagctaggagaaatggagagtatttgtctgttaatattgtcgtgttggctgaagaagcggcctaccgattgtattaagatttgaggatctggtgactgctgttttgctcatcttgtttgaccaacgaataaactgacagcgagagcgagcatggtgtgcacattgatgaaatcgtgaagcgcttcaggctaccggaggccaagatcaagtctgtatttcactccttcgctcacacacacacacgcaacagcgagacattaattcgacgaaaaattatggctgctggttgatgcttacctcgctctctgttaatttatgcagggtagctattgattacctcgctgacattgggcacatatactcaacaatcgacgagtctcactacaagtcagcgttcaatgaataaaggggattgaagcctcagttacttactagtatgtatcctctagcctcgaagctggctgcagctgaaactgaagaacaatcgagatgcttcatgtttgcttgtcatactaaccagtgtgcgtttgttttgctccatccagtgaaattacatgtaaccgtatctgtattacgagtagcacatatcgagtgacaaaacatataatatatgtatgtttgttgttttgcagcatcagcattatttggactgtaacatgcttgattgatctctttggatgcagttaatttcattgtgatattaactcacgcatcatcgatcgatcgtgtgttttttggtagctagatggtccaatcacaataatctgggaattaatgatttgatgatgagattcatatatgggattgaatggatggatggatcacattcacatggagctaactaacacatgcattgccatggttggatggtgagctggccgcacggggcaacaatacaaatgtgctgtgtactatgcttaggtagcactgatctatcatccgttggtgatctggaaataattaaagcagcgaattattaaggaaacaatatggacgagtccactagtgtaaagcggaaaaagacaaggttaatttagctggccaggcgacccacctacaaaatatcagggggatacttacacatgccatttgtttttagtgcccgaagtttaggctactaattgatcccaatagtatatctaggttctaaactaattaggcacatggtattaatagttgtgttatatatgctaacggatttttatgcacaatttaacataatgttagaaaaaaaagtttttggtataactcttagctactagtatgattttggaatatatcaatacaattgtatttgtattttgtgctacactaaatcttaaaagtagaaatgttggattaattgatgttgcaaattaattgatggtgcaaatcttagctcctgtttttcaagatccaattgcaatttttatgtagtgataaacaatgcgtctcacacagcaactgtcccctttcatccactctcccacttccctcctaataatataaaaaattctcttgcatttacccgaacaacccaaacactactccttccgttccaaaataagccaatgttgtactaggagggaacaaagggagtagttatttctctagtctcttcacccatcccaaatctcactccttctagcaaccccccccccccccctcttctcctctcgtaaaagaactctcaaccctccaagcatatagggcataataaatttattttggtaatatgtttagccagaaattggttctatctctctcagaaaaaaaataaattgctcttccacctctctatgtagaaaatttatcctggtaatttacttttgaaagttggtcatgtaggctctcctttccctccttatgaaaaaaattatcgttacccctctcaacattaaattattttgatcagattaatctttttcttaataataagtgaatttcattcaaataatgaaaatattaattcttttacagcagaaggagagagagagagagagagagggggagtggatgaggactgagggcacagaaaggagagggagtaggagacggaggggagcctagcgatcgatagaccaatgtttggttaaagaggagagttttttttttcacaccaggagaggaggggagggggaggagagcggagagagagagagagagagaggggggaggttattttgtgaggtagtcttagcgcactatttaacttaaatagcctacattttaagaattgagtttgatatataattcttcgcttctattttcattaaaaaattgtagtttttaatatagaccatgtgccttttttttaatataaacatgacatctcatattcaaactctgttaataatgtgtaggtgtagatatgcacatatacgtgtggttcacttctattaagtaggtaagaatatgatagtggcgacgattgggacattgatccatatcatatattatatggctctgttcggctgcacttaatttcactgttgtgcagccaacataaatagtattgtgttgtgtctgcagctgaagtagctgtatcggccagccgaacaggcccatagtagtaagtaggtaagatgtatgatcattcctacatgcatagccattcagatagacactaactaagctactagctagcaagcttagctaatgcaaacactgtagatgcttaatcactcaacagagatatgtaattagaataaaaccgattgatgtctatcaatacataataaattaatttttgagggctccacggtaatcgatcgatcgatatatcggtggatgcataaatatgatagtacacgcatgtctcgaatcctgcctgcctcagcctggttggttggtgatatacacacgtgaaaagtgtcaataagttaaagctatataggtacatgcagctcttgatagtactcttgatcgatccatccatcatcgatagatatcactaagccggctacccctcgatcaatccgaccggttggtacggttggtccatcgtttaatttgctttaatttgctccaccacttaacatgggtgttttttttataccntcgcgggcgcccacacatgcatgttcccagagaccccagtgacatatttcatgttttttctaaagttttatttgaaatttcatattggtgggcccacagggatttattccctatatccgcggtgattttttttttatgtccccggggtttaattagttggccccccccaattttattgtttggctcccggtggcaagctatttcctatatgcatattaattgaggggttcatcaccccccgatgtcggtatatatatacagctagcacgcaatttgccattaatttccaagatgaattatatatatatatatatatatatatatatatatatatatatatatatatatatatatatatatatatatatatatatatatatatatgttaccggctcgatcggcgatcagaattcagaaatcgatcacaacataattaatattctgtacgtaccatagatggaatagacgtcgtataaataatccagaaattaaaatctgatttatatatcatgattaattgatcatgtatattagtagtattttttttctaaaagaatatgtatgtacgtacggatcgatcaaaagtatatgggtccaattacgtctgtccaccatctctttcttcagtgcatcgatcgattgatcagcttcctctggctctatatataccacccctctttctcctcttcttcgcatcgtctctctctctctcacacacacacaaattaaattgcgagcaaaaaagaaagattgcggccatgctctccacaggctttcttgaactgtgaactcgtgtgtgcatgctcctcatatattgttctagatcccatgcatgatgcatatcgatcgatctgatctgaattaggtcatcgatgcgcatctggatccccatcttgttgatagttcaagaaagtccttggaaaacatggtgccctcgatcttaattatatcttacttatatatctacctagctatatctcctgcctgctctaattcttggatcgatcgcgatggagattaattgatctgtacatcgatccatgcatatcagatactgctcacccggccgccatctgcgtgcaattcgatctagcaggtaaaattactgcttggatttttattgaattattctttctgctaattggaatattctatctgcaataaaagatatcttgaaataattcgatcggccaggctaatttcagtactctttaatttgatcagatctgcaagtttatgcaccctttttaatgtatggttagtactcaatttttggataacaatcgatatgatagtactccatgcatgcatgcagatctccatatgctaatctgatcttatcatttgcacttggtattctattcatgagtcatattatatatgtatagctaactgttatatctactccattttttttttttgctttatggtcttgtacatatatactgcaatatagttcgtgcttcattgacccggtaggtctctcacatatatatataattttgaaattattccctgagtctaatttacctaatttccttggtttatatgttcctatttggttttcttctgaattcatctatgttttgatcttagatccttttttccagtagtagatagattatatgtgttgtgatcggttttcccaaaactgtttgtacgttcgctatataaagatcaaaaaaagtaagtggcgtttttttactgtttatactttataccatatatttttatttgaaagttgtacgcagcagtagttttcatatgaatggattatgcatggtgtgctagaccgctagtattattgttcccagttgcgttgtgaacaaatggtactgttgcattatatattatatttagataatggaaatggtttactttggcagtatattatatgtatatatatatatatatgcagagttagccatcaaattcagtactggtacaattcaaggcaagatatatatgtttcaccaaattaagaagaaaaggcaatctctgtacatcaatataactggtgaattaagttaaaggcttgggttttaattattagcccctttatatatataaaaagaagttaaagtctaccactacatacttacatagtattacctagtacatgagaaattaagaaactgaatgcatggtgaatcctaattaattctgataggcggccggtgatagcaagccttttttacagtagtattgtttgaactttgatctgtgagctgcattgcatggtggaccagtgtttgactgttcatctcttctcttttgcttgcatgcatgtagctgggaaatgaaagctaagaaagatagcgtgcacgagcgtgcagaatggcagcatatgtatgcattattcagtactgctagatgaacagaatctagaaaaagatgaactgaacagcagcagcagcagcagatcgaaggatggatggatggacggatggagcaagctaagctaagctttcgttttgtcgatccatccgtccatcggtgtcgacctagctagaaaggctgacctgtcgcgtcgtccatccaagatcgatccaaccagcaaccaggcatcagacaggctctttcttgtccagctgctgctgctgctagtacacatactacactgtctctgctgcatgcatgcatgctgctcacctcatctgattgagagttcagaattgttgagagcaagcaagaaattgagaaacggccaggacagattggattgatcttaattggcatatatgctgctcgatcgatactgtctgtcagttctcagttcgtcgatcgatcaagtctatatttggatatctgaatctctgcaaatgccaactcgaccactaagcaattcatcaatggacatgatcatagtaatgtcgatcgacgtgcagtgtcactcattgttgggagcacggtcaaaacctccagttcatatcatatcatatgaaatcgatctcaagctcaagcagtttcgatagatgcaaaattgaagatggaagtataaataactgctactgtatatacatatggagggcaggaaggcaggcaggagattgatgaagtgacgcgagcctgccttgaattgtgctagtttctctttctctctgcgcgtgtgcttgctgcccctagctagctagcgaagcgtgtgctttcactgtgcattgcatatgataggaggtagtactccactactccatggtgaactggtggttgcattgctaaccacagccatagagctactgagctagctgcgaataatttcattcatgtttgccgatcgatcgagctgcagcaatgatctttccctgcagcaatgatcacgttgcatgcttacttgtttctcttcttttaacttttttcccctctcctttctttcatccatagtttttacgttaatatgcagatgcaggcagcacaccttcttcttgctccaccggctaccagcacctaagtaattagtgtgttcatgcgcctctgattatatatgtacatatatatatactccaatatatgtggtagcatggatatatatacaattcatgtcttttgtatgtactaattaatgtgtattgtcatgtgcaataatggaaaatgatgatgtaaaagttgagacgactgaactataaataaaaatatatatgaaagatggcattattacatatgcaggccgtatttgagtgctactgatcaattacttcctgatagtgtggtgaatttcaagatatatattgtctccgaatcgatcgaagcatggtattatatattctactcgtgacgtgatatacttacttaatttgatttgtttaattacgccttatcacgcatgcagctcgatcgtaatcgaaccatgcatccatcaatatatactactccagtatatttaaaaaagtcaacggcttcaaacattttgggacggatggagtatatacagtggtgaggctagctgtagataaagctggcaacctgtactctttacatcctaaatagttaaagcgaatcaggaactgatcatatgcaagatttaacccgcacatccactattccgatctccatgccatctactacgaatgaattgccataaaaaagatttaccaatcttttctttccttttcacatatagtagacataattcagctcagctgccaaacaaagtattgaagttatttgtgtaaatgacctcacaaatttggtatagattgctattagctagtagtatacaatacacatgcgggtggcaatgtaatccatcttccttatctaaaatatgatacaaaaatgtgtaagcagcgacatagatcttcagggatcaatcagttgatatggagtagtagtagcttgctgctgctgggacattcagatattgatgaatgcaggttttgtcatggcagtgaggcagacagcagagagcaataaaaggcactagtaactacattcgtctcaggagtcaggatacatgaacttttaaggttaaacacggctattagttgagaggagaaatgttggagaatttaaatggtgaaagattatgattagttgagaagagagtacatgtgaaaaagttgttatattttaagataaattataaatgctaagttattattatattttgagtcgaagaaattctaggtgggcaagcaatatacttatgatgattaggcaggattgatctggattggatgtggggatcagagggagagcatgcaccagcaccacactctctgcagctttttaggtgcagggtggctttcattcagtcatcaggagtagcagcttctgccgggcttggaaaaggaattgtggaaaagatttgcacataaagtgaaagtgaaatgggatgtacattagggcatttacaatccaaaaatggtcttgtgagggagtatgtcacgtactaggttaagccatagtcaagaatactctcttcttaatacatagtagtagctttaatgagctccaaaataagcaaccgcgacgaagctaatgcttgcacaatataattgtttcgataatagttccgcacgcacaaaggctctgcattttatgccgtaatataattgtttggataataactctcgtgcctttttcaggacaagtacatgcccatgaggccactctgacatatctgttgtgttggcgtttcagttttttagtttgtcgggctgtggtttctgccagtctaattctaattcgacagcctcctgtcgttgcaagctaaaactacttgtactttaattttatttctcccaatcttaatgaaatttggtcgccgattccttcggccgacccggcaaaaaaaaaaaactctgacatatctgatgtagaatcgcgagaccattcgctatgtcaccgcccttagaggtgttattgttttttttttcctttaattttttccaagctcttttcttattatgtagtagtatatatactactactgtaatatggagtactattctgtggagctcattgctgcagatagaaagatagatctttcatgggtgctcattgctgcagtgacctgtgaattgtactagctaatactagtactgtactgagtgacagtgtgtgtgagtggggtgtgtcaaccgaaggaaggaaccgagccataaaggaaagcgaacaaacaactttagtttaggcggccttttggttttgtttgtttgtttgctgcaccgctgtctgcagtttgccctagacaaccaaacaaatgcttccccatccgatccatctacctatatgattgtgagtaccagtacatagtagttagtgatcatcatcatgatgatgatcatgcattattgtcattatcatcatcaccatcatcgtctttgtgtccaaaataaaaatatctgtcagcacatatactgagtacatgtgctgtattttcagaatttcagaccaacattctgagttctgactgctgcatatatgtccatatatgtagtattttggagacaaacaaacaaaatttactaccgcggcgctcatctatcaacatgtacaagagcccgtgctctgctgtgccttatcaattctcctccgaattgacatactaatattaccgccgctgatgctggttctgacatattgttatctgctaaattctctaatgatgttatacataataatgctgaattctataatgatgtatttcatcactcatgttaatcagatgtttgcggtccttttatttggcatccacaattgttccttcttcctcttgctttgctcagctcaattgtttttagccaaaaacccagaagttgatgttggcatcacatcgcacgcatggaaatgaagaataaaattcgagaactcaaaacaattcaaatgtgtagattgattttattatccacttaaatcgactgcagtataaaattaaaggggatagaatgatctttctctatgctagataatctccctcactctagttattcaacacgggttaatgtttttatatgtttgatgaatccaccaatccgatgaaaaggatttgattgtgccatctattcaaccgtatccagttaaatctaatctggcgcacgaacaattaggattactatcgaagtgaagatataacacgaaataactactgataaatttctattttgcagcagattcccagcataatctcatttatactggaaatataatgtaccgtaaaagtcttctaaaattcaggctgcaaggaaactagtatttgtatataacccatatctgaatccaacaaaagggccatcaatcccatccgtttcgttgggggtacaacaaccttgaaaaagcagacatggaacatcatgtgctacagctgaaaccatggaccagattacatgtctgaatccacttaacacaagtcaaacagacagacagacagctagttagttgttcaagccaaaaggaaaagtatcaagccattaactgattagcattagcagcctacctacatcgatcatgctattgctaccacattttgacatgcacaagattcctccccttcctccaaaatgcatgaacgattttagcccactcatcaccacaaaagatgatcagagagggagccggacgcagcaaatcaagtcatcacttgttgcagctagtgttttcttgggcgaccacgcccccttcgaggcttctccgccgcttctttcgacctgatccaccaatcacgcaacatacaatggtcagaacgtataaacttcacagctgttatgtttacagtggaatgaatgctcacccttctgaggaaggaggatccagaaagtttagaacttcattcagagcatggaaagccatcttcttgatctgtaaaacgcacaaatcaaattcaagtcagtcaccacatcaaacaccagaaatttcaactgacaccaagctaacctctagcttatcttctttagccctgtgggaagatggaagtcgtctaaattccttggtcagcctaacacactcaccaacattctcgggggaaacaaagtccagtgcaaccttgatgcaggactgcagagttcagttcaaaattagcttcattttttttcatttttcagcccccatatacctcatgcaaatatcaggaggaagggaaaatattagtatctccatttacagtaattcagtcacaccttcaaattcctgacttggtgaggacatccggcaggaatcaaaactgcttcgccaagcttttgttcaaaggtccaaggttcaacacctgcaacaggaaatccacatataaaaacaggcatggtcatgaaacaatgtgattgcagagaactcaagatctaatgctaacatgtttactaaccatattcttccttcagctttcttttatgctccgcagttaaatagaaagcttgatcatgaattggatgaataacctgcacagttaacataattgatgatactcaacatagctcttggtcagcaaaacacaggtaatatgtattgttatcagttgcaacagcatagagaggcagacatacctgtttcactggattgcagtggatgtgccgaaattctggcgcatgcttcctaaggaagtcttgtaatttctcagagtcctctcttcggaaaatatcccacaaagcaccaccactttcctggtgctctgatacccctgaacctgtcttcggaggacgacctttagctttcttttgacatctctgagctccaatacgtgcatcatcagaattattggtctcatggttatggtttggacactgagctacatcactatgtaccacagattcataggacaatgcttcatccctggcatcacctccagcatcatcaggtggtgaagcgtttatatccaaacctgcattgtgcaagcaataaactcaacaaaacttaaaagtgggctaaaagattcatttcataccaaaagtatattttctccaccaaccattagacttgtctttcaaggtatgaacattttctttgctgcatgaggcctttggtgcttcaccaacagctttgttccccaattcaactgggcatgctgatggcttgagttcactgcctgattctatcatcccatatatttccatgtcatcttgcattttcatctttttctgcgtgtttttaatctgaacagcatcataagtctcacagggcacttccgctgtgtgtgttaagatgtttacctgataaaaaagatacctttcacaattaatcactgccaagacaaacaaataaagcacaagaaacaacaagatagaaaacatgatctatttgaatgtctgcagatgaggtacgtatacagcaaccagcaagtcaattttattcgcttatcagaatgaaagaaatgagcacaattcatacaaaacaacaaaacatcattataataatagagacatactgcatcagacatgtcacagtgaagtttggttacagagtcacccctgcccaactcttcagaaaatccataggcaatgtaagtttttggcccaagatctggcttcaggacaccaccaggaagcttcactgcaagatttagcggaccatatcgtggatcagtatactccggaaatggcaatgcactgataaattcagcaccatggcgaggcaatcgctgatcaaatgagctagaagggggccagtcctttagcttaagcatctcaggccagtaggtcctgggatgagttctgccccttgtatatcccataaaaaacatgtgtatgttaatttccacctggaaaatcagatatgaatgtagtaagcgccagaaagttcaactgtagatgaagaaagataggtttctctcatttcaaacagaaacacataacaaacattatttaatagggaagctcaattcactaatggatcaacaaaattagttaaactggtcaattatttaatcattatgtgtattactttcttctggaaaggcaacacatgcacacattatttcattgtcgcatttgaaaataagcatcatctcatgtatttctgccaaaagataaaatcaagattatgccaggtatgtaaaaagagtatgaactgtggtaaagtacaataaaccaaacccgagaaaaagagtactatcacataaacacattagagatcctcacctcacaccagtcgaggcaatctactgccctcacagcaaactgctcatcttctgccttccctttggttcgttctcgtactgcccgccacataaccatcggctcccagctaagaccagaagttagcttaagagtgtctgaaacaacaactggttcgccctttgcccaatgcatctgaaagtgcaacaggtcagcgtcctggatatcagtggccaccggacagtataagtagttatcactcgagtcctccctatttgcagcctgacgtaatttcttgctgtcacttcttatcttgcctgagtgatcaaaacaagggcacagctcacttgttctacctagttcttttgcaaatgtttcactccagaagaccttctcagatctatcttctaattcagggagcaacttctctggaaacaagcatttcagatctagagatgaaaaactgcagtcttccttttcctttcgtgggcaaggtatgctaccattactgtttgctttccaaagtaacagagccttcttttggttttcgtcagaagccatgcctttgtttgactcactgttttgggtgtcgctgcgacacttcaaagagtccctttggttctcaccatctgacagaatcttaccaaaagcataatccttgtctctttcttcaggatccaaaatttccacctcttctcctccagggatctcacctttgcgaagctcctggcagcaggtcaagcacaagtcatagaaacagtgcttgcagcttctatgaaaatcaactatagaagtgctgcatctattgctgcagttgacaacaaaattggatcagatgctttctggtattatatcatagcataaagtgaacaaggaaagaacttaaccaatagacacgctcatctagatcacacacagcttgttccacctttatttgatcaactgaaacacctgtaaacaaaacaagatgagcattcatagccataccagcttccagtctgtgtgctagagaaccataccttgtatcttagcctctaattccttctctgccatctgctcctgtcgcagttctatcagccaaggacgcaacaagcgtaacacatgacaggcataacgaatctgattttctttagaaatttcctttcttggaggctgcttcacaatgaatggaatgaactattcagtaagaatactagaaagtgtcatttattaactttaaaaagaaatatgtcctgaagaaatggaaatgctgtaaagaaaagatgagatggaaatgcaaacctcttcgacacctctcattcgcaggcatgccttgcaattacaattcttgcgacaataagggcattttgcagcaaattcattttcaggcaaatcaggatacctgtccagttgaattatacaacacatgggatcaccttaaaaggttactagaggtatagtgcataaaaacatatgtaccaaggcaaacataagatgaaacaagaataataccataaaaaatgtaagcagaaaaaatgggtgttatgggactatgggtaagatgaaagcaaaatgtacatttaagcctataggaaaacagtaggctgggagtccaactagtagactagaagtttgaggaaacttggcacaccattgattaatgcatggcacacaaaagcgcttattgttgcaagtcttgcaccagaccactctccctttgtcatttctctggcattggtgacacattaaggcgttttcacctgtcaacattttcttccctttctacataattgaaacaacgaaaagttagcacacccatcaaaacagttatacaattttttttaaaaaaaaaacttatacaaagaaacgtgtagtttatgaccccattattttctgccgctcctgtgtctcctctcttacgcttcttttcagtcttcgaaaccttatcattgactaacatcttgccttttactgcatttgcgttatgctgtcgaggaaagaaagtcatgggttatttcggtatcaatatcaaagagctggggttatgtttcactttgtaaagaacacaaaagtgcaccttccaagcaagtacatgaaacctctgaaattttcatgctttgaatgacaataacatgcttaaattaagcatgtagttagttacatcgaatcataacaggtattcagacattatctaaaaagacaagaattcaagcaagcacttgcactgtcataaaaaatctatgcaaaaccagcttgcatagaatcttgaaacttcttctaaaaaaaaataatcttgaaactgaccaagttcaggagaaacataatggtgggtttatcattaagcaataaataaagcgactaaaattgacggtgaaactgcgatcttactagggagacttgataattaggcccccacaaaacaaaattaatttaaagaagagatttggcttggtcgatgaatcgcaggtagcttgagaaggtatcaggtactcgttcacaaggtagcaggtcgagtaggaaacgttcaaaagtaacgatgcaggcaaatatatagtgaactgcgtacatgtcacaaaccaaaccgttcccaaataacttgtaaaaggaacgttgagtagtttaccctgtgggttttgatgttctcttgatccactttcttttttctgggtcctctcttcttccctgcatcacgtcttttgggcttgttgagaggctcgagaagttgatcagttttctcgacatcctattggcaaaacagcaattggtcagtataactttataagttctccctcaaagagtaccaaaatccatactagatagatactccatccgtttcatattacaagtcgtttgacttttttcctagttaagtttgttcgagtttttgactaagtttatagaaaaatgtagagtactatttcaacacaaaataaacatattattaaaatatattcaatgtagatttagtgaaactaatttgacattttagatgttgttaaattgtactataaacttgatcaaacttaatcaagtttgactagggaaaaaagtgaaactaattatagtatgaaacggatggagtagataaaagcacaaacactgaaacagcaacggatagcattttggagaaagaaccgaaaaaccgtaactttctttgacgtaaataaatttaaagatatttgtagcaatcgggcgaaatgagatgagaaagcaatggtggaagaatctaggggaaaaaatcaagatgttttgggatataaagggatcggattcgaaggaataattccgtactagtatatcctataccagtactagtatttttttaatcagattcagattcgatacagaggatacacggttgctggaatggaatggaagatactcgagcggaaactgaacagacaaaacaaaatgtatattgattgattgaacacactgcgtctgcaatggctgcttgattagcaacaagaacaagctgtttgatcaacacatatgacaggacagagggggggagagagagagattccctacctcatcatcgtctggcgcgttgaaggcgttgggcggcggcttcctttccctgagcgccccgggcctcgtcgcaacaccgcgcccttcttcctccggcctcatcgccggcgggcggaaagcccggtcgccgttccggcgcctccccttggcgcccgatcccctctgcttaccactcttccgcttcgcctcctcgccggatccgtcgatcgccgccgcctccacctcctccgccgccatggcggtgcggcgatggtattgatattggggcaaaacgagagagagagagtggcggctgcggcgtaggctctcaagtgtcctccttttattacccgcgcttccaatattccaaccacagttacaaaaaggtcctccaagtttttcctttttttcgttttgctttcacaacatttgaatgcatgcccgtgctttacattgcatatccaattttccaaataatactaataccgtgcaaatgcaactggttacttatatataaatatgatggtcattaagcttcaagttttcactagtgttttccttaggaagctcttacgcacaaacacaagaagaaacgttcagggatctttcgactaactccgtgaggtggtgagcgtttttttttcttacgcacaaacacatagtatatgtacgatgttttgctaacgtatggattttcccgcgcaattttgagcgggacacaaggttttaaatgtatgaattgattgaatatacaataatagcttttgtttcgaaatatacgtagtccatattttgtatataactatatcagtcgatatctcgacggttacaatctaaatccaccgttattatttgaataggttacatttttaatatagagtatgatgattagataacagatagtaataaattttcccgcgtaaaattggtacgtgcttttttatattatattttaaggagtggattgcataatagagtactccgcgtctagaccatagccatcattctctcttttaacacctaaaaaaagcatttgttcaatgtacagttaattcaccttatttaaaatgtacagtcgtttaagcttgatcttttccctctaaaaaaatgtatatctcttgcttctgtttacgtgcattttgtattttttttacagtaacatcaatcatcaatatatatacacgtaatatggtacacacgcatagtgaaaatatttcatcttgttttgtctgattattaaaaatgctgtaaaccatggtgattatttatcacggaggggacatgtaaatgagtaactagcgaagatatactgtgtacacaatggaagcaagcaatagaaggagtttgtgatctatgtgttttgaatgtgtgattttatggctgggtttgtagagattggtcgaagcaacacctctctctctctcttatactatggccgagtttagttttaaactttttcttcaaacttctaacttttccattatgttaaaactttcttacacactaacttataatttttccgttccatcgttctaattccaatcaaactttcaattttggcgtgaactaaacacatccacgtacaaactttcaatttttccgtcacatcgttccaatttcaacaaaacttccaattttgatgtgaactaaacacaccctatgaatggaatcgggtgaagggaagggtgtgttttagttcaagctaaaattggaagtttgtttaaaattggaatgatgtgacggaaaagttggaagtttatgtgtgtagaaaagttttgatgtaatgaaaaagttggaagtttttttttttaaaaaatatggaactaaattcggccgaagtgtactcaatcatagaaacaagaaaatgtggggggaccttgtgtaaaaaaacaggtactagtagtatgtcatgtcctcctcgagacgcgcacaggcaggcaggcaaaacaggcggccgcaccccgttcacttccttctttctggctgctgcagccgtaccaacgcacacacgcaccgcacctcctccagcgcgcgggcaccggactagtaggaggagtagccttcgaattttgaaatttgaaccctcaaccatttggagggaagctggaaaggaaaggaatccatcccatccacgagtcaattcaaggtttgaccacactctttccgttcccctcccaaaggcgtattttccctcgatacgtctcctttcttccccaccaccaccagaccagagacagggggagagatggtgtggctgcagtacaccgccacccgctcccagcgcgccgccaccgcctgcttcttcctcaccggcgtcgccctcatcctcgccgccgcccgcctctcctacgccaacatcgagccccagcgcgccaaggccgccgaccgacgccgtgtcctcgaggacttcatccgccgcaagcgcaaccacgccctggacctggaggatccccctcctaaaccctagctccacctgcctcctccttcttccttcatcccaggttccccgtcagattcctcactctgctgctctaatctaatcttgtaccatgtggattggatgcaactccacctagacctagcaaggaataaatagcatagggatttctattttacttactcactcactgctgtatgcatcactcttttgcctaaattacatcaataatattaatatatcgattggtttattcattcagtggtgattattcctgcaattcacttcttacgtccatcaaacgtttgttactcttactaacttttattttcattaatttcttccgcgaatgccgtctctaattcttgcaatccaacctttcctactcacaattacaacagcatgcgaatgaatctcgatcaagggatcctaccactgttttctacttcatgtactattcattccattttttgttttccccctttaatttctttacctctccttcagccttgtcaattgcaattcaggtattgccaatctaatggacaaaattacccccaaggagtttgtcataaccacatctacttcttttaactccactaaacccattgggacacctctgggtttgctaccaatgctactcatcatgctgcctatatgtgatatctcatcactgctaatcaacaactgaactgacaagattatctgcctacatatgtcaagaattactgcaacttgataagaatatttttgtacaactaggaacccttatgcctgtataatctccacctatgctactgatttccctcactgctgtatgactcactacatttcctaaatgtcatcataatacattatttgattcatcggctgtttcccaattcacatgcatcgcacattttcgattgggctatcttcttttgttttcgtacttgatagaaccatgctcctgttttcagtcttacaatctgcgtatctctcctccacctgtcagtttattttgcaaatctcacaatctgcgtatccctcctccagctgtcagttttttttcaatgcaaccattttttccaaaggataggaaacaaataatcaagagaacctacttttgtcttctattctttctg

SEQ ID NO: 27193 - DNA, 623 bp, Oryza sativa
gtgcagcatgggtcaaacagttgagttgatgacgatcagtgaagtgaggatgatgagtcaagcgcagctgttgtgggtaggtacctgaacgtcctccacggcggcgcggaggtcggaagagtccttgacggccttgaggtggtcgacggtgccccagacgacctcgaggctgtcgacgatccgctcgagcgactcgaccaagcttccccaggtgggctgcacgcccttctcgaggtcggtgagctcgccctcctgcatgcaacaaggaatggtcgggtcagatcggaaattaaatttgcgggaaggaagctggtggatccagggcagggcaggggacgtacgaggcgggcgaggagcgtgcggacagcggggcggacgtggatgggctcgacgcggtcgaagggcgggaagtcgaagtcggcgaggagcgggttgtcgtcggtggccatggaggaggaggcgtaagccgcggaacaagtggcgggcgaggggcggcgggaggcggggcacaaggcgctaataggggaagaggccgggaggaggaggaaggccctagacctagacctagaggtatatgaggaggaggtagggtttgggaggcgagctcgagcgacaagtgggag

SEQ ID NO: 27194 - DNA, 21496 bp, Oryza sativa
cagttatgtttctaggagaaaagtgcttaatacgatgacatttccggtaagttgggttcgtcaatggcattttcttggattggagcgcttgtcgataatattttcttacaattttttaaagaagacaatatttatcaaaaaaaattgaattgttcttaaaatatgttcaaatttgatgtggttactgcatgattcccgttactttaccctgagacaatgtttggctaatgggaaatggaaatgatttcccacccatcaaaaaatatctttaaatcctaaccattcattctccctctttcatttaattataacccttcatttattttccaattataatcccacctccccattttccattatccaaacaaactgttctcaagatacaaccatgaacgctaatttagcacgcatgggagccgtcaggacaatataacagcatgtcagcatctctcaatttgcaatttgccaaagaagaagaatcttttattcattataactaacttgcaaatgaaaaggagaacaagggagagtagtgctagctaagctagtgcctagtagtagtggttaggagttgtggatctgttagagaattaatcatcgatgtacatcaattatattgttccgggcaaaaacctttctttctgatcttcgtcttgttgtcgttattcctgactggcttggattaattgtgcgattgctactcctcttatatgattggtcagtataattggttaggactcgtgattattccagctgctacaacgcagcatctcatttcatttcatgatgacgcggttgcaaaggcgcgacacatcagacgggcgaaccggtttgatcaaaaagtcttcagccccctcctccaggcaccgccggattctcgtcggcgaattctccgacgacattagcaccaccggaatctccttcagctccgccgactcctgccatgcacaatccaatccaatcttcagttgctactacaacatccagatacagagagaggagctgagtgactgtctgaaatgctaaccttgaccctcttgaggagatcgaaccctgtcatctccggcatgcagtaatccgtgatgatcatatgcacattccgatcctgcatcataacacaaactaattttacattcatttctagcaattcttcaaaactgactgacatccacaggcatagggatcaaagaacataccaggctgagaacctccagtgctctcttgccactatccaccgtcgtaactgcatgcacaacaacaaccaaacaaaattaaaggtgactgactgcttattgttcttgatatgtacttgattgtactaaccaaccagaccaaatgagcaatcaacgacttcattctacatgaaactcaattctacacagatgacagatgacacatatatatttgctagctagtagtcatatcgatcagttaatagaaataaaatgcgcgcaattgtacctcgatatttggagctgcgcaggagtctggagatgacagtacggtcgacgatgctgtcgtccacggcgaggacgtgcggctccggctccggcactgtcttcgtcgacatgaggcagagaatggagcagagcagagtagactctctcttttggtgttcttggcgatggacaagtcgcagcctggcctttatacagtggtagttggcaaaaaactgagtaccgaccgaccacagaatatacaatggaaaaaggaaagcatttccaacaaggagaatgagaagaggatgagaaatggaggaggatgagatctaagcaaatctgcagaggccgtggtgcagcgcttgccgaagcgcctaccccctaccataccatattgtaccatgccaggcgtagctgcctgcccaaatatccatacccataatttcctattcaggctcctcattatactagtatctgtttcacatggcacaatactgctcacccgccctcatcatctataaaaaaaagacattaattacagtcaacacaagtgtgtgtgagaaattagggggtttaaataagatgcccccatgccatccatttccttctcagctagatgagtcacaccttcatatggatttcttatagctagacaagatccagatcttgagtagcatattgattgattttgtcccctatctcaaggttttggcatttcatttggctgtattgctctttgcaacaaggttcaaacatgcaaattcaaggcagaaatgtgagggaagttcagcaacggaatccatccctgtccctgtaccttagggagccttcccaacagtagatgcactaaacacccacgctacaagaccaacaaattatcaaggaccaaaacaaatattttccagcaatatatgccctaaacacccacactacatgcacgaactatccacattacagcatttttgaaggaaacattacagcatgtccaaaatgtatagggaatcttgaggataaaattatttgtgcacggcaactactactccacagtcccacccccattctaaaaataataatggcggaagaatgcattcttcaaaaactaatcaaatttcaagaacccagagattctgatatatgatgtctgacctgaggctggagagttgagaagcccctttattttatttcctgaagtcagtttctctgtatctggactgccgttcagaagcctacatccagcatagcaacgtgattggtcgcagaagaagggttgctgctgctgctgatccatcttgggagtcgtggctttttctttatgaagcagcatttccttacttcatccttcataagcgttcaagtttaagctgttcaggtataatgagctgctgctcttgagtaaacatcaggggatcacagctcagaatcataaggtcaactcaataaaaatgaaattttcagctcatgcttttgagaaacgtaagaatcaaaggccggtaatgatgcaagaatttttcatctgactctgctgcaacgtaggaaaatgtacttatccttgcgcatttggtgaaaacaaaatggatcagatatttagattcagttcagctggagatacgaggtgctgtgagagcgagacatttgcctcttccacacacctaaaaggtctagtaatattcaagaaaaacaagagttgaaaatgttatatagttagctactgaagcaataatccacagcaaaattccgggacatgtatcatgtatgtggcacagtaccactcagagctccactctgaagccatgtattgctgatctgttttaaaaaacaaattaagattaaacaattagcataacaaaacacatcttttagcagccagatggcattgtggagcacacaaggcccctcatacaggctgcactaaagaagagttcacatcaggtattaaatttgacgtgtcaatctaaaaaaatataataggtcggcatacacttaaacacgcccctacttgtgcttgaggcaatctttgatgttggtgcccttttacaatatgaaagtcaaccatgttactatgaatttgaagcatccagcatgatatgccactatcctgagcaatgacagatggatcgcaactgtgtgtcaacaattgacaaaatgcatctaatgtttttaatgcaggagatcaggaaagtaacgagagaagcctcattgtcatctagaagagaaagtagttagtagggacaattctacactcacaaggcattatttggcacatatgatcaaaatatacccccattgcatacacaaaaaggaacgaacgttcaactgcaggatagagttttatccaagggaaacgtgataatatagtatagtatctcagataggtaaaaggatactgcttgtaccttctaggacaaactgggtgaaataggatatgagatgttcgtagtgccacatattccatttcttattggcctagaacagaattgatttaaaagcacaaatcacagcagaagttgtctatttgggctactaaatgtaatacctctccgatgggattgccacaccatggatggagaactaccagagtttatcataacttggctagtcaaggattgcatcatatctgttctatactgatagctgcaggataaaaataatataaataatgagaatctcaataattcgtcctccaacagaaaacagtacaaaatattgtagagaaataaagaagaataaagaatatgacaaaagtagattagcaggatatatgatataccaaatactcaagcagattctctctcatttgtactcattacttacagggaacattatgatgtttgtgtattctacctacaaaggatacagatatctacaacttgtacaaaaaagaggcacacatgagaaacacttcaaacctatcccacctaaaagatgccaaactatgtagcagactatacatgagctaatgttagcagcatatttaccttatgcatacaatacacacacacggctccaatttttcaggaatacgcaaaaggattgtgcacctttgtattaagagaataaaacacacacaggtccaatcgaaacaagaaaaaaaaactctagaacagcgtcttatgtttcaacaagtcctatattcttgatgacaaaattcaagaactccacataagcaacttaatccaatgatgaattcatatttttcatcgccagattatgctctccacaattatcataccacaccactctgtagaaaaaattccacatgttggactatttaccctcgccctctggctacacgaaacttgcaacagcaatccttgctcaattttttttgttgttgcagttttccagatagttgaaactttgaacacaaaacgaaaccagtcctgcggtaagctttcagatgttcttacgaggctgttcagtagctgactgttctaaaaagtatgcagccataccatttggtccttttttagtattaataacagctgatgagggtagaggagcattaagagaatcgataacatcgtcaacaagttcagtgtactgtgtgtcagttagctcagacatagtaccgctcccagtgccactactgattgtgaatacttgtttcctttgccgaagccctgctgctcgtgccacttcaaaatcattgcttactcccattgatgaatccctccaagaagcatcttgtgcatatagttttagagaaggcgttggtgcaagagaaggtgtaattccagctaccttcggagggtcaatgggactattctgttgccagaaatcatatcaaggcagtaagtacagttccgataccttgtaacaccagatttaaataagtcacagaactcaccttagtaaagaagatagaagttcaaagcaacatctgagggaatgtgactcacctcatggtcctcatccaagtcttctaaatcctctttcacatcgtccaatctactgtcttttgcttccttatccatccgatgccaatcaggtaattcagagcccttgggggaaactgaagagcaagtgccattggttagtaaagatacatattctattttcccaaattaagtgataatgtattaatgtgcaatcaaattaagccataatgtcagattattgaaataagaaatattgtgctatccccttggtctttttcccactgtgtagtactattactgctttcaatagaattattttaagttccattttagaaagttcacccaacagacactcacctttatttccaacatctatagacagttcttggacagcctctgtaatgttgagttcagaatgagaagaagaagagcatctggtattatcatggcttttttcagcttcagtgccattatccacaaagaggggcatccctgccaaacgaacagcaacttctggtccatcctgatactgtggctcagaaaatcctttgtcaaaattttcagtggctatggggcaattatcatttggagcatatggaagcgatcctggcttgttcagaaaactttcagtgtacttgacatcctccgtaattatggctgcctgctctgaattataggcaatttcatttaatgtttcgttttccctttcttcaccagcgggaatcatatcaaaactatgaacatcaaccattagaggatcagttgatccttttccagatgatcttacagcttcctctgtgcagttatatgaagcagacctatttgaagagatttcaggagtcaaagtctcctcaaaactaaaattttcgtcatctgtctcaactgattctccacgggctgcttcaggagtttctatcaaactacattcaggcccagatgacatggatcttgagtagtacggatgatccgttgaatattttgactcatctaaaagattgcaagcccctgagaaacttgagatgcttccatctcttgggtctgacggtgttttgttggtatcctgtagatctgcaaccatggattctccagcaacgtagcatgtagacttctcagcaatatcaaccttatttcgagaaatgggagtcattgtatgttcatcttgtagcttgaatgagcctttttgaagccctaagagatttctgttgatctgtgtgttatgaaaaacaaatgatgaattatttgaatcagcaatgttgccatcatctagagatattaaagtcccctcaatgctgaagataccatcatgaagcctatcagatgataatttctcttcaacttgaagaatgtctgaaatactagcatctggaatatcttgagaccccaaattggtaaaatgatctttagaattgtcatcctggagagccatgtaaagattctcaaaacataaagcggtttcttctccttgttgatttccttgctgaccgcttcctaaacatccagtcaaattgacatctgcagagaacaatgatgaagttgtcttgtatgggttattttcagccttggaattctgaactgtatgaacagatgaaaaagacggtaagtccaagtaatcatctgattttcccatgtcattgcctgtgtctggagttacgaaagcattaacaacattggatgaaacttcatgtagtaaaccatctattgattccccagcaacttcaagagtttctatcatgttggtctctggaataaattcaacagacctgttgtttccataattttctgtactattcacactttgaaacatcatggtgttcttatcatccaagttgaaattttgattgttccctggttcagccaatgcgccacctccggtagcatgcattatgttaacctctgaaacacatgaggatgacctggaatagagtgaatatttttcagaatttatgctctcttctggagatacaaaacttccctctacaccaagagtaagtccctgtattgtttcagatggaacttgtttgccatcatgaaacgatcgaatctcatgtctgtctgaaatacattgagaagatccagtgttattcgtccaattttcagctcttgtaacctcatctagaaagataggattatctaaaaaagcagaagtttttccatcttcagactcagaaaatctgccctgaacagaagagggtgcattgtcttctgcagcactggcacgtaaaaggtaagaactcgagctgcttgaataaaatacatcattattgatctcacctgaagataataaaatcccttcaaaattacaagttatttggtctagctgattagaaaatgcttcctgagttttctcctggccaccttgaatttttttcctcacgttggtgtctggaacaaaatgtgcagggttactatcatcacatgaagggttaacagcagcctttatagggttaaatggcccttcatcttgcgattcagacaaacttttcttgacagcttcatgagcttcagtaatggttgtctctactccattgcataaaaaaaatcggatgtagctaacgagtgttcagaaatatcaactacaggtggatccataaaatcttccttctccaaatcaaaaggtagactgttcggctcctttaagtgcaagtcatacgataattcctcctttgagacctcatcgctatctgtgagtagctctccagatgttgggttgttcaattcgggattaactgcaacaatcctaggaatttccatcatattggcatcttgacagcataaagggaaacctgaagttttcatgtactgttcagtggtactgactgcaagcggacccagcagagcttcctcctctgaacagatgaatacatcatttccttcctgcccgttaaatccacatggttctttttcccaggtatcctcatcacccttcatcgctaactctgcagaggatgaaaatctcacctcaggatcctcaaattcctcgcaatgcgactcttgaaatgctggaaggttcaatctaggactgacccctgtatcaatgtctgcaacagctgcaatgatgtttgcatcagtacagatgcaagcaagtgcattggtaacctcatcaggattaattatcacttcattgtcatcaatggcatgtgaagtagggaccttctctggagtgacagtatctgtttgcagcgctgtcaatttgtgtggctcaagcaatgagtcctccttgccaccctctggaggaacctgttcaaagttttctaatgcagatagcactggatcagatggatcctggctcacatcatttaagctaccataagcaacaatgtagtcagatggagaagcgggaggttcattaatagaaactggataggattccagtttttctggttgagatggtgagctttcctcactgactttgacaggcatttctctgaagacagtcattaaggatgacatcccatgttcagttaagcatgagtcacctctatcaaaagaactgtcatgagagttaactggacatatgagattctccttgcaggagctgaaattagtgttcacgatgtccaataatctatcaaaaactttgtcttcaccacctcctacaggcgattcgtgatgaatagttggaggttcagttaacttgacaaatataacaggtccagaatggttcctgtaatccagaggagagaaaacagtatcttcaataggatcatgggcaccaccttgctgatctaaatgtgtggaggcagctggtacttcttcatttccatctctcagaaggattccaggataccctatcaatggtgctgaactgccacaaatcggttttatgttgtttgattgacttatagaggaatcacttaattcaggaaactccttgccgcagatggaacctgcgacactagatgacattgtattctgtgtatcttcctcgatgctttcggtagcaatgcttgttgttctatatgttttctcacttgagaatctcctcttccgtaggccatccaagggcatcggctggaagtccttactatgaccccaagacatgtctgcttcaccatcaccccttgagctaatacttggctggcggcgtttcttaggtttagaagttctgttctctgaatgagttgctggcagaaaagtactatttgaatcagttgccggcaaagaattactggcatcatctacatcgccacagttctgcttctgcaccaacaaacaaagagcaataatgttgagcaaagcagaacaaaaatggccaaagaaaagaaggaaacaataaccaaatcacataaatgtaaagaactacatcatttgcaggttaagcttatatgcagagaattagaatgaaggaaacaaacagacctgtgcactgatcaggtcgttctggttaggcttccttggctcaccatcatttgcctgcttctgctcctgaatccttttaagccttctatggtccttgagatcaactgcaaagcaagatgagatgtaaccacttgagagatattctagcaatgcactgtgaggatacacaaagaattccacatatatttggtagcaagtgcggagctttaacagtatgaagacattggtgctcaagcttgccaaatgttagcaacagtctgaagagatagagtcacagagacaagaaaggtggcgaagaaggatgttacgcacgtcttctggtgaagcggatgaaagcggcatagatgagtgtagctagagcagggatgacaagaacaggcagagcttggatgggctgcctccagctcaaattgcgcctcctggccctccagaaagcataaacgaacaccaggacctggcgatcaatttaagcaagaaaagataagaggaaaaactgaagtttttcaattcagaagtaaccaaaatcacatgatacatcaattgagattaaaaaaaagaagaagaaaaaagactatccagccaacgttggaggcgacttgcgtgatcgatcatcagcatccgcgagtagcaaggaaaaataaatcgattggtggtgtggctagcgcgcgcataaaagcaaacacctggagcgcgcttccgtggaaacaagtgtggtgacgtatgggggcagggcagggtcacctcacctcgaggttgaaggagaggaaggcgagcttgtgggcgagcctccgagccgccgccgctcgcctgacaaggcgcgaacgcaccaccgtttcctcgttttgaccatcgtcgtcgtctccgggcccggcggggtggtgtgcggctccagtccggcgccaagcagcgcggaggcgggaccagaccccggagaagaatccgacggagggatcatcggcggccatccctttcctcctcttggctcttgctttctctctctctcttttctgcgcactaactagtctctcgctctcgtaggacatgcacgccacgccacgcactagcagaggcagaggcagaggcagaggcagaggagaggctttctcaactcattttttcgactcttttcctatagaaatcattcttgtgtgcagttagctaatggttctttaattttcctctaatccaaataaaatcatatattgtgattcagacaagattttgtactcgttgttggagagtttgtgcctgccgactcatactgcgccagccaactgaatgggcttattattattattattattattattattattattattattattattattattattattattattattattattattattattattgcgtttacgttcccccgacattcatttatttttaaaaacttaaaataaccaatactcgattaattatatattcacatcgtttaacgtatcttctctttcccattatctcgaacacaagtgctgagcctttcttaatttctcaccatacatactagtactatcagtgcaagcaccctaaaccggaacctagcctataaagttgacccgaagatactcatccctacagtgcaaatacctcttttgtgtgacttaattagatgagtgtagtgtgggaggaaaccgaccctatagtgggcgtgatctcgggctgatatcgggctcgtggacacgggtagtggggcgaaataatttccccacctaccctcgactcatcttctcctagccctcccctccatcgctttctcctcctcccggtcacccttcccgtcgctcgccgtcgcctcctccccgtccggcgccagttccgcttccgctcgctgcgccgcactgctcctcctcgcctcaccgcgcctcctctcgcgtcgtgtctcgcgcggcggcggctgctactgctccgacggtggcgagttgcggcaggcagcggcacaggcccctagattcgttggcggtcgtcaggaggcgaattgcctggagaccccggagcaagccaccgccgccgcgcctcctcgcccacagtgcacgcggcagctgcgaggaggagggggagtagatccgggttctttgcggcagcggcaggttctcggtggcgggaggcgtccccggttgccgccgcggcgtcggtcaccaccactggcctcgccgccgcccggatgattttgcttcttgacttttcttgatgatttttcttctctttcaatccccaagattttcttgtcttttcttggctcggtggtgggaggaagaatggttgtggcgggagaagaatttttgtgggcacaacggggatttctcccccctcgattggtgcgaggtcacgggcggggaagaatcgcaccccacagtgctgacgcctctcccagttttggccgcgcgtggactcgtgaacatgaggttttgcgtcgccatgctaggcgacgaggtgccttccttggtcgcggtcccgccctccacgtcgacccgaatccgagctagcgcaacgagatcacgcgccagctcggtgcactgtgagatgaatctgatcatctggcgggcaaaccagtgagtcagcttgtttgaggttacctcagctccaacagtcacaagtagtcgtacggtagctaggtaggcagcaggtaggcatttttttgcattggcgggcaagtcgtagcagcgtagcttgcgactgacaaggcagaattcctccttatcatctcgctggagttggacggcgatgagcaagagggcaaagcgcgtgggcacacggcggtggtcgtgctggatgcccatggtcccaggtaggccaagctgccaggggttaccagcacgcacccccatggcgttcaactcctcagagaacgtctccggccacacgtaccggaccaccgggggcgccgtggccgtgggcaggtcgaaggcgcagaggcagcgcaggcgtgggcagaggcccagctcggggacgaacacgccgcgcccatcaatggggagctcccagtcgccctccttgcgccaccccacccccacgggtgtcgaaggagtaggccggtgtcccgctccgacacccacacgtgctcgccggcgcccatccatccccgcaacgtgccgccccagagctcgcgcggcggcgcctgagactcgtcggcttggagggaggaggagctggaaggtaggggatctcctgcaggggcggttgccgatggcgtagactccggttcccagcgggatgaggaccgtgccgcctattatctcttccggaagctccgggccaggcgacaacacgtcggcggtggcgtcgcactcgaggtcgaggaggacagtgcgcttgcggttgctgaccccaacaatggtgttggaggcgacgacggcgaagttgaggtactcgagagcgagccgccgcaacgtgtccatctgcgccatggggcggggcaagggtctcaacactgtccactcgtcgtcgtgggtgaacatgtccttgatgttaatgttgaacaagaggtaggtggtgatgcaatccatcctcttctcttcttccaccaccaaaactagagttttcctcctccccttccatcttgtgcttgtgcgctgctgctgctcatccgcctccatctttttttttctttccgaagaagatactccctgccccgcctagcctgtatcgaggaaatcttattatacacaagtggagtatgtagtccgattccgtttcgacctcgctggctgcatcacaagtcgtttcgatcctacaactgtgtcgctgtttagagtcatataggactttcttggttaggtccgatactctggttaagttgatatttctctaattgtactctcgttttatatagttttgttatgttacatctatcaactaaatagatttttcatatttctgaactgggtgatgaacgtagagcagggtatctgcatgaatattaatttctggtttgtgcaaattaggcacgatcaatcactagaagatggcacggtacatagaaaatcaaagaggaagttaattgtaggagtaaaagaagtgatgcacgaatgcatgcatcaatcacatacgatcttttttgtttgaactaggagagcatggagctcccccatttccattaatagaaacgtagaggttacagagtagcatcaagtttcaggacatcaatcacatagtaagaattaagatagaaagattcagattgttcattcagtcatcgtctccgacatggaagctcaatctggagtggcttgctgtcttggtagctgctgcttccgcacaagattctgaatcagactcctgcaggggccaagttagtattagtaaatcaggagtaagaaagaaatatgaatcattcatgagcatgcatggatatgacattgagggaggaaaagcttatcttcattaagcaaagcaaattaatagtactagtaatccattaaagacggacctgggtattgtgggtgaggaggagcttttgcatgttgtggtggcttcccctcgagtggcccatcttggccttgttcctctctgctcgaagccgatccagcttctgctggtccttggcgtcaactgcaatcgacattaactaatttgacgatcgatcattggttattgatttatgcagtggctgcctccactccatgcgcaattaaggttgagaaagaaacaaattgacgatcgatggaggaactaaggacttactgaatttgtggaagcgggcaatggcggcgaagagcaaggcagcaaaggcgggcacggacaacagcacacccagcagtagctgcttcttcttcttcgttttattcgcagcagtcttgattctcgccgtccacaacccataaacgaataatccagctgcctcaagggcgaaggaggtgaaagcaatggtgcgccggatgacgcgggcggtggcgtggcgcctctggatgctggctttgacggcggcttcctcgtccgcgaggcgccgctgctcgtcggcgtcatcgccgagcttccaccacacgcccgagaaggaccccgtgcggggcagctgccgcgccatgatcgatcaggccggtgctacgtacgtactaccttcgatgttcgatcgatcgatcaatttcttcttctttcgatgtgaatgcgatgccctcccattgagaggcgactatctagcttgctagcggatcagtagcttttcatatttatcaaaacgcaaccccaagttgacgatcgatttcttttttcccgttttctctgtatataatgtaatatgtgtgtgtgactggcatacatctcatactgacaccagccaaaatcactagattaatatgatccatataatactcttatttgacagtaagaagaatgatcgtgccaggtcgattgcagtgcagattttgacgccgaccaactccaattaaatcagacaaactagtactccttcctaccactacatgcatgccgcagcatcatcatgcttgcgtttcgtgttactctctctagttgttagtgctgaccgttgacaaattgttggaaaagttcactgtagatccctcacggtaacggtcaagtttaaatcttatctctcaaccgtaaaaccaggtactggtttgatttggtccatattccacgtgaagttatgagcaaaacaaaaattaaaaaaatataggctcatatgtgaactacacaaaaagatttaaaaataaagggcctcatatgtcagtgtttcattaaggaaatagctatacatatgataaaattggtacgattttgttacgatcctgtcttgtatgcgtacgattagaccatgaaaacatgttggaagcatcgtacgttgatcgtaagagattttatcgtacgtatagcattggtcgtttcccaagtcctccatctcaccctctctctcccctctctgtctctcatcaaatgtcgccagcgacaaacctccatttttttatccccatatccctctcgacaacaaggtgataggcagcgggtagagcgagtgtgtgtggccggaggcgacccgtggagaagcgagcggacttcgacgagcgtgcagaggcgcaggtggctgcggaggagcgggcaacaacattcctctccagccaatggttggcctccttccccttctcgctccccagatgctaccggtggctaacaaaagaggagcaagacaacggtgacctcatctctgtctaagtggcttcctctccatcagcgtcaaactccctctctgtcagcattgagctcccttgtcggccgaccactgtcgccttcttgagctcactgatgcggcagcggcggatctcaagctcaagctcacgaaggagggacaccaaccacaccatcctcagcttgcctccccacaccccccgccacatccttggcatccgccttcccgcgcccgcccgctctagtgatcacgtccttgccctcatcttcgatgtcgttggccgtgtttgcctcgacctcgccggctgcgccatccttggcatctgcctccccgtgcctcgttgccaaagatcagaatagagagagaggtgctttgtgcatatggttttctttcttttatagtggggggagaccgagagagagaaaggggtagagatggttttctttcttttatatttttcatgtgattgatatgtgagtcatacactaactcaaccaggttggccatagtcaactcatcacgtcagttaaaaccagatacaatactaccctaagattttaggtactctgatatttgtaggttaagagacatactatatttgatattgcgatttaaggatgcgattcaaactcgatgacaaaatgtacctaaatttgacttattcataaattgttgggcgtggcagggcaggccctgttacaagatgggccgaccgaggaggcccgagggtttttcggtcaggacaaaaacactccactcacatcctcctcatcacaaatattttattttctgctttattttttcccctaatgaatacctgatcatccaatactttaaagacatgtactgttggatatacttgtgctttctatactcttttttatataatacctaatcccttcttcccataaaaaaccaatctagtgttggatgtgattctttttttggacggagggagtacatcgttaatatatgacactgattagttaaaaatgataaaaaaaaaacaatcggagagagtatataatttggttagtaaaagcaaactgtaatgattatagatttgtgtttctacaacaacttggaagataaacaagcacaggatgacacataaaccagtttagctccactccggaaaaaataaaaaggacaagtttacaacaatccaaaaaagatttacagacagatccagcccagagaatcttcatctctgaacctatctaagctaggagtatctcccaatgccccacccttccctgctaaaaacctacacaagtcccaaatcaaagacccctggtatttaaaaagtgttgcctgaagaatgagtcattctttgagccaagacaaattgagtggtaactacactttttttgctgctacggtacatgaagtaaagtaacaacaagccggccagccaggcgatgatcagctgctgatcaggatgagatcagctgctgatcgatcgatcaggtgagtcctcctagctctccctgatctcgcggcacccccatgcccatctgcacctgcacggcgtctgaccaccgcgctggtgaccggtcgctgctgttcgacgacgacattgcctccgcccttgcctccctcaccatccgtagcacctccggtgtggttggccgcctcgccgggtccgccaccacgcaggccgccgcaatgctgatcagcgcaccgagcttctcctccgtgccgccagcggacgcggactccccgccggactccgtctcttcctcacgcactgcccgcacccagctcgggatgtcatcgctgtgcatctccatcaggtcctggaacggcgccttcccggtgagcagctccaggaggagcacgccgaagctgtacacgtcggacgccggcgtgaaggcatgggcggtgcgagtttccggcgctcggtataggacggacgtggaggaggcgagatcggcgtgggaggggagcagcgtgggcaccagaccgtaatcggtgaggcacgattcgaagtcggggccgaggaggacgttggagggcttgaggttgccgtgcacgatgccagccggcggcgactggtgcaggtgcaccagcccggcggcgacatcctccgcgatcttcatgcacgacgtccagtgcaggggcttccccttgctcgacgtccggctgctggaccctattgtgcatcataaatttgaatttggttaaactttattccattaacacggcatggctttttacctacaaaatggattaaaatacatgctctacatttaaaaaggatgtacacagcacagataaggcttgcaaattgcaaatgcaccatgaaacaaactttcaacaatccaaacaaaataggaaaaaaaaaactttcaacaggcatagcccgcgcttgtctgtgactgtgtgtgtgagggcatggcgctatgcagcattgtccgattgcctagtctcttgttcatacgcagaacggcagaagtatactagtagcaattatttactgcagctcagattcagatcaggaccacatgctcacaagcacttacctgcttgtctacatctgcatactgttgtccttgtgagaaggggattttgatgagagcctgaaatagaggaaagaccaagccacagtggtgctgcggggtctactgcctcagatcaagccacccattacaactttacaagaacagggataggccctgttctgtcgtgcatgaaagcatggcctttgactgcctcaactaatctgggggctttaagtttgcttgtgaatgaatgagtgactgcatgcatgcccattatggtggatggaatatttcaatgcagagtgtagtgaccaattgaccattgacccactgctttaaccaaaccaatattaggccaggtttagatggcaaaaatttttgttttggggtgccacatcggatatatggatacacatttgaacatttgaagtattaaacgttgtctaataacaaaccaaattacagattccgccaagaaactgcgagacgaatttattaagcataattaatccatcattaccaaatgtttactgtagcaccacattgtcaaatcatggcgtaattaggcttaaaagatttgtctcacaatttacacgcaaactatgtaattggtttttttgtccacatttaatactccatacatgtgtccaaacattcgatgtgatgggtgaaaagtttttgttttgggaactaaaccgggcctcagtactgctaataccaagttggtaaaaagttcagcgcatggatagaatggcagcagtacagaggaatgcatttttacttgcaagaaatgaaaactagtgcagctcagtgacacatgaacggaaccagccatgttgatgcacagttggctctgactatctgttcctattatccagagcagttagtataattaacttttcatatgatatgctctatcatttaccaccagttttccgggtcctaaaattatgccctgttttcatgggagatgttcccaagaccctatgtggcacatattggaaggttattttcttccattgaaaacaaggagcaatttttagtcaatgggctttccattctgaaaggctgaaacagaatgaggttcttcacacccatatcctcccaccagtcaaatattatacgatgttaagacaagagaaatattcaagtgaatctggttgttctatggtgatatatccatgactagagtagtaattagcatgaagatggtttaatcttaagtgtttttcacttcacgattttcccatgatcccatcaaagtcttgaaatggttttactactagagaagagaaaagggatggcacacagttatattgcgttgtacataacatacggaagtactagctgctggtactctccaaattactcactcctcctatactacatacaggcggggcttgcatgaattaaaagtggagcagtagggatctccgtggcacatggctggcttggcattcttttctagcagcagcagcagcttgttgtaaataaaaggacgggcaaggcaggcagcacgcatgtacccaaactttatggtgaagcatgaggaggaggcgaggcgtggaattgcaacaaggcaacagccaagaaaaagcccgtcctttttactctgctagcgagggaggggaggggagtaattgcaatgcacgaaagaagcatgcatcctgactgaacaactgtaagtatttgggatgaagctagctagccaacaggaaacagaaaagatgacaaccatgaaaaacatatctgtcttgtttctttggttcgtcatggatccattgatctgtaattttttttgttttgtgatcctggccttggcaggcagcgattttgtctagtgtacatgaatgcagtgatccagtggctagtagtacttaggtaggtagatcccatttctcacttgttgtgtgcattgcattgtggagtacaaggagatagcagagctaattatggagtactaacatggatgaatgaatcgtaaaaaaaaaaagacaaataataatggtaggagtagtaattaaggtgggggagaagggaggaagaagaagaagaaggttaccgtggaggagggagaagaggctgccattggggtagtaatcgtagacgaggagtcgctcctccttggcctggaagtaggccctcagcgccaccacgtttgggtggcggaggcggcccagctcctccgctcgccgcccaagctccgccgcccccgccgccggctcccgcatgcgcttcaccgtgacgatgaacccggtctccatcaccgccttgtacgtgctgcccacctccccgcgccccagcgtctccgccgacgcccgcagcagctcctccaggctgtacatctccgccacgccgccgcagaacaccagcttcccgatcccctccctctcccacgagaactcacgaccccccctcctctccgatgccaccgacgccgacgccgacgccgacgcattgatctcctcccgaggctgagcctgcggctgctgctgctgctgctcttcttcctcctctggcattgctcccttatccacgtcgccggccacgcgcttgttcctcccgcgccgcgacgccatcaccgccgccgccaccaggattcccagtaccaccacacccgccaccgtcgcgccggccacgatgcccgcgttcttcgcgcggcggctcctgttggagcgtggcggggggagcggcgtgaatgcggccgcggccgccggcgcggtcggagcggcgcattggatgcgcagcggtgggccgcagaggtcggcattggcgaggaaggacgatgcgttgaatttggtggcgaggacggaggggatctcgccggagaggcggttggcggagacgttgagcagccggagcgtgggctgcggcagcggagggaggatcccgttgaggcggttgtcgtcaaggaggagcgaggtaacccgcgggagcgtggtaaggaaggtggggatttccccatgaaggaggttgaagaagaggacaaggacggtggcccggtgaagaagggcaagggtgggcggaatccggccctgaagccggttgccggagaggtagagcagcttaaggttaggaaggccgccgggaagggcgtcggggatggggccggtaagggcgttggacttgaggctgaggacgcgcagctcggagagcggggcg

SEQ ID NO: 27195 - DNA, 7292 bp, Oryza sativa
ggtgtcgcggcgccaggggaggcggtcggagccgtcgagggctgtcttgagggcgatcagcgcgtccgcgtcgaaggcggcgccaaggtgagagtgagacgaccacatgaagaagaggaggaagaggaagaagaggcatggcgatggcggggtgggcatggtggtggaatgaggagagctagggggcaccccgcgcgccccgtttgattaagtcctcactactgtactgtagtacttcactagctgctgctgctgctgctacagtttgtttctgcggcaatggacatgggcacatacataccacttccacttcttcttcttccctctctctctctctctctctctctctcgctctgataagagctaaacttaattaattgggaggggaaagcttaactaacaaagggaagcgggggacgggtgcgggtttaaatgctggagctcgcgttgcggtcgccatggccacgctgctctggagcacgtgaaggaactgagcaccgaggagaggagaagactagggaagaagggaaaagatgcaggtaactgggcctttaattgttagttgggcctgggcccttcccctggctgctctgtttactaaaagtcccacaacagaacacaggacatcgatttactaaccaacacacactgttatgtttattatgtgtctttactactgtactatctcctttttaattatattttctaaaaaaaattaacactataactatattacttataaaatagtacttcctccgtcccaaaatatagatacctagtacatgatgggatgtccagatttatatcactaggtaatatcccatcctatactagttagctacattttgaaattgcagaagtatctttttacgacaaacttactaacacgatgacttgtatgatttaacaatttaggccatttccaatccaagacattagacatagtttccataagctccacatcattaagaaactagtactagacactactcttccaatacaaacatcactattacatacttaaatttaatgctacttatctcatatgatgtcttggatgttgtgtacaaaccatgtctcatgcaaaatatggtttccttctattttctcatttattcacttgccatatcaattttcattctaggtggcaacttatttaatgttatggacaccatcctaatcattgggttaggaatggccttagagcaagtataatagtgagctataagcctactataaacttagggaggagagaggtagtgaaaaatcaagggtgttggctcttatgcaagagctagcttatcacaagatccaagacaaatacattaaatgcataattaagagatagagagaggagaagaaaatattgtagccaaccttatagctaatctattatatatattggctttaagatgggctaataataggaagtgagctctaccattatccttactcttagagcaagtgcaacaagaataaatgaatcagcttctacttaagggcatgttcactttatgccattttcaactttaccaaattttagcattaccaaaattttggtaacttcttatatagttactaaaatttgacagcaaactaaatgtagtcacttttttttaacaattttaccaaatttgataagtttgaaaatgacaacaaagtgaacagcccctaagtatgccaaaggaatgtagctcaactgtttcgacaacggggtttaagcgttagacttcgcatttatgctcaggtttacagctattttttaagtgatgatggacataccagccaacgtttctagagtgggtacttgtgcgtttgaatagcatttgtataggtaaaagttatatttaagttttttacttactagtacaatttagtaacaattttatttatattaagtaccatatttactccatccgttctataatattatttatttatataatattatttatttatattactatattatggaagagagggagtgctagtataatagtataatacggagtgactacagtggaatatactactactccatagtcaaagatatgcctgcatactcgtttcctcggggttctccaaagcctggcattaatttctgtgcttctgtcctcctgtgctccactccaggtctccagtactcccagtggagtattgaccgaccaccaccaccaccaccccatcccctcccctgcactcggtgctggagtaggagattcttctcgtgagtttattttcacctccgagcaaggttagccaatagtatgacaacgtatcctatgcacacactacctatgaatctatgatgcactcatgcactcagccaccgtagacccttcgattccaatccaacagatacaaatctaggtgcggcatttttgcagaaaaccgcccgcattattcacccaaatttacaggtaaacccctcgcttgctttcctcttctctagttcaaccttctccccagatcgatccccaattctctcgaggtaggactgggcgacggcagcatccccaatcgccccgttgatgcacgcgctgccttcttgttgaggtgcctgcatcatggccaccgacggttgcgtatccatccacacacagctgaatgttgagatggcctagctcaagcagggtcacggcccggctgacctccaagcagtgaccttgccgatggaggaggagaccagtgtccaatcgatgacaaaaacaagaagagaaattgatccagatcacaattcaattttcagcaatatttcactgtcaccagtgttttgcaatttctgtaagagagggaacagtctaacaatatcaatatattttacaccagatgctatattgacatctgaatccatgacaatagcacaaaacgactgttcgcagccagttaacacaaaacgccgcacctcaaattatgtataagacttgaatggagaaatcaaaacaaaatcttttgcattcagttaacagcaaagaagaaaaagagaaccataagccatcgattcatcctaattgatcatccttgacccaatcaaacatcgtgtgctaatgacctgaagagaaacaccctaaatgcgctgcatgccgtcagcgcgagccccgccgttgtgacgaccaccaccaccacgcctatatagctggcaaaaccaggccacgagcagagaacaaccatgtggctgcgagatacagcgcttggacagggcgccggacggccaccgcttgctcaccagcctcgataggaggacgcgcatgtaggcgagggcgattggagatgccaccgtcgcccagcacgaagaggattggggatcgatctggggagaagaatgaacaagagaggagaaaagcaagcgagggggttacctgtaaatttaggtgtaggatgcgggcggttttctgcaaaaatgctcacctaagatttgtatccgttggatagaaatcggagggtctatggaggctgagtgcatgagtgcatcataggtagcgtgtgcataggatatgttgcctaatagtatagccgattattagctccaatttatttatagttaatctaataaccaatcatataataattgtttactacactattagtatatggtcccacctgttatatacacattgcgtcttggagtctgtgctgcagctggctacaaatatgtagcccgttgttattctctctcatcttttatctcattaaaatattttcgtagctggctaataatttgctattgtacctgctctcagcccaccagctttcaaaagatttcatcctaatagtatcgtttggttatttacctgcagaagtattagcggaagtacaacaatcaacagactatagttggctctacgtccacgtaatgctaccttgtaatttttatccatattcactgcattagaaactatcacaaagagtacataaaaggggaagatacaaaattcattggctgccggatagatgaaagtcgtgcataggtatagtaagtgactgtttgacacacctcgagctccagctccacttcttctagagctagagcccagctagacagttttagcttcacctataaatggaagtgaagctctctcataaaatgaactaaatatgtaaagttaggtttaggtagcttcacaactttattttagacataatttttggagttaaatttaggagttctaccaacggatcccaagtaacaaatgattgctgattaatgtacaagctaggcttttgatgggatggattgtcttgtatggatatgtaggaaagggtgctcctagatgtgtgtgtttgggggtggtttaactctgaaagcttaatacttcctctgtttcacaatgtaagactttccagcattgcccatatacatgaatctagacacatgtatgtggacaatgctagaaagtcttacatcgtgaaacggaggaagtaagatttatcattgtggctgctaaaataaatcaattggtaaagatatactatgagcaaagtatcaaataaaataatctatgttagatttaaatttactactctctctatcataaaatataacattttttattgaatgggacacatcgtagtacaataaatttgaataggagtatatccagattcgttgtactaggatatgtctcatccagtacaaggctggtatattttgggacggagggagcactctactacaaccacacagctagtagtagtagtatgtatggtaacggtgcccgtcaccgtcagccaaaactcgactgcacagtaagcagcaggcagtccactgtgtgaaaatcggcccactaggcacatgtcggcccgtcatcgatgcacgaagaataggcccttcaggcccgtttactattatttttcacttctctctgccttccttgtcctcggctcttgctgacaaaacactggatctggaccaatacttctcttactttataagtttagattagatagtttcattagaatcctataattagaaaatctaataattctaaattgttaggcacgtgttatctatatatatacagttggaagtaagattattaaaagcagccagacaaactattctattaaagctgcgggtaaaccttttattcaaaaaaacatactacctccgtcccaaaataattgtatttctaggattcaaattttgtcccaaaataatagcaattctagagtactaattaccccatcaatcatctcttattcaaatttctctctattttaccctcaaccatcttcctagtattaaaagggagcattgatgccgaataagtggcaacaatttagtagtactccacagcacacaattattagtggagtagtattctacactgagcactggctccatttatggtgctatgccttgtacactgtgctatgtctatttaggtcgtgtttagttcacaaaagtagtttggttgaaattaaaatgatgtgacggaaaagttggaagcttgtgtgtgtaggaaagttttgatgggatggaaaagttggaagtttaaagaaaaattttgcaactaaacacggccttagctttgaaatgtagtgataactatttttataaatcaaattgagtattactacttgatacggagtacgtctcttgatataattattcaagttaatataattattcgagagaatatctattttggtcacttgggttccagtaaagagtgcattcttgatgatgcgtgattgatgaaatcgagcttatggcaattattcgagaacatagacgataaagttgatgggttaagaaatgctaatgaagaaagtttttacaaaattattgtaagagcttaaaaaacatgcctatgatatcacgtgattcataagtataaaaaattcaccgctttagttcatgttatatcaaacacacccttcgtatctagtaccgctctaatgcaagtgtgtgcgcgcatagcccgtgtagacacgtacgcacgtgcgcatttctcctttcaacccaagtttttggtttatgagctacatgcaactcatcaacctaacaccttactattttcttattaagattcagattttatctcagttccgattagcacacttttcaaactactaaacggtacgtttcgtgtgataactttataaacagaagttactttaaaatatcaaatatatacatttgtcaagtttataataattaaaacttaattaatcatgtgctagtggcttctcgttttacgtgcgcaaacttcatattcgttttcatcagttttaaacaccacatatagaatttttgtatgcataaaacttttatataaaaactttatacctgtagggaaactatatacatatacatatacatgaaatatatataaactttatacataaataatattaaagtgtaaatatttttacatagaaatatttaaatgaaaaaggtcagaaggcaaaaggagcatattttgggccgcaagcacgcatgcaactatttggatttagtaaaaaaaccacacgatgtgaggtgtaaaatggaatgttgacccgattcgaaaacaaattaggcaaaaatagaaaggcacgacgcgcattagcattttcaccgtatttgtcatttgtttcaaaggcaaaaaaataaatgctcaacatcaaatatggagattatatataaaaatgaaattataccctcaaatatgtcatggaaaaactaaaaggctagcgaaagttgtacccagacagctgctacataagctaaaccaaattcatagtatcatagtagatttttcaaaaataaaaagagaatatttttcctttcctttctttttttatgtttgaaagagggtgggcatagtaataccttttctttttgagaaaaccaaaataattttgatggcaacgatgggtattgggcgtgtttgcccccatataacacgatctcgatgactattttgattgaaagaatgagcttggaggatctatttgaacaaatggcctcaagtcgaaattagaaggagcactccttttatcccgattatagatcatgttttttttaaaaaaaaatctttatgtgtaaattttctagagtactttttttaaaaataactcttcaacttagtacaatagttaatacatttgttgatatatatataaaaaatcagataatccaccattcagttgaaaatggctaaagtctaaaatggcaattttatgtaaaagtagttgtttttatggaatgcattaataatgccacctgcaagttaaaattaaaataaaagaaacatagttagggacatttgagaaaaaacattgcatgtattaaagtaggagaatga

SEQ ID NO: 27196 - DNA, 5418 bp, Oryza sativa
aataagcaggtaacctgttgatgacgcctaaacagttggtgcttggtgcctggtaaagaggaggaagaagaagaagaaagaagaggaaggggacaccacaccacaggtagcactcaaggagaggagaggagaggcgaggcataaggaggcagaaggaggaagaggcggcagcagcatcggcgggaggctggctccggcgcgagcacaagctggctaccccacgcttcttccaccacctcagcacctccgcggggcttgcagccgcgggggtctccgtctcctacccaccgcccctgccccccactccgcccagtgcggcgcccacggcgcccgacatgggcgccggcggcgccgccaagcagatcgtcgactcgctcctcgcccgcttcctcccgctcgcccgccgccgcatcgagaccgcgcaggcacaggtaactcctctcctctctcctctcgcctcgcctcgcccggaattccatcaccagattggggcctgcctcttccctccctcacggataaacaacgggatcgggacggactcacctccttccttcctagggttcaccccccttccagatcgcccttccggttccggctccacactctgatttgttttatttctttccttcaccctcttcatctcactggagccccaattcactcctcgaattggatcgattgcaggtgcaccacctcttccaaccgcttaggcctagggatttcccccataccctatgttcaaagtacaattgctctatgctgccgcttctatcagtgctccaaatcattgccatcccaccattgttattactgctacttccttctctatgaaactgcctcctcatgcgtgtccatttgaatttgatttgcttgtgctgcgacatgcccacattgttgaaaaatgctcaaaatcgtactccacctttgatggtctcgttactttcacatgtgtgctccacctataatactgggtcatgtttccaagagcacgatgatgtttctctcaatactacttagctcaactgcatggaggaacctttctacctagacattctcttgttttcttgaggcattattattttacctgccagatgaacaacttcaaaattgattactagcttatatcatcagggcaaatgttattactattacagaaaatacatctgacactaaatttctttatttttgaaaatgcataggatgggcaatacctccgtccatctgatccaagctatgagcaagtattggattcacttgccatggttgctaggcacacacctttgcctcttttggaagctcttcttcggtggagggaaaggtatgcttattcaccttgactttgaaagctctagccctatcccttaatgcttccccgaaatcattattgaacaatgcaaatatgcaatgagttctctgcactcccttatttattactgaactactgttcttcactgtcgcacagtgaatcaccaaaaggcgcacatgacgcatcaacgttccaaaagaaggtttgtcgttgattgcccttgccctctccttttcaagaaccacttcattttcgattgtaactaactattaagcagcatcagacaggcattcttgcacatataatttctctattatttcatagttgcaaatagttgccagcagggtatttgatccctgatctctcaaaacttttactcccatagtattttcatttgcgtactctcgtctaaaaatcctcatgtctgttttctgaccccttatccagcttgctgtcgagtgcatattctgttcagcctgcattcgttttgctgagtattgcccacaagagggaataacaggttgttataatattatattttgacttatttgcacggctactttctgatgggttggctaactagctgttttattttatctagagaaactttggattggcctggaaaattttgtatttgattggctaattaatgcagacaggtgaggcattactgccttttttttacttaggttttctcacatgataaataaaacacatccacgcctgtggtgcatcttaaatttgtttatctttggctttgcatatcatcaaaacagcacatcatgtgcaataaatatttgctttcttgtttctttcagcttgtgccaaattttgcgaaccttgtcattatgttagattttgtttcttgattgccaggaaaaaaagactttatattctttagaagttgagtttcttaccaacttctttactttctgcagggttgttagccaagtagagtatccctcgttggttgatttgcgaggtctcctcttagatcttgttgcccaacttttgggagctttatctcgtatcaggtatgctctatatttacatggaacatggataaggggtgtgtgcgaaggagggaggccatgtaaaaactgtcgcaatattatgtggcctttttttttcttgacaaggaaactgcaggggaggcccctgcagtttaattatatataatatattgaaggaaaggtttaaataaaagacatatgtgacctctttgtccatgttacttcaaattagggagggaaggaggccatgtaaaagctgctgcactgttatatgacctctttgtctatgttacttaaaattctgatgattcatacaggtttagttctgtgacggaaaggtttttcatggagcttaatagtcggcgtaatgatgcgcctctttctagaagtgattcactcagcattattaatgggatgcgctaccttaaattgggggtacgatacaaagatcgctttattattttaattttctgtgccagttcatagtgagttgacaagtatttaaagtgcatggcaatgacaatctgatttatcttggcatgctgtcttacaaaattccaaatgttctatcaggtagtatggtaccactaccatgcttcagttacaagtccactttcactggccaaaacatgctctgatattagcactttgatgaatctgaatcatccaaagtttttacttgtgtaccactgtacatagaatcccaaaagtaccttttgatttgcagaattttaattttgttaagaaaaacatatctacatacacaagaagtaacttaactgatactctattcactccatcatctttgaaccaatgtacataacaatgccattcagtttgaattgtagttattacatacttaagaatttactttttcaggtgaagacagagggtggactgaatgcctcggtttctttcattgcaaaagcaaatcctctaaatcgtcctcccaacaaaagaaagagtgaactgcaacatgctttgtgcaacatgctctcaagtatactggccccgcttgctgagggaggcaaacatcattggcctcctctgggtgtagaacctgcattgtcactttggtatgatgctgttgctcgaataagaggcgcgctcatgtattggatggataagcagagcaaacatattgcagtaagtcgaggatttgaaatttaatgttatacattttttggcatttgtacaaaatattgtatgccttgattattttttttgttattgaataactagcacatactttatttacttctttatttgttagcgagcatgagatattaatgatgctggactgggaattcggaaattgatctgtcaaattgagattctaatggaattttctgattttatgctttgtagttgaataaggcaataaacttcactttctatcttatcatcttggtgactgtattatttccttttttagacatcattaattactgatgccttgtgcaattttaatatttagtgctgaatcttcatcacaggttggatttccacttgtaactcttctactttgccttggtgattcccatacgttcaacactcacttttctcaacatatggagatcttgtataagtatctcaaggtgattttttgtgcgcacatttgatcatatcaaaggcctatcatatttcaccacctaatattcttttaaatgctgtactcattgtactgattgtaaaccatgatcctgatttctgaaacttatattcttcctttgtgctgcatgaagcctaatgatgcttaattgcttattacgcaggacaagaatcaccgatcaatggcattagattgtcttcacaggctagtgaaattttacttaaatgtttatgcagattaccagcctagaaatcacgtgtgggactgtttagatagtgtgacctctcaattgctgaccgttttgaagaagggcttgctgacacaagatgtccagcatgataaacttgttgagttttgtgtgaccttagctgagagcaactgggattttgcaatgaatcatatgatcctcgagttgttaaaaccagatagtttaagtgaagcaaaggttgttggtcttagggctttgcttgagatagttgtgtctccatctaacaaacaaattggattggatgtcttccaaggtaacacggttttatgaactgttccattctgtttaatcttaaatattttctgaaaatattgtaatcagtatttttactctttaatttcagaatatggtattgggcattatattccaaaagtaaagtcggcgattgagtcgattttacgatcttgtaacaaggcatatagcttagcccttcttacatcatcgaaagctactataggtatgctgctacttctcattgtacaaggaaatattcaaattattttctattacttttgtcaatttattttcattcatctttggaaactatcgatacttaaaattgtgtcacgtgatgcaaatactcattcaactttctattttcccctttatttcattatttctaacattggtattttcagataatgtaacaaaggataaatctcagggatcactcttcagatctgtgctgaaatgtataccatacttaatagaagaggtgggacgtaatgataaaatgaccgagattatacctcagcatggtataagtattgaccctggtgttcgtgaagaagcagtgcaagtgttgaacaggattgtacgatgcttgccgaatcgtcgctttgctgtattgaaaggaatggccaactttatcctaaaacttcctgatgagttccctcttttgattcaaacatcactgggacgattagtagagctcatgcgcttgtggagagtatgcctatctgaggaacttttggcaaaagacatgcaaaatgttaagcgttctagtctaggaggcgatgcactacagaggtctccttttcatagatccagggatgtatctgaattccgtgcctcggaaatggatgcagttggtcttgtctttctcagctctgctgatgttcaaataaggcttactgctttggagttattgcgatgtgttcgagcgctaaaaaatgaactcagggattactcggcaaatgaatggggtgacagcaaactg

SEQ ID NO: 27197 - DNA, 736 bp, Oryza sativa
ggaatgaacaagttctagaggtgcaaaatccctcgcctcagatgccttgtgaggctcgcgaagttgtttcgattgaccttacattatggcacttagaacctttgactaaagtgaattttggaattaaactcatgttagccaagcgtgtcatacaaccgaaattcacatgacagagtcgcgaatgccacacattggactcatcattcttgctaatatggatcacaacattattattattacacacgtcatccaaagaaaagcggaacaagcctccgctgtcatagccttttccaataaaagtttcatatttagataccacacatttattggattcaaacacaagtctaaaaccttctctacacagtagagaaccgctaactagattcttctttattgaagagacatgttgcacgttctttagctgcacggtctttcccgaagtaaacttcagatcgaccgtaccaacaccgtgaacaggcacaagtgacccatttcccattaacaaggagaaacctttccctacctcataagaagaaaacagggaaatatcagcacatacatgaatattagcaccagattcaacccaccaatcaggtgaatgaaaaacagagagaactgtaggtaataatttaccgtaccccgatgtttctctgccctcactaatgaccatggtggcagactttctgttttgggctcaagacagtccttggccaatgcccagacttgccacacacaa

SEQ ID NO: 27198 - DNA, 1232 bp, Oryza sativa
catttctggaaagcatgccgtcattaattgcagcatttgtcagaccccaccgagatagtgatgacttgtgtagtaatacttactctggtaactgtgaagatgaatactgtcatggttgttatggtatggtagataatgctggcaatgacagtgccaaatgcgtgctccttggaggtttatcagaagctaagaagttggaattgatagctggacctgaaatggtacacttacactaagatcttatcccctttgtgttatttgctgtccattatttctgtttccttccctatattcgtcatctggcattttaacattcttttgcatgattgctactgtcttggttcttaaatcatacattcactataaagattgaatgatcttctcgcctgtactttgtgcagcgtattttcagaagtgatttaagatggtgccctttgtttagcaagttgaagtctttgttactcaatgagtggtgtgttgctaataatttctgggcactagcttgtattctcgaacactcaccggttctactgaaactcactcttcaaatttccaaggtagaagtttttacagccacttcactattaatgttattgtgcatgatttgttgaagctgaaattcatctccctgctacaggaaacaaaacctatgataggggcagtagaaaattacagtgcattggtgaaaccagctgcaatatccaaacatcttaaggtagtgaaagtccactgtaaagaagttgatgaaggggtctgtgaaactgtgaagttcttgagtacattggatgtagtggttcttatcagaaggatggatcggtcgacaaatcgtaagataactgttggccctcttcattatttcaatatctctgaaatttctatttttttctctttgtgaatgaaataaagaatgactaaaattgcaaaaaagggaaaagacagagaaaggtacattttgatgtgataaagagaaaagcatgatccaatatattttgttgtcatgtatgatccatggaagtatacatagttttttcatgttgaactgagtaatataaatagaatcataatatgctgaattctaaatttgagctatatatgtcaaaaaaaaaaaaagtatttacttcaatagttttcacttcgtgttattggcacaggtttgaatgagtagttctgcacaacaacacaatttgttgacttgtgaaatagctctttattgtacatgctatctgacattg

SEQ ID NO: 27199 - DNA, 1513 bp, Oryza sativa
cctgtcagcgtcccggagaaagggggaatgagaccgggccggcccaaagtaaaagagaccgagcgcgggagggactgggccaacggcccaatagagaaaaagaaggtaaagaaaaggataaataagaaaggatttttcctgggattaaaaattgcactttggtgatttttaattggtaaaaattatttccaaggctctgaaaattccactaaaaatcctgttaacatattgtgacatgtagaatccaaaaaaacaaaaattccacatgccgattccgattattatttgcatttattaattagggaattagctctaggttaattaagataatttcttcggacggtttatttagccaatttttaaagcaagcaaaaagggggaaaacttcagggcgtgacattagctttccctaaagtggtatgcttgtagtttcctctctcattactcttaactcttcagttttaccccctttttttttttggggggggggggtggtggtgctgtaaccatatccatacctaaattgcattaacatattacttcacgcgtaagcatatttcatttgttccttagaaatcatcacgtctcaatctaatttttcctgattttcatgctatatcattaccgaatgtttcggagtttcttatattatccacctaaaaaaaatactagatagctagtaattgctgactaattcagttcggcaatcttatggatatttctctataaattagatgaacctacaaaatgataaattctatacctttttcatcatacatttactaggatatggttgctgtttgtattttaatttttttctgtatatttgttatttgatctagtgcccttgcagtttgtgtagtatcttttcaacagggatttagaattgtgccctccttttagcaagttaaagactttggtgctcaaatcatggtttgtgcctcctgacctcagtgcattaacttggtttctccaacacgcaccacttcttgaaaagcttacgcttaatctttcaaaggtattattatattctgaacatgtatacctgtgctatctaggttgtgcttgatttatttactaaaatatttgttagattcaggtacccaacaatttaggggtaatggatgacagttacaatccatgggaacaatcatttgcagctagtcatcttcaaaaagttgaaatcgagtgcaaaaatgttgatggaattgttctaaaaattttgaagatcttgaatgccaatggcgtaccactagagaatattagtattcaatgttctgactgtgagttatctataaatacccatgcttcctattactcagttacaaagccagttagcactatccatagtcaaatgttgtaagtctgacttaatcacagtatgcaacgagtatttgtgagtttaacagtatttgctaagtcatacatgcactatctattgaaacttttgtgaatgctctcctatttttacttatgctgctgccaatttgtgcaagtactatccttctattca

SEQ ID NO: 27200 - DNA, 1314 bp, Oryza sativa
  unsure (1)..(1314): unsure at all n locations
ggcgcgcgcgtgcacccgcgggtgcgcacgcggctgtcgagtggctcctcggcggtgcctctttgcccctctccccctccgtggccggcgtcaaccacggccggcgacgaggtaagattagggttagggtttcgatcttttcgatccgttggatcgtttgcttttcctttcttttggatttctttccccaaccaatctaaactctagggtggctctgataccattgttagggttgtctattggatcacctaggtttagatctagtcgggtggttctatttgcgatggatgattgaacaacaatagagaataaggaaagggtttagggatgtgaccggttgacgcgttggatgaagagcaagtcccagccatcgtcgttgtcgtcgctctgcttaacgtgggcgacgccgccgatggcggtcgtgacgaaagcggtattgaaagacagtggtgatcgtaggggatcccgcaaaggtcgtggcgggggggtggagtcttcccgtccctggttgcgccccctcgatcggttagggtttatggggtggagtggcgncgtngtnnnnnancnttgttctttgtgtngnnannnngtnnngtcctccacccctctttatatggcacagtgtgacgggggcccaccagccattggactgggcgcccccgatcagggcgcgggtcaaggcccccttgagccgttgggctcaaggggagggagatccatctaacattctcccccttgatctcactatttcctttagctttttctattccatcacagatttacatatagagtatgtttcatcgtcacggttaattaccgatggattcgacagccactatacacatctctattcagaaacagatactttaacttttgggccctatagtccaggattcataaggcttcccttaaaacccatgcatgctacatgttccttgaacatgttgggaggtaggcctttcatgagcggatccgcgagcatcctttctgttcttatgtgctcgagactgattgtttgatcctggactttgtctttcacaacatagtactttatgtcaatgtgtttggcagcaccacttgactaattgttgtgagagtacattactgtggattctttatcgcagtataactttagtggtttctcaatactatcaaccacctttaaaaccgggtatgaacttcattagccagttcacctgccccgtagcctcatggcatgctataaactcggcatacatggtagaccctgcagtggtagtatgttttgagcttttccatgaaatagctcctgctgccagggtaaacatgtatccc

SEQ ID NO: 27201 - DNA, 2188 bp, Oryza sativa
cccacacacggaggatccatagctcatacggtgttttgggcaccgatgcattctatgcattgtatgcattgttctaaaactgagaactccaatggaggaagaactacattcttaaccagtctctcaattctccccctcgaaatatggcataaacacaagtgccataatttcgatgagacatcagaagttcgctttcttttcttttgtcaacgaggacacaacattcacattctcagaaagaaataaagctgatcttgcaacacaagaccaatacattcattattataccatagttcacatttgccatttccaaaatggcaatcatatctatcaaaatccaatttggatacacttattatcaagtttctttgcaaagaaggaacataaaaacgtctggaagtaaaagtgtgaagccattcgcgagttctaggcgaagatctccagcctcaacttttgcttcaactccattggcaactctaatggatctttcacttctttgcatagtcctcattgaacggaatccctttaaacaattacacacatgaatagttgctccagaatcaatccaccatgtggatctagaataaccaatcataatgagattctttacaaatgtaataatgttctcacctttctttgccatgatcactgtcaggaagtcaggatgatctttcttggaatgtcttttcttgcaatgtagacactgatcttgtctcaactgtaaactgttgcttctgaggcagatgctggggctgtttttcttttgaggagggtgacctgtggctcttttccttgttatctttgacaaggttaatggagtcaccattggtctctttgtgtctttcctcctcttgcacacaattagagatgagctcttcaatattccaattctctgtacttattttgtagttgacaacaaggttgtcaaagttctttggcaatgaggacaaaaccagatggaccagaaagtcatctgagatgcccaaatctttttgcttcaatttggaagccatattgctcatcctaagaatgtggtcttttacaccacctccatggtacctctctgtaacaagctgctttatcagctgtgtcgcataaaactttgaagaaccactaaactggctctttatactttcgaggtacttagagacagtgtcatactctgggattgagcccaatatggttggctcaatcgtgttctttaccgcagccaaacaattcttgttggctgaagaccatttcgcatgctcaatgtcatacgacatgatgagggaagcattgtccctctctctcttttgccattcagcatctgactctttttcacctctgaaaatttcagcaggttctataggacatggggtagtcaacacccagtccacctctcccaagataaaagcaaggtcgagttctctctttccattcttcgtagttatctcctttcagggtcggaatatctttaatgtaacccatcaaggagtagccacctaagataatcatgtattgtgagaacaaaattaacattaaaattattatgtattaagtctacatcaccgttgggcagaaaatagacataacacataaagccataactataacattgcaattatcaacgttggtcagaaaaattacaacatcatagcacataattaatgttcctaaaattaaaatctcccgttggttcgaaatttaattttagaaacactaattttcatcaatttcatctatttgcagcggaagatctatatacaattcatataaattttggggggaaaaaacaaaactctgttgtttacgctctgtaaaattctcccgttggttcaaatttaaacagagataaaacatgttaaacaattcaaaattctattgtaatttgcatgaaaaatacaaaatacatgttcagaagcatttctcacatttatctattctctaaacaattttcacgttggttcaaattgcttagaaataaacacaatcattaaacatattgaaaatgcttccttcggccgagggacttttattaaacttcctttttttttattcggccccgagggacctaaaatgaactttttcggcctttgccagtcggcccacggccgccttgcgcgcgggcgggcgccccctcccctttccccaggccgcaacctgggcctgggccgggaaagtggctcgccgggcgctcccacatggg

SEQ ID NO: 27202 - DNA, 1406 bp, Oryza sativa
tactgcataagaaataacagaaataaaaaaaatataaggaaagatatgagagatgtagtctcaagaatacataccccactgcaggatcagctgataactccaagtgcgtagcttccgacaagccttgaagacacatgccattggtgccgtaaccagcaacaacctcatcagcacaaccaaaacaataatcatcatcatcatcatcacaaccaccagagacactcttctgacatttgtcctcacaagcttcatcgaatctaacaattgcttgtagcaaggatggcatgctttcaaggaacggagccctaccagggcagtaacttagctccaacgaaactagactcggaaaacacaaccaaatgtggtattctatagaaaattgacactgggagaggcacaatgttttcaaggatgaagacgacagtttatcgacatagatacagcaagtatccatattcagattcaccagcgatgggcagcccgacagatcaagaaaattatcatcgccactaataccttgaagctctaacctcgtgaggtgctgagagatgagagtcatgttaagcagctcgacccaatcgatcaaactgattcgtagcacccgagcttggcagcgcaaagctcgctggatccagcggacgaagagctgctctttttcaggcaagaactccgggaaattgatgttgatactgcagtaattcagaggcgcgctgctgctgcggagcgtaaaaaaagcgtccaccaagctgatgaacctgtcgcccggttcatcgtaatcccaccactccacagagaggcccggtgcttccttccagaggtggagccagcgccgggcgagcacgcacgtcgccaccgcgtcgtgcaccgggagcagcgacagcacgaggtggagcacctcgtccggcagggcgctgatgcggtccggcgccactcgctccttcttcttcatccccctggccgccgccaccgccttcctcttccggggagccaggggaggcattccgtcgaacggttcccgcgcgtgtgggtggaagtgtaagcgcggcgtcgcatcggctccgccgaatggcaccgaaatgcagccgcgcgcgcgcgtcgaacgccggaacggcagcgagatggagtctgggagatgagtttggccttgtttgctcgccgcctcgatctccgccgcttcggtcgcctcgccgcgcgcgtttacactcgcactcgcggctgcctgcctagtcgcctcgcctgctagcgcttgcatgcggacgctttgaagccagtgctagctgtactcagggttcacagttccgacgaaaaccggccgaatttcgcgaaatttcgatgtttcaacacggctcggaattaagtttcgattggaatttcgaaggttgaacagtagatttggtcgaaattca

SEQ ID NO: 27203 - DNA, 996 bp, Oryza sativa
cctattacctcgttggatgattataacagcagtgacccatcttgtgttgatatcttccaagaagatggcttagaaggtgaattcatcatagacattggccaaggtctggataatattgtcattactgatgtagatgagatcactgatcaacaagacctgtcaacaataaataatcggagtactgatatgagtgaagacaatgacctagtatctgaagatgaagaaagtgaagacgacaatgaatcaattcctgaaatgaatgattactattaccgtcaagaagaagctgatggtttctaagtttgctgtgtgtgtgtgtgtgtgtgtgtgtatatatatatatataggtattatgtgcgcttttgttcttttgttttatgacatttatttacagaagttatttatgagtaatatttttaaaatacacaggatgacactttcaaatacaagaagctcaagaagaagctgatcatcttccaatagtcctgcaatttcaaatgagaacgatgatcccaatttagatgaagtggaagatgaggtgaattttcacttgcaaggttgttcagaacttccacctattatccccaacatagaagaccgtccactgattgaacctgaagggaaaacgtgaggtttcatcatgcaatgtgttttctagaacatagctttatctctgctgtttaaacagaagttattttgcttttgtagacaatggcatgaaattccaaccttaggaaagggaagaaggccagcaagtgttctatcctgcctactaaagaagaactatcctggcatagtccaatataaaggcaagtcagtgattgctacaacttggaatcactacaaagcagacaaggactcaaatgggagaagcaaagctgatgtggttgaagaaggtttttgggtattattatatttcttctctatttgttactcctactatcttctcattactgttttaaacatatgcagacaatttcgttttaaaataatatg

SEQ ID NO: 27204 - DNA, 1063 bp, Oryza sativa
ccacatggaaaatgggaaacatttaatgggatggttgatgatagcgaggctatggctaagatcaagagaagatctacatcttcaacagctaacaagcgtcgtcgacaagaagaagatggccatgaaagagcaaggctgatcaaggatgctcgtatagcaaaggaatatgcacaccgagtgctggagtgtagtagtggccaagacagctacaccaacactataaaacttattcttgaggtgcaatctgtcatatacctattatttttattagcataattctaaagcattagtttttaattttgtgtgctaaatatttgaattgtagagtgttatccagcatactggaatgcctctacctgttgcaattccacatccaccgccgccgccgccaccacctacatacggagtttatcattctgcagatcaatctacggtgaatgtatgtggtcatgtttctattaatattgcagatgtgtcctagagatagattttttttaccttgcaatatccagtaatttcaatgtcattttagtggcgtttactatacatatgcaaccattcaagtgtagcagtgtcatatttatcaattgatactaatagtgtaatgtctcagtggtctttatgctcatcgtctagtttattctatacttactactgcaaatcaatgttttgttcaataccatttgttacaattacatgaaaaccattaaatttcatccattgtgctttcaaatttctgtgttggataggctcgtagcagtggctcagttgttggagctggagaagagaatcatgctgggactgcaactgttggagccggagaagagaatcatggtgggattgcagctagagaggagaataatggtggtattgcagttggcgaagataatccagaagaaactttggctagaatttctctaggcatgtttggagggcatattaatgcatctggcagtgcaggtggaaaatactctcctcctttggaagagcttggcccattttgattttagaatgtttggaagaattgcactgaagtgtgaaccttgatgcactcatgcaagtg

SEQ ID NO: 27205 - DNA, 1429 bp, Oryza sativa
tgtgggtttttggggccaattcgaattgtatgttttgattgaaataatcaaagagcatttttgggtccccagtccctgtatataggagtcgatgattgcttaagaataattggtgacttgctacgaatgtgggatagtacgaagtacattatttctaacccaattattgtttcgagatatggtagctttaggatggtgaattttgctgctgtcaagtgattgctccattcataacttttcatttgaactgaagcttgttcatgtctgattcaatagggtgccagatgcaagctatgtgcttccaggcagaacgctggctattgattctcggagacaaaatcttgcggttgaagaaggacgctttttcgcaaacaaccagggtttggagcatcccaggttgtctgaaacttcagtttctccaaggaaagaatcttaccttcacaatttggatctttcaaacgatcgaactgcgtattgccatggtcggaaatcaacggagattgtgttcagtacaagagtgccaatctctccccctggctcaaaaggccaaattccctgtccgacctcccctgtgcaatcaagagcattcgggcaatgcccaggatcccccactgctcggcaggatgattcacgaagctcaagctcacctcacccttttcctcgtcctccgggctccccatgctcatcatcacgtgtcgtcagttcacagtggaagaagggcaagttgttaggcagtggtacatttgggcaagtataccaaggatttaacaggtacttgcttttgaaagcatttactgtattttcatccttacggagatgaatatttcttttctacaatgcatactgaatcgctattcaaaaatgtatttaatgcagtgaaggtggccaaatgtgtgcaattaaagaggtcaaggttatttctgatgattctaactcgaaagagtgtctcaggcagctacatcaggtaatattcatcttgtcaacaaatagcatctgtcagcagatatttaaactttacatctttcgtactaatactacttcctatgggcaggaaattgtgcttctgagtcagttgtcacatccaaatattgtgcagtactatggcagtgatctggtaaatatagaactcatgatgattttatgatcttgtcttgagcatgtagttgcatcataagttaaacgaagacatacaatcattcaatcattacgaactctgaaattaggtgatgcaacagttagattaattgtaagtattattttccagtcataaaccactgttctgaatttgttaagagggaaactctgtggtatatattgtatgaaaatctgattttaatttgctattttatatatttttgccagagtatgcttcgttattcaatacagtctagtgagacgctttcagtcaatctcgagtatgtttctgggg

SEQ ID NO: 27206 - DNA, 1034 bp, Oryza sativa
atatgatcaattttggtctgaattcccactttggctggctggatacatatttgctgtagaggctggattgaattctattatagaaaaaagaattctcactaatatcagaagttatatatgattttacaaagatgtttgcaaaactgaaaattcatggaagctgtatctgatgaacatggaacacatcccctctgtaagtcacttccttctcttcaacacccaaaccccagatatgcccttgcagcttcagtaaaccctttgcatcatctccatggcctttcttggccatggcaccgcccttgccattgccattggcatgatcgccattgtcagcatgagccgcctccagacgaaccggaacacgccgatggcgcggctcagctgcttgacggcgttcctgatcgccggttcatcgccgtcgatcaggaacttggcggcgtggacggtgaccctcttcccccccttgccagagaggcgcttgccggcgtgcacctcgacgtcccggacattgccgtataggtagaagaggagcaaggtgtagaggcatttggacgaatggcctaggctcttggagagcttcttctgcaccaggcagtcttgccggcgagcctccttgaaggcgatgtccctctcgacgaagacgttgcgtatctggtagagcccctccttcatcgcggcgaccttgtcggcgtggccggcgagccgcgcgtcggcgtccaggctcttggctaggtcggtgaacatgtcgagcacctcttgccatgtcttcgccggcggcggcggcggagaatttgcaggtttgttgaaaggggtcgggcgcatccaggatggggacgacgaggtcgcctcgtcggcggtgtcggagaggaagtggacgcagcggcgccgatctggtcggccatctgggtcgccggggatgggtggcccagcgcggccatgtcggcgcgcaggtcgcggagcacctcctccagcgcgccgcgccagatgtggtgctgcgtcagctgcgggcagatgcgaggcgcacgctcttctca

SEQ ID NO: 27207 - DNA, 1643 bp, Oryza sativa
gcttattcatgaagatggtactgagcttcctgaattttgtgcaagcatatgaaagcaccagtctagtactaatcagacattgctccattgtttgacacagcaagctggacaaaggacaaatgggaaatgaaccaaatatcaaacctgataactttatttcaactaggctctgatctataaccttactgtgcttagtctcatcaaccaaaagtcttcgtggatggaaaatccttccccaatcaaattcgctaaatgtattcttgtttttggaacaggcattggacctatgtacagagctatgtctcttagcatgtcatccactttgtacagccctgggatgtgggatggttgtatgaatgccttcctcaccaaatcatcaaagtaatcagtcgcaacattctctatgctatttttcatacaattttcactgacgacgacacagttgttcatccaatagcttatcaattcctcccttgtgaaggtccagcgagggtatgtacccaacaccccaaagcagcgttgcaggtgtttgggaagaagcttacaacccagaataaatggagtaacaaacctgaactggatgcgacgaactgctgacagcgattcagaacaatgtaccagtcttctcattgaggttttctcgaagcagtccactcacaacttttgcagctaaagggctgcacaccctcaatgtcgcagcgatcttctttccaataacaagtaatttctggtattcttcagggtgtgcaccacccagggcattttccatgaacatgcagccgagatcttccattgccaggaaccctacaggtaagttttcatgctattgatcttagttgccagatgttggtacatagtggtaatgatggccttgcttcctgctctacttttcatgaacagtgtatcgagtatgtcattcattcccctggggtagctagaagcaccatcaagaacaagtagaaatctctccattcttagcctttctgatcacacttgaaagattaatggttacgttagaactcaaaccaagcttcttgcacaatgactttaccaaggccatggctggactagtatattctctgcaattcacccatataatcattgagaaatggctcctcaccttgcgatcgtcgcatacgagccgcgcaatcgtggttttacctactcctttgacaccccaaatgggaagcacacaaccatctggagaggatgatccattcttgtctatgtgaagcaagaattcgatggcctgtttcctctcatcgactctgccaactaccctgtcatggatcgaaacaaagatgataaccggtcgatgatgtaacactgcttggtcattctgcaagctgagaagctgagtgaacttggggatcccagaagctactgcttctagcttcttgacagtggcagaaactttcatggtggattccttggatggaatcagctgcgatgctgcgatcttgatgcgtttgaaggagttactagaatcgatgatggagctcaccttgctggacatatctctccagttgcgcagtgtctgatcgcctcgacatgcggcgtcctcaagctcgcgtagccagcgtagtagccatgaattggtgatggcacaccccttggctgcctccagagcggtgtgaatttcg

SEQ ID NO: 27208 - DNA, 1242 bp, Oryza sativa
ccaaggatggcatgctttcaaggaaaggaacgctaccagaacatccatctagctccaatgaaacaacacttggaaaagacatctgagtacgggtagctggataaaattcacaggaggcaaggctcaagattttaacggatggagatgacatcttctcggcattgatacggcagcacttcatcttcagagcaatcagcgccgggcagcaggagaaatcaagaatgttatcgttgccaagaacaccatcaagctctaacctggtgaggcgctgagagatgagaggcacatcaggcagcgtgatgtacgcgggcaaagagatccgtagcacccgggcatttggtgggctgccccaaaaaaacagggctagcatgatccagcggttgacatgccaatccttccccttgtcctccgggaaatcgaagtccaggtcgcacagctccagaggcgcgtcgcggcggcggcggctgacgaagaggccgtccacgaagcggatgaacctgccgaggccgtcgccccgcagccgcggattccacccctcgacgtcggtgacgcggagcgccggcgcgtgctcccagaggtggcgccagcgccgggcgagcacgcacgtccgcaccgcgtcgtgcgccgggagcagcgatagcacggcgtggagcgcctcgtccggcagagcgctgacgcggtcgggcactttctccggcgccgctcgcctcggcggcgccctcctaatccggggcggcattccgtcgaacagttgccgcgctgagcgattagccgggcaacggagaatgatagagagaagcgagagatatactagttttataatccatcgaaccgccgccgcttcgatcgccgggcgttggcgagcgcgttcattcgtcccggaagggaggccgcgcgtagggccgaaaaatgatccgcactcctatcctccacctccgctactgcagttttcgagctccgattcatacactttctaaatactactccctccgttttacgatgtaagtcatctagcatttcccacaatagcagactaagtagtttctaagagcaggtacaatagcagactataagtcagctataaatatattttaaacagataaatgaagagagagaagaacagcgagctacatatctatagccagctgcagcacggactccaagacgtaatgtgtgtatgacatgtggaacccggtaataataatatagtaagcaactattgtatgaactaggaaggtagcc

SEQ ID NO: 27209 - DNA, 9723 bp, Oryza sativa
  unsure (1)..(9723): unsure at all n locations
acataatgttatagcatagtatgtacagatatttataaaacccaaatgttcatagtcagaagatattttcggtgaatcggaataggtgaatcgggataaggagattggaaattaattgtttgactcactctatccattctaaaaaccaaacttagaaatatatatatgaaatttgtatcaagatttatactttacgggatgaagaggttactttcatctcttaagaccggtaagacggcacgtatcatatgtcaatcaccacgttccttcgacttcacgtcagaggatcctaattcggcactgatatatcagtgaccaggtgagagagaagcgagtcagacgagctcaatcccttcccgacggccggctcgacggcattcctcacacgcgagtcgccactcgccggcgcggccgctcccttccccgcacccagcaggcgaggcgaggctcgccgggccttgccttgctcccctcccccccttcggcttcaagttgctcttactctccaagttgctcttcctgtctcaactctgttcttctgttcctaaccccaatttcgaattctagttcgtaacattggttaaaatagtcgaatgattaaaattgtccttgtcagtggttagattaaaattttactaccctactactgcagcagttaagtgctcatctaaagactataagaacttgacaagttgacatcaagtgtttgatctgaattcactgtatttattatctaatctgcttgcttatcttgagtggttaactattttacatgacacctggtcagcctggtgttgttcttttttcttttcattgcttcactttatgtaattttgtctctgtttggtaatcgaaatcttcagagttcacaatcaaacaatgggcattctctagcttgtctgcacataaaagataggatatgttgttttgttccctttatagtaaccatattgattcagatccaccaaacttatattgtttacccttatgaccataatcaaatagtgtaagtgtggtgcaatagacgcatgaatttctgtatcaaaggcctatctgttgggaagcaggaagctttatcaaagaagtgctctgttgtgagtacagggaggaggtgataataagtcactgttaggataaaacttttgtgagtgataacaaggacaactgcatttgagtctattatcaaatcactgaaattttctacttatctcatgcaggtttgtgtttaggttggccgttttggatcaaagcaaaggttctgaaggtttgggctgttctctattgacgtgtgcatgcagtctcccttattattcagaaacgacgacagcagtggcgttgctgtcctctgactagtcgtgtctcattctccgtaccatattgatgcaatctagacatatcgtttgctgcaatgtcctttttatgtgtttctggccgagcggatgtgcgagcctggattcttcgtttctgtgttgatcttcagtggctcagttcaactagttggcactttggcctgctatgtcaccaattaatttgtgccttttattattaggccttatttagttcccaaaacaaaaacttttcacccatcacatcgaatgtttggacatatgcatgaagtattaaatgtggaaaaaaaactaattacacagtttacgtgtaaattacgagacgaatcttttgagcctaattgcgccatgatttgataatacggtgctacagtaaacatttgctaataatagattaattaggcttaataaattcgtcttgtagtttcctggcagaatttgtaatttgttttgttattaaactatgtttaatattttaaatgtgtgtccgtatatccgatgtgacaatcaaacccaaaaaatttccccaactaaacaaggccttactagtgagaagcgctatggttgttaacagatgaaaataaataacatgaaacaaaatcttggccaaatcttgtttgttaagagaaaaataaaggtttgtcaatgataaaatagtagtaaattgtattcaaattgagatcatctaatgtaaggcatggttacttacatgtgggacctatccacaggctcacatatcagtgaccacatcaagtgggaggctacgttagaggaactctcttcgctgcactactatttgatcatgtgctctctccgtctcaaaaaaaaaaaaaaactcaacctagacgggaggtgtgaactatcctagtacaattgatatggacaattatatatttagattatcgtagtaggagaggtcatatctactttttttttgacgaagggagtaggtatacgcttgataataaataatactccctccgtttcgttttgtttgtcgtttccgacagcttcggcgagattaaggttgacgtgaatttacccttttgcccttcctcttcactgattcattccccttcccttctacgcgtgacggcggcggtgccccatctcgatcccgagcgtcgtggcagggccgacggcggggacggcggtgctcttccccaccacccctgtcgcggcttccccttcccacgggcagcggcgccggcatcctgcttccccccgccggtgagcacacccttctctttcccctcttcccacaccttctctcacctccctcccgtctcttcgcgagcctgcgcccaccgccgccggtgaagtcgccggccaccgcatcccgccgccgctctccggctactaggggtatctggccgacgcatcctctcctccgaagctgtagagtagtgtagtggcgggtggcgttctttgcgatttgccaccaccgggcagcgccgccggctcgccatcgccggagcccagcaagaagctggcgtactgagattttggtcagggtagtactcacactgcggcactgccaagtccggcggctcgttggaggtttagcatattgggtttagatgatgctgatcacgttcaagatgatgatgatgatgatgataatgaattgatgttggtttaataaggttttagtgggtggtgattaaggtttgatcttgaattgttcatgtggcagtagcttttgatcttttgattattcgcaatattacttgtagatttgctctgaatttttgcaaggtgtgttgtagataattcttcattttgcaggaacgatttgcttctaataaaatgcttagtgtgacaatgaccatcatggcaccaatatttcacttgtaattagcagttttacctaggtaatctgtgactaatgcaatgctgacaccacagttgagctagatcagtggataaagtagatattatctgaacattatttgtgcctaatgtaatgctgacactatagttgagctacaccagcagaactaaattaaaatgataaattctatctgattcctggacaacagtgtatggtttacggagtagtttctttgaattgatcggttgttgtttaccatgtgtttcttgtcttctggtattttttaccatgtttatttggttgttcatttcttgtccgttcttgattttgtatggaagatactgggtgttcttcctggacgccgttggtcatgacgaaggaggagggcagggtaggtagacgtcgcaaatttgtcacaccatggaagaaagcggctcagaaggtcggcgacgncggtgcagaggatcgtgtcgagcgcctcgccgccgcggcttcgtcctcaactgctctctctccaaggttcgtattcgattttttttcgatgatgtattttgtgttcctaaaatgtgttattttcaggaaaactctatagatgctcactattgcgaggttaaatgaattttcacatctaacctcacatagttcagttcatggctactgcttgtgcaaaattcgattaattagagcaaggaaatagcattgtatttctatttacagggagctattgctggttgttctagtttatgcaaacatttagcataagtcttttccttatcttattgcttcataaattggagttcttgttattgtataatttcttgttagatcacatggttgtctgtccagttatgctatacaaccagtactagatgtcttacagaatggatgcttttaccttttctcagaaccttactatgcttttcactcttaacatttgatgcaacttataatccaaaatgtgcattcatgacaacttcgttgcaacaccttttgcagggttacactagatgggtccaatgttggagggaaaaaaggcaaaaaaaggaagtctccctgcgtggcaatgccattctttagaaccccgttgagcagaatgttactgtcccctagcatacggataaggtctccttctatacaacaacgaacatcaccttctgctacaacccatggaatttgtcaaggtcgagagcaaagaacaatggatattgatttaaatttggaaccgggagatacatatgctgccacagatcccggagaggctggatttgatcacagtgctgccacagatgctcaaggcaatggagaggctggattcgatcacagtgctgccacagatgctcaaggcaatggagaggctggatttgatcccttcgattcaaatgctgatgatgatgtcctagtcactctagaggagataggtgttgaccctggccaggagaatgtacagcctcagtttgatcctttcttcgattctgatgttgatgatgctatcctagttcctcaggagaatacacacaagaatgtcgtgcttgataatgacaaacggagagcaatctttgacgccatgcttgtaaaggcaagaaaaggatatttgaagggccatgagagcaaggaggtttcagctaaattctcggtgcctatcaggacagtacagcggatatggaaaaaaggcaaaagctgtttggatcaaggtatttcagttgatgttgcgagtggaagatctaggtgtggcagaaagaagaaggtggtggatgtgtcctgtctcgaagatatttcaatattgagccgcaccacaatacaggatgtagctactcaacttggtgttagcacgagtaaggtctacagaatgaaaaaagagggtgctataaagcgtgtatctagctcattggatccctacttgacagaccaaaacaaaattgatcggctgaagtggtgtattgaaatgcttgacccaaggagtgtgcctcacaatcttgtcttcaaaccactgtttgatttcattttcatagatgagaagtggttcaacattacgaggaagactgtgcgatattacgcagctccaactgcctcgcgtcgcatcaggacaattcaaaacaaaaacttcatcccaaaaataatgatcttaacagctctcgccagaccaaggtttgactcaaatggaaactgcatctttgatggaaaaattggatgttttccttttgtgacatacacagctgcaaagaggtcaagtgtgaaccgtcctgcagggacaatcgagatgaagcccattgagtcaatcacaaaggaggtaatccgaagcttcatgatagaaaaggtattgccagctgttcgggctaagtggcctcgtgaagacgctggcaaacctatatacatccagcaggataatgctcggcctcatattgcaccggacgacagaatgttttgtgaggccgcgaagcaagacggctttaacatcaaacttgtttgccagccggcaaattccccagatttgaatgtcttggatctgggtttcttcaactccattcagtccatccagtacaaatcagcctcaacaacaacagaagaacttgtagccgccatcgatcgagcatttgaagattatccagtgaggctatcaaacaggattttcttgtctcttcacgcatgcatgagggaagtcatagaagtactcggtgacaactcctatgatcttccacacataaaaaaaggagtgcttgaaaggcaaggtcgccttcctttgcaactaaggtgtgatgctaagtcagtaaataatgctaacaattatctcaggtaaactactttggttatattttattttcatgaaaatcgcttcatgtgcctaactagtttgatgtgtgctaattagtggcattctttttactccttttcaggaccatggcagatacctgatatgaatttgtttgttgctgcagcagggtgcggatatgaaattgctgctaagctaatctgaaattttttggtgttgctgctgttgctgttgctgctgttgttgatatctgaaattgttggtgttactgctgttgctgatatctgaaattgttggtgctgttgttgatctgaacagaatgaattggaggctttcttttttttctctctttttctagaaagtagcccatgtgtgcagtcattctgtgcagaacatgtcctttgatttttgagaaagcaggaggatatatggacctgaatatgtcctttgatttttttattagtatttttatttcacatgaacacattagctaagcttatctaagatcaatggtgtgaactgtcaatggtcctttgatataattacagactagctatctcaatttacaagaaacagcaactgggatggcagcagccactttacaagctctgtgtctgaatactctgtttacagactagctatctcaatttacaagaaacatcagctgggatggcagcagccactttacaagcttggtgtgcatctctgaatctgtatctcaagttccaatttttgtttccaatttctcattataacatccaaaattcccacgcatattacatcactgacagtactaagcactaatcatctgatcaaatacacaacaatcagtccccagtgaacacgaccagaatttcccagaaacagaaaaatttccccttcgatgaacatcaaatagccaagcaaatgcaatgtgcattctctaaaaaacgaacatcaacaatcaacatacggctaaccaaatcagacaatctgcaggccgttcagtagcttaatctgcaatcaagtgcacagctatcttaaccggatgaaataatcaggtaaattctggacatccagctgaagaaagaaaaaagaaaggaggagacttgtggcaatggagcttttcgaagcccggcgatctcctgcaccaacgagacgtgcaccagcaccgtcctccacgccatgtatcagcctgcgaacccgccgcggccgcgagcagcgaacgaaagaatcagggaaaagccctcgagccaaagccgaatcgagaggaggagagggcagccgtaatgagggcgatgatggagaggacgaaggcgaaggcgaggagcggccggaggacggaagacgacggcgatctcccacgctgccgccgccagcgtggctcctcctccggccatggtgccgcggcggcgctttgtcggcggaaggggactatgcgcgtgggaggcggcgccggacttgagcgccatgcgtgaagggcctccccgtggcaggggcaggaggaccgccggcggaggagctcctctgcttttccgcgccgccgactgaggggtaaagatggaaacggtatcggccggtgtactacgacgtcaaacattttgactctttttgaaatgagctacagcgacaaacaaaacgaaacggagggagtacttaattaatcacgcgttaatgtgcaacactgttttcccgaactcagcctaaatagtaaaggtgcagtgttcaacacacacaagggaacacagcttcactaaaggatgagatattcaaatattgtttgtataagcatttgagaaggatctatatggcagcaggttcaatcaaaatgggttagtcctaaaaaataaaatcaaaatcacaatgggctgaattggaggataatatgtgcatttgttgacatttccatcagtaaaaacagtagaacatgcacaaaagtatcagcagatagtacatgtaagacatagcaaacaaaattcagaaatactcaatgcatactgtgattaagtcagaacttatatataactatggacagtgcttggctctacaacacatattgacaactgcataataggaagcgtgggtgttcatagataactcacagccagaacatcggatactaattttctctagtggtacaccattggcattcaagaccttcaaaattttgagaataatcccatcaacctctctgcaatagatttcaactatttgaagatggctagctgcaaatggttgttccaattgattgaaacttccatccattcccactaaatttttgggtacctgatgccaacaaatactttactaaacagatcaaagcaggacatacatgtacaaaatatagtaatacctttgaaactctaagaaaaagcctttcaagaagaggtgcgtgttggagaaaccaagctagtgcactgaggtcaggagccacaaaccatgcattcagaaacaaagtctttaacttgctaaatgtagagcaccactttaaatccctgttgaaaaggtactgcacataatgcaaggtcacaagatcaaataacgaatttaccaaagaaaagttaaaatgcaaccagtgatcatatagtaatgaacgtctgatgaaaaaggttttataattcatctcttctgtatgttcatctaatgtgtacaaaagtatcctaaggctggcgcaattcaaataagttagcaatcactatctatctggttctgtaagaaattgcaaaactttcaattatgctgtagcatgacaatcatgaacaattaggtgaagtgtgatgatttgaaaggaacaaatgaaataagcttatgcatgaagtcatatgtcaatgtaattttagctatggttgcatcacaagaagtgataaaactcaagataatgctacgagttacgagagaagaagctgcaagcataccactttagaataagctaacaaagtcaagtccgtagcttccgtcaagccttcgagaaacacgcagtcgtattcatcaggcctataataatcatgacaacccttacaaccagcatccccgcaatcatcgtaccaaccatttgcgcatcggtcatgacagaaatgatcaagcctaaccgccgcggttgccaacgaaggcatcgtctcgagcaacggagtcctcccggtatttgtgttgaacttgaaggtgacaaggctagggaaatccatcctggtgcgatagtcgcagtagaagacgcagtatgttatgctcagatgcttcaacgatggagaccacatttccaggccaccaacgtagcaatccttcatcttgagatccaccagcgaaggacagctcgagaaatcaagaacctggtcgtttccctggacacccctcagctctagggttgtgaggctgtgggagacgaggggcgagtccgagagagggatgggcacccgggggtgggtggagacggcgaaccggagcgcccggacctggcggcgaaaggcgcggcggatccaggtgtcgccctgcagctcctcgccggggaaggcgccgtcgaatctgaggtcgaagtcgcaggcgtccagcgccgcgcccccgcggcggaggcggagcaggctgtcgacgaagcgggcgagcgcgtcaaagcttgcccaccccctgtccccgacgacgcggacggcgggcacggacctccagaggtcgcgccagcggcgggcaagcacgcaggtccgcaccgcgtcccgcgacggcaggagggagaggacgtggtggatcacgtcgtccgggaggtcgctgatgcggtccgctccgctcgccatgtggtggcggccgggctcttc

SEQ ID NO: 27210 - DNA, 3225 bp, Oryza sativa
ctattttaatatgtacggcttatagtgctatattgaaatatatttgttattcggtgccaaaacaaatatgtttgttattaggaaaattttgatatagaacattgtggcattttttcctctgtaaaattcaaataaaaatatagtttctttgtcacgggataatccgttttgttgataattagataaaaaacaatggtcctattactcatttaacgtaggggccttctctacagtactttggtaaaaattggagaggcaaaattttcgaagcactactgacctggccaagtggcaagccagtgttttatatcttcgattaaaattgttaaaattccatgtcatacctttcccttgaaaaaaaatcaatttttaatctatgaaaagttattaaattcttatctttttttattcaatttatcaaaaaatcagatatttccattatagtggtccccaaattgtttttggttttcacaatttggaacgagttttgaattttgcaaaaaaaaaagaattgcttacattcaacccatatttcttcacatttctattatttacattatttttttcaaaatttcagaagttcccattctactgttcccatgatttttttccctcaatttttgaaacaaaaataaccagtttgggcgtgcaagttggcacttggctaaaagtgtgatttttaaaaatcctataagcgtaatgcccatgcattatgtgagtgatgatctttgggagtgaagtctcctcgttcttgaaaatcatttgttacgttcctacaatacttcctatgatattaggatgaacccacatgtttctttgttgcggccagggctatcctgggcatgagcgagacagggcccaaaaaatttgggatccaaaattttatatattttaatccatactaatattttctgagttctgatatgtttcggattaatttctctctttctgtttcattgaatttactcctttggttcggtgataattatagctacactgaagaactatatacctcatgacagtgatgtgaacgtatcatctagaaaatacaatttcattttttccacttaattagtgagaagaactgaattggtgcagctatttttcttttacctagctagatcgtcatatgcgtgtgagctttttttcatagctttagctgtcatataaggcctcattttatatcttgtaccggacctccatatttttgggggacggccctggctgtggatgtgatgctatgagtccaccatacgcggtgacgaatccaaaagaaatagcagggttatgcacaaactagacaaggtgcaaactccttttcattacatatttagagattgaaaggatgagaagaagatttcttttcaagaatgactagaagtggaaaaaaaatcctaggctgttttcgtagtactgattttctttaacaaatacgaagtatttctctagtcctgctgcgtggtgcggtggaaaatggaaaggttgaacatgcaaattttggtattgttcggtgtttcaaaaccatgcatatagttcaccttctccacacagagagacgagcccttttaaatgatagcttctcattaaacaatatcagttgtttccactatttttacacagtaagttggattttacacgagctgaagctgttgaaacatacttatgcctctttcttttatacaaacatagccatgccttaacataatgtttaatttaatataacctttcttcagaatagaagggaaccaaatttaacatgacattttatccatggcggccacgatgtcatttgcaatatttttcgcatccatggcaataccggccaatcctctcctagcaaacccagcacaatacaacccattttcacctctccaatgatttggaaaataatttttagggaaaccatcgtctttaaacatgctttcaccattctgcaaccgataaaaaaggattatccttttgtaataatgaaacaaaatcatgcataatgcaacaaaatatattattgtgtaaacaaatagaattaaaaaagaagagagaagagtttaaagcaatatccatattctttgtacctttagccatgcattaactgtgcttttgtaacctgtcgcaaatacaatggcgtcaaatgaattttgcctcccaccatgaaattcaacactgtttgtatttatctttgatattccttggaacacctaatagagatatgaaaagaaatggtgtaaagtctgaacatcaattgaggctagaaacttcacaagcactaccaacttaattttgtatctaaagagtgtagatgcatgattactttgataactcctcctttgattaatcttgcagtgccaacatcaataacggcagaccggccagtttgtgacttgagtaagagaggacccattttaggcctcgtaataccatgttttgacaagtctcaaaataaaaatttgcagccatcacaagaagagaatccactgctgtcacatttagccctaaattttggaccattgtcatcccataccatattagttctttggtcattatgtgtatctgcatttagattgatatgtaaccattagataatcatcatattaggaaaaagtctctagcttgaaagttaggaacatggaacccaaaaaaccccaaaatttttttttggggggcttaatatttagagttaatcacatttttcatttatattatccacatgtgtatgtggtacaaaagacaaagataaagggctacatgaataaatacaacttatgaatcgacaactgaattaatgtattctattattacttttatagcaaacatgaaacataggtatgaatgcatcatgaaatgtaatgcaagataagtaaatatatatgatgtacataccgggctacgaacaactatagaggtgtgggctccatgcgtgacaagatcataagcgatctccatgccagaattcccggcaccgaccacaagcacattcttcccggtataggctctcccagacttgtaagccgacgagtgaatggcttctccctcaaacctagtgagaccaggaactggtggaatgcttgccgctctgttctcgccagtgccacgacaaggaactgtgcggtgagccttgtcacaacactagtgtccgtgtcccgtgctagcacagcccaacggttcttacatccatcatatattgctgactcgatagcagtgtggtaccttggtcgtatcccaaactgg

SEQ ID NO: 27211 - DNA, 1091 bp, Oryza sativa
tctaggtactccacaaacatatccctaggaacgtacgtcggcgtgcccgccggatacgccatgtgtggcagctcgcagaactccttggcgaggtgtagcttgaggcggtcgtaggcacggtggcgccacaacgatgcggtgctggactcacgctcgacaatgatgtatggcacatgccgctgtgcaaggcacgccgccgttgctaggcctgctggccccgcaccaacgatgagaacaaccacgtcctccatagcattcattgctaggtaatcacgtagtaggatgtaactagtgagcagaagtagcgagaagtgtagatagtagtgtttttgtggtacatgctattgagggttacaggaggtatatgtagcatggaaattggaacggattcacattgctaatagcagataattcttttttttatcccatttggatgaaattctggataaatccgttgcatgcattaaatgcggccaaatgccatataagttataattcttgtatagttgcgtttatatctcaaaattgtgttataatgtgaacttggaaaatatagtgacaaaggcgtgttcaaacacattaattaatttctaataatggttgtaagtcaaggagaatggacgtgcctgtataggcaacaaaagttatttgtttaggctagagaaaaaagtatgggacgctttcacaccattgttttagaaattaccgttggatatactctttgtttctaaatttacagacttaaagctgccgatcgtataggactattttacattgtaacacaaattgacatgtaccatatttttatttaatcatcaacccactgcaccttaatgagcatacatggactttaggctttggttgacaagaaaggtgactgaaataatgaacttagctcgtatcgaatacttgtctgttgtctcgtacaaatgtacaaccgacggtacgaatgttaaagttgctcacaaacgagaacatacatgcaagtagactgagcgtgccttgctaaacatgacggacacacaaaggctataagaatgtgatatatattcattatactccatgtgcatcaggactgaggaatatgaatg

SEQ ID NO: 27212 - DNA, 1066 bp, Oryza sativa
tatataggttgtaattaattatatgttcatattaacaataataatttagtttccttacaagaaaataataatttgactaatttgtcgatcgatgatcgaagcttaattactgttatgatgccaatatctacgatcatatcgaaagcttaattacggagtttcttaagacattattactgatcaacagaaggagatctcgcataattggagttgacaacactcaagagataaattaagagcaacctcagaaagagagaatatatataacagagagaaaagctcaacaatttgtatcatgagcagctaattaattaatcgattcacctcatataggaaattgaattttttaaaaaaacttatttggcaaagttgtaaggggggtttcattcatcctctccttaatcactagtggccatgcatgcatgtccctagctacccttttttcctgatctagtgcatgcatgcaattaagatgcgacgcctaattaattacgattgatcattaattaacaacaatattaatctcagcttcttctctaacaacatatccattggataacactatcgatccatctccggctcgccgccgccggcgacggcggctacacgccgacgccgaggaagtcgaagtacggcacgcccttccgcttgtcgccgccgccgtcgacgtcgccgtggttctcatggccgccggcatccatcagttccagcgtctctctcatgggagtggagaagaaggtgatggtggacacaggctgcgccgccgccgccatggacgtcgtcgccggcagcagcgtaccatagctcgtaccgttaaacgacttgatcaagaacggcgccgccgccggagaagaagaagacgacgacgacctgttgatcatgccgaagccgaagcatagcgagctattgcgcgcgcctgatgacgcaccgccgccgctgaagtcgagctggctggcgtagaagaagaacggcgcggggtgggccgcggcggcggcggcgcgggcgagaaggcggaagcgctcgcgggacgcgcgggcgcgaacgacgtgccagtggttcttgacgg

SEQ ID NO: 27213 - DNA, 1515 bp, Oryza sativa
aaagacgttttgggttaactaatttgattttgaagatggaaatgaaacaaacggacatcataattccaaacgtgacgaagtttgttctagtattccctgggaaccaaaatcatgcataaccagtttgataataacattacttataaatcgatgaaagaggatcccaaaacaaggaaagaggaatcacaacaaagataagtaataagcttgatcggaaaattgaaacagctagaatacatgcaaaacttccaacattaattagtaattcagattagacagacgatcaaattaaatggccagctggcctttagtaattactggaaaatattatccttttgataaaatatggttgcggtcttttttgggagtagtataaatggaagaaattaaccctcagctctaattaaccagacaactgtattcctctatctccaagataaatacgaaaaataattaattagaaaaactgaagcgctcgctcataaatatatacaagattaatacaaagaaccgtatggggagcatggctaatttctttcaaaaggttagattaaagtatatgcatcacagaaattttgcttacaaactaacacacaagcatgattggaggcaaatcaagaaaactatttttttgcacaactctctccgattaaatgaacaaattaacaacaattaatacacccacaaaaaataacatatgccaaccatagcatccaagatttcgatccgattcaaaccaaacaggcatgtacatatgcccccaaaattttgaacacaaaattaaatataatccccatctaccaatttctagacaaaagaaatataaatcctcatcttctctccatgagaaagaaccaaagaacaacgaaccaaataaatctaggtagatgaactagacctatagcattaatttctttgcaactatatatctagcaccagaaatgaaacaaactaatcaacaccatcaaagaaaaattaaccatcaccaaattaagagataaaaaaaatcaaaatcaatcaacacacaactatagtttaaccaacaacaccaacctgatctgccctccagcttctcggcgatgggggtccagttctgagggccgtacttctccaccagctgccggagcttctcgtcttccccgggccgccagtggcctctcgggcacgccgacgacgacgacgacgccggcttcccggcgccgtccgacgtgttcgtcgtcgacgacgacgccatgatccttcacctagctagagatcgaatcgatcgagtagaaatcaagcaaaacttgactatagcttgctagctagctatcttgcatatctatctttgtttttcagatcccaaaatgattttctcttataagtgagaggagaggaggagagaggggatttttcttgggctaattattagctagcttaagtaagtagaattagaggggaaatgggagattgagtgagggagaaggggtatgggtagtgttaggatacccatacccatatatatatacaagagag

SEQ ID NO: 27214 - DNA, 575 bp, Oryza sativa
aaccatgcatagtgcacacttctccacataaagagacaagccgttgtaaacaatagcttcccattaaactagttttacaaataaagttggattttgcacaagcacaagctctccaaacatagccatgccttaacataatgtctaagataatgtaacgcttattcacaataaaagataatataatttaacaagacacttgatccatggtggccactatgtgatctgcaatattcttagcatccatggcaatgccggccaatcctctccttgcaaacccagcacaatatagtccattttcacctttccaatgatttggaaagaatttcttagggaaaccatcatctttaaacatgctttcaccattctgcagcagataaaaaaggattatcctttttgtaataatggaaaaaatatattatgcgctacaacaacatatcattatatatgtaattaaagagaaatgaaaaaaaaaagaaatcccttctttctatatacagttgatacctactagctataaaactgctttaagaattagccacgtcatcccaattagctgaaactgttagatcttaaat

SEQ ID NO: 27215 - DNA, 8631 bp, Oryza sativa
  unsure (1)..(8631): unsure at all n locations
attaatcaatattaaccaaacactgtccaacgctacaccacgttgcaacaggcccaaccaaccacctgaactacaccagttcattaagctaaactaggggtgagactaatcacggtgaatctggttgatcgcccataaccgcgggcacggctattcgaatagttttactctggccagaggtgtacaactgtacccacaagacacgattccacacatgtcgccatgccccgaagtatcaccatgatactgcaaagggggaaatcgtgacaagaccctccacataaccctcccctaaccatccacaccacgctaaggtttcacccccacccctcaaaaggcagtgggcggtcccctcttgcgccgcggtgaatccggcagctggacaaccggacaccccggccgacccaactccatcacgcccaccctcgccaccggtgcctaggaaagggtcgagctatacttcagatcaagcagttacccactcccgcttgtggtaagcacggtaagtctcccagggtttcccgtgaaccggtccttaactgccatgggtgcgaccagcaaaaccatgcacccacagcccaccattcagtgtattttaattaactaacaccattgcggtggcaccaatctaaagctatgccaatagacgaagtctatgtaataaggtgatccccatttgtgtgctagttgaactaagcatggctaagcatttcctaaacccacatctagtcattttgatacccaggttatcaatggcatatggtaaacaataaatggctgagtaataggacccattccacatgatattgtaaaagaatgcaacatttaatagaaatgcgggatatttgtaaattgggtacaatatgatcaaacgtattgcatgacttgccttgctctcgcactgatgagacctcagcaacgtcttcgagaaaccgcggatcgacgaaacggccgaaacctacgcgacaaacaaagcacacaagcaaaacatgctataagtctacagaaacaggaaacaaaaccatttttaatggattctttgcatttttcttgatttactgagacttgaatggacttaaacggagctcggatgaattacttatgaattttagaagataaactgtgtttttactaataaagaaaagtccttaattaattattgcgcaatattgccccagggctgacgtcagcaaggggagggggcggctgtgctgacaggcgggccccactggcagcggcacaaggggagagggagggggcggctggcatgtgggccccactgggcagcggcacagggcgggagagggaggcgccagccgggctcggctcggcctcaaagccgaccggcggccaaggcgaggcggcggcgaggcacggccaccgacggcggtgaccggcggtgcgggaagcggcggcgacggccgaaaggcggcggcagcggctgaaggcgacggcacacgcgcgaaggccggcggcgcacacgggaaagggggaaaaaggaagggggagaggggattctcaccgatgagcacgacggccggcgcgaaggaagaaagcggcggcgacgaccggcgatgccgaggtgcggatgggcggcggcggcacgctaggagaaaacaaagaggggttaggggtagggagagcgaccacggcggctagagcagccggccggagttgggtggaaatggagagctcaccggcgtgcgagggaaacggcgcttcggcgacgattggcggcaaccgaatggtggccgaggtgcgggcgggctcggtgagcgcgacggcggcgactgcgcggcacggcggtggctatagaggcggcggcgcgtggccggagacggcggtaggcggcggcgcaaggggcgacggcgcggcgacgataggaagcacgggagggcgcggcgagtgcgaaaaacgagagaggaagacgcggggagcgatttataggtgcgggagggggcggacgtggccggggaggtggccgatttggccggcgatgtggggaggagagagagaaagaggggtgggattcgaaatcgaatcccgccctctcgagcgcgcgcgcgggccgggaggttcgggggaagaggctgcgacgtgggggggggacgcgggagcggcgcggcgtgggcgcggcaagaacggaggaggcggcggcgtggcggattcgcggcggttgccgtcggaggcgggtggctggaggaaggggacgacctgacaggtgggccccacctgtcagcgtcccggagagagggggaaggagaacgggccggcccaaaggaaaagaggccgagcgcgggagggagtgggccgacggcccaatagagaaaaagaaggaaaagaaaaggaaaaagaagaaaggatttttcctgggattaaaaattgcactttggtgatttttaattggtaaaaattatttccaaggctctgaaaattccactaaaaatcctgttaacatattgtgacatgtagaatccaaaaaaaaattccacatgccgattccgattattatttgcatttattaattagggaattagctctaggttaattaagataatttcttcggacggtttatttagccaatttttaaagcaagcaaaaagggggaaaacttcagggcgtgacattcctaccccccttaaacggaatctcgaccccgagattcggaagagctggcgaagaggtgcgggtgggtggccttcaactcatcttctctttcccaagtggcctcttcctctgagtggtggctccactgaaccttgcagaatcttattactttgtttctggtctttctctcgctggtttcgaggatacgagttggcttctccacatacgtcaagtcttcctggatttcgatttgatccggacttgcctgttcctcaggaactctcaaacatttcttcaactgggagacgtggaacacattatggatgccaagcatgttggagggaagctcgagctggtaagcaacttcacctctacgttccaaaatccgatatggtcccacaaagcgtggtgccaactttcctttggtttgaaagcgatgtactcccctgagcggagtgacacggagatacacataatcccctacttggaaaacgagctcccttcggcggttgtctgcatagcttttctcccgagactgcgcgattctcaatctttccctaacagctctgactttctcttctgcctcatttaaaacttctgtaccaaacaactggcgttcccctgtctgatcccagaagagcggagtacgacacctccgtccatacagtgcttcaaatggtgccatctgcagactagcttggtaactgttgttgtacgagaactcagcatacggcaagcttttgtcccatgccccaccaaagtcaagcgcacaggctctcaacatatcctctagtatttgattgactcgctcggtctggccatctgtttgtggatggtaagcggtgctgaaattcaaccgggttcccaattcttcttgtaatttctgccagaactttgaagtgaattggcttcctcgatcagacacgatcttcttaggtactccatgtaaacacataattcttgccagatagagttctgctaatttcttccctgagtaggtagtgtgcaccgaatgaaagtgagccactttggtgagtcggtcacggactacccaaatagaatcatgccccgatgacgtcctgggcaaaccggtgacgaaatccattccgatttcttcccacttccattctggaatctgaagtggctgtagcaaacctgctggcctttggtgttctgcctttactcgttgacagacgtcacagagtgctacgaattcagctatttcccttctcatgctgacccaccagaacttctctttgaggtcttggtacatcttagtactaccgggatgaatggaatactgagtttgatgagcctcggttagtatcaggtcttttaattccttgttttcgggtacacacaatctttctcccatccagattgttccttgttcgtcctcaacaaaacctcgggcttttccgaccctcatgttctttttgagctctgctatttcaggatcacttgcttgagctatgcgaacctgctccaccagtgtgggctgtgcctctagggcagccacgaatccgtgctcaactataccaaggttcagatgttccagatcgcgttgaacctcgcaacatagttgctctacccatgcaacattgcagtagctcttcctgctcaaggcatctgcaaccacattagccttgccgggatgataatgtattcccatatcataatccttgatcagctccaaccatcttcgctgtctgagattcaaatcagcttgagtgaagatgtactttagacttttgtgatctgtatatacctcacaacggttactgatgagatagtgccgccaaatctttaaagcatgaacaactgcggctaattccagatcatgcgtcgggtagttgccttcatgaggacgcatctgccgtgaagcataagaaaccactttgccatcctgcatcaacacacatcctagcccctggcgagatgcatcacaatagacctggaaatctttcgtctgatcaggcaggattaagactggtgcagacaccaaccgtcgtttgagttcttcaaaactcctattgcattcagcagaccagataaacttttcttccttcttcaatagctgtgtcattggcttagcaattttagagaagttctcaatgaaccggcggtaatagcccgcaagtcctaagaaactccgaacctgagtgactgtccttggtggggtccacttggtaactgactgcacattggctggatccacagctactccttgagcattcacgatgtgaccgagaaactgaacttccttaagccagaagtcgcacttgctgaactcggcatatagctggggctcttttaacttttcaagtaccaaccgaagatgctgcttatgttcttcctcggacttggagtagataaagcatgttcatcgataaaaacgcacgacaagacttgtctagaaattccataaacaccttgttcatcaaattcatgaagaaggcaggtgcattagtgagtccgaaagacataactgtgcattcgaacaacccgtaccgagtgatgaatgctgtctttggaatatcctcttcgcggatcctcaactggtgataacctgatcgcaggtctatcttagagaacaccgtagctcctttcaactgatcaaacagatcatcaatccttggcaaaggatacttgttcttgatggtgacctcattgagtgcgcggtagtcaacgcacatcctcttggttttgtctttcttttccacaaagataaccggagcaccccaagcgacgtgctcgggcggggggcccgatgtatcccttctgtaactgttcatcgacttgcttcttgacctccgccaactcgttggctcccattctgtaaggcctcttgtggatcggtgcagttccaggtaccaagtcaatccggaactcgatatccctttttggtggcattgttgtcagatcatccggaaaaacctctagatactcttgactatgggaatatcctccagcttcttagtggttttctacactgctacctcttgttcttcaccagcagcctggtttaaactaatccctggcttctgcggcactggggactggaagattaccacctctccttttgcattggtcaacttgatggtgcggctggcgcaatcaatcactcctctgtgccttggtcaaaaaccccccaaaaaaatttttcccccccccctccagatgacgtctaggtccttggattcgagaagaatgaggttggctggaaaaatcgacccttgaatttcaactgtcacagatgggcagtagtgagttgtggtcatgccacctccaggagtatgcactcgcataggtatcttaagcttcactaaagataacccatgtgcaccagcaaaacgcttggaaataaaggaatgggttgcaccagaatcaaacaatattactgccggtgtcgagttgacggggaatgtgcccaatataacctctggtgctgactgcgcctcctctgcagatgcatgattaacacgggcctgaacgaacttgggtccggcacgtcttggcttcgggcactttccaaccgtgtgtccgggtttgttacaattgaagcagagttcgggtttttctaccaacctcttgggctgttctggcagagctggctgatctgactgagctggaatcattaatggacttggagtcgggttgaggctgctgtgactgccactgttgttgtgactatcactatggtgggtcttattgaagctacccgggtggtagggacggtgctgtcggataatcatggtggaaggtccaccgtgacgtcccatcgtgtaacgaggcttttgacacttcccctggggagtcctgaactgggctgccttcctcttacgggtcattttgttacactgctcctcttgacgaatagccttgtccacaagcttctcaaagtcctcatagtctctagagatcaactggttggtcaattcgtcatcaagaccagacataaacttctcctgcttctcggcatcggtacgcacgtcctcaggggcgtagcgcgcgaggcggttgaactcatgcaaatactctataactgttctggttccttgttgcagggaacggaactctctcttcttttgtcccacaattccctcgggaacctgtgctttattgaaactatgacgaaactctgtccaagtaacctctgccccagctggacgggtcaccatgtagttgtcccaccaaatagaagcgggaccttgtagctggtgtgtagcaaaagcaaccttctcctgctcgttgcattgcaaaagattcagcttcttctcaatggcatgaagccagtcgtgggcctcgattgggttggtggtgcttgagaaggtgggcggcttgacacgaagaaattctaacagtttggactgaggaggtggaggaccaaactgcaggttctgctgctgcagctgtgcttgctgctgcacctgctgcaacacctgatggtactgttgctgcatctgttgcatcatcattgtcatcatctgagtctgattgtccaacacctgagcaattgttgggttctcgggcggtggggacggactgttgtcagatgcaccgttggcacgtgctccattgatcggctcttcgctgccactggcgttgttcgagtcgcgtgaaccattccttgtctccatctgaaggggataggtagaaatatgagaaaaggaagaaaaacagggggctcagaaactaatcttgcttatgaatttaagtgcaattatcttaatcttgattaaaacactgaaaaagaggcacgcaactcctaattgaggcagtcataccactgacacatgatatcggccgccgactagcccacaagcaacaaacctaaacacgaaaactagcaagcaaccagactaagaagacgataaagctaagggcggcgactctgaagctcgaggcggcgcttgcaaacgagggataagactgacatctaaagtagacaagggataggaaccaatccatgctcaaacccaaattaaacaaagcaaaacaaaactcacataaataaccgagcatgatgatttttatgcatagaacatttttcatgaactcaaataaagacactaatgcaactaaacaataaattaatgcatagactagttgcatggaaaacgatgcgcataacattgcccccatcgaatatagacacgacctaatgcataacccccaataaattccgactgactgtcgaataaactccactaaaaattntttaaaggcctagactgagctaatatttttttttttaaaaaaaaatccgatccgaaagaacgaccaagatttttcccgcaaaccaaagaggcaaaactccaaattttcccgaaacaattccaggtgcaaaaaggcatatgcagatgaaaaaggggttcagagggctcttaggtttccagttggcttgtcctacggtcaaggtcggttctgataccaacttgtcacgcccagaaattctcgaaccagaatttctaagctgaatgtgcattaaatccctgtccaggaccagccagggtacacaaacgacaattgttgacatacagatccacgtcttacaaaaatagaaaagattacaaatgcagcggaaaagataaaagcgagctaaaccgggaagcttgacttcagcagcgggcggctccactccacaggcaatccttgacggcagcgacgaaaccaacttgacaaaacagctccaactaggaagatcttcagctctggtgtgggggaaaagagagcaagactgagtactacccactgtactcagcaagtcataccggaagaggaggtatgatgcaggatgtaaccaaaggaggctagaggttcttttgcataaagctagcatttaaaaacggtagttgaaggcagtaaaacagttgtagtaattaatcaatattaaccaaacactgtccaacgctacaccacgttgcaacaggcccaaccaaccacctgaactacaccagttcattaagctaaactaggggtgagactaatcacggtgaatctggttgatcgcccataaccgcg

SEQ ID NO: 27216 - DNA, 968 bp, Oryza sativa
tcagcccgcagtggcacgagcggctcgagttcgccgtgcacgacccggccgccatgcacgccgaggcgctcgacgtctcgctctaccacgaccgccgcttcaacccttccggcggcggcggcggcggtggcgggaagaaccacttcctcggccgcgtgcgcatctacgggtcgcagttctcgcggcgaggggaggaggggatcgtgtacttcccgctcgagaagcggagcttgctcagctggatccgcggcgaggttggcctcaagatttactactacgacgaggcgccgccgccgccggaggataggccgccggagggtggtggtggtgacaacgcgccgccgcctgaggtcccgcctgaggcgcccagggacctcccggacatccccgcgccgaccgaggccgccgtcgaggtgcagcagccgccggtgcatccccctgtcatcatcgtggaagaggcgccgccgccgatgcatcacccgatgatgccgccgatgcacggcccgcacggcccgatgatgccgccggcggtgcacgggccgcacgggccaatggcgccgccgatgcatcagcatcagcatccgcagccgcagccggagccggagcctgaaccggagccggacggcggcgaggcggggtacccgcccgaggtgcgcaagacgcggatggccacggagcgcgtccgcatcgcgcgccacctgagcggcgggttggggccggagtactacgccacctcgccgcgcgtcatctccgggcggttcgtgtccaccggcgacgccgtcgagccggtgcagtcgtcgtacgacctggtggagccgatgcgctacctgttcgtccgcgtcgtgaaggtgcgcggcatccgcgcctgcgaggggccgtacgtgaagatccaggccggcccgcacacgctccggtcgcgccccggccgcgacgtttccggcaccggcaacccggagtggaaccaggtg

SEQ ID NO: 27217 - DNA, 3254 bp, Oryza sativa
gttatgttcttttaaaaaaataaagaagaagtctgatactaattgctatcatgataatgacgggatggtaaaggtccactttgccttgggtgcctcagccatgagtcatctgatattctttccctcaaacaccatccaaaaacactgaacaggtagtactgatgccctgctactgaagagcctctctgaagtatttctagaatcctaaatagtactactctttggtgaaaaatactttcttttttgggggcaaaactctacaaaattgaaggcacaaaattggtttatatttgtaaatgagcaattttacggtccttgagaagataccatgaggtactaaaaatttagtataaaatttggtacctcataaaatctagatattaagaggtataaaatttacaataaaaaaagtggtaccttatagtatcttatcaagaactgtaaaattgttcatttgtgaatatacccaaaaaaatgtgaattcattcactccaatgcccccggtatgattaatgccatgaataatctagcaacacaattacaccaaggtatacctgtgtgatacatgcaaaccacaccttttattttgcaagattatgcgaaattacataggtaaatgcaaaccatatttctgacctgtgtaatttattactactatatgtaacttccttatagaatgaaattgtgtgttagaagtagattgttcatttcaagtatgcttatggtatccgttattctgacttgtcaaaatggcatcatctccttagagaaaagcttatttcctttgttaaaggttaacatcaaagcggttctatcatatggtccatggcttattcctcatgcatttatgcatcaacgaaatcaccaaagttttcatgatatcataaaggtcaagtgaagtccatgcactcaagtgaccagaaatttttggacctgcctaagatcagcaaatctagtgaagccatgctgttgacatgtgagattaaggtcactctccaaagtccattctactccttttcttcctttcttgacacaaccattaatctcgtgctctgcttttgtccatggcttgttgtgttcctaacttattgttcttggccacttggttccattcagagaggagtagtttgcactcacaaagtgaagtgacaatcttctttgaagggttaggacatgatcacctgttaagtgagattctgtcttgacttgtgagcagagcaaagcagcaggagcagagcttcacttgatttgcctcctctctggtgaagcagagatgaactccccaaattatcatttcaaaagtggcaaatcaccacttcaactatatatataataatgttcaaattgtggtgtatacatgcttatgaataaagtcgaattttcttctttatttttcttctatccaccgattttctccctatatcgcacgctcgttattacaccagaacgaaaaccgattgagctcagagcatcctgtcggagaggctgggcagccgccggaagaagttgacggccgccggcggcatggggtcccggaacatcgggtggcggaggtagtagaacccgccggcgacggccaccatcttggacggcatggcgtacagcgcgacggcgacggcgaggcagacgccgacgaagatccggctggcgcgcgggtccctccagctcaccagcgcctgcaccctctccccctgcgccgcgacgtcgcccatgacgcgctgcacccgccccgccagcgtccgcagcctctcgtagcgcgcccggagcacctccggcggcggcacggcgtcgaactcctcctccaggtcgtcggcctccaccgtgtcggcctgcgacagccgcgcgtccatgccggcggggccgcgcggccggaaccggtagtaccagacgccgatgaggaagacgtagagcgacgccgtgggcacggccagctccgggtaccagacgaggacgaggtagaggacgtgaacgagcacggtggtgggcgggctgcgccaccgctgcacgctgtcgagccaccgcgcgagcccgacggcccaggcgagcacccccatgatgcggaaccagttcgccttggcgcgccgcacgctccacgtgtgcgcgtccacgtcgagcatgtggcgcaccacctcccgccccagcggcggctcggaccgctccagccacgcggcgacgacgcgcacggcggcggcgcgcagcgcctcatgctgcgcgacgccgatcgggcggaggtagtgcatccgcggcagcagcggcgaggtgtaggtggcccaggtgtccggcaggtgcgccggcgacgtgaaccgcacggcgagctgcacctcccccatcttcttagccccgaccggagcagcacgagcagcgggtacgacgccgtgtacgcccggttgctctccagcgtggacacgcgcacccgcaccttcccgatccggtagtcctgccgctgctcgtccccggcgccggcgaaggcgaacatccgccagttgtcgaacaccgccaccgtgagcaccgtgcacgggtcgtacacctgccacgtgtactgctcgttccaccgcgggttgaggctgtccgtgacggtgcgcgtccgcacccacttcttgccgtacttggccacgcagtaggcgtccgtcgaccccttggcgccgcccttcgtcttcatcggcagcagcccgcacgccccgatgatgcccagctccagcacgcccaccggcggcctccacagctgcttcgccgtcggccggtagtcgctgcacacgtgcgccgcctcgtcgagcacgtggtaccctccttccaggcacagacggaggtgaagccggccggagtagaaccccggcgggccgccgccgggaccaatgccgatgtcggaggtgccaccctcgaggctgaaccacctcgacgcgacgagttgccgctcgtggagacgctgctcgacggagttgacggggatggtggcgtgtccgagcagcgccggctccttgatcatggagcggtcctcgacgaggacgacgaggctctcgtcgagcggctcggacacgacgaacatgaggtcctcctcccacgcgaacgccgagccgctgctcctgctcgccaccgaccgccgcgtcctcgccgactggaacccgacctggatcttgacgcgcacgtcgaacggcagccccggcggcggcgccggcacgcgcaggtcctgcgcctcgatcaccgacgcgcgcaggtaccagagcttgggcgactggtacaccttggagcgcgtgtac

SEQ ID NO: 27218 - DNA, 6444 bp, Oryza sativa
ctacctcggacccgacccctctcggggaagggccacgtagcattggagggcagcctcctccatccagtctctgggaaggagtggccgccgtcctacctcgggcctgactcccctcggggaagggccacatggcatcgggggacagcctcctccgactagtctttggggaaggagtggccgccaccccacctcgggcctgactcccctcgggggagggccacgtggcatcggggggcagcctcctccctctaaacctgatacccccggatccatatcaccgacatagtgcaagaaaaaaatcaaaatccttatattttatatcatgagacggagggagtagtagcttgcaacgaactaaagcagtgacgtggccacgctcctgtaccgctgactatgctcaaccttggcaacgccgtcgacaaacagctgggtttatgtgacgacgcagacgtcacgccaagataattgtgcgatattgagccaccgtgccgccactacttgaaaaaagttatttgcaggcaagccaaatccatctttacgtacgggtattctgtctgtaaggaaacgcctatgaagatagataaataattttttagacggtagattcacccgactacgaaaatattttcagtgaaaaaaaaatgccgctgccggcgtgtgacaccctgaaaatttcaaatctagattacgggaacaaaattcaggattatcaaaaaacttttctaaaatccgtcacgctggattttatctcccattttctgttgcacttggaccacaaggacaaaaatctacggacaaaatctattttagattcaaatattatttattaaaagaaccatgattatgaaatgtattaattaagaaaatatttgtaaatacaattatctttctgaaatcccttttctatgaattagaacctatttgatgtatttgttttataaataaaaacaaatactagatattagaaaacatcattgtaagggataattccctggaaaactatttttacaatgaaggctaatgttaactaacctctgaaaatctagaagttaactattttggagttgttttacaaataaaaactagaggaaatttactagtgaaaccctatttgcgaactaaaatttttaaagaattcatttcaaaagattcacggaaaagtctagtttttcctccttgaaaggcctagcccaacacgcataatgagatttgtgttaattgtgtgcatttatatgtttgtgccaaagatctccgttaatccattcttgtgaatcccaatccttgttgggattcctccagattcgaattccacagttcgatcctcctcctaagttaataccctcctcgagcaaattattcgggcatctgcaaatactcgaacccagtgattttctggaaacgcctctcagtgtaatatccgttctctgttcctcctcaactccactagacggttacagtaccccgtcttttccttgaaccgtcagaataacacagataaatcgatccacctaaagagtgttcccccaaaccgacatccttccttaccctctctttcccccgtttgtcttgtcaagcacttcgatgttaaactgatcgaagtcccaaaattctttcatttgccacaataccatttctttccccgaacccttggaaccttgcgatcgaatcaaaacccgcttcatcttttcgactcagcctccctcagattcccttctttcctattttccctctactcgaaatccccgagttcggtctttcgcttgaaaccactaaagttgctcggcagatctaattgtcgtgcgtcgacccgtatattctcaattctatttctacctttgaaccccaccatgacgaatggatttgtatgccataaaccgctcctaaacccatagtcgatattgtccctacctttgaaacactaccgcgtccgatggatttgcatgcccaagcgtcgcttctaaaaatcccatcatatcgtcgtcaatttattcaagtggtcgcaaagaaaccctaagtcaaatacttgggcgactaaatggccgaatcacttccaatccaaaccccagttacaatttcagctcaaagtcaaaagtccagttatacagtccatttataaggcgcccagttatacatacaaaagtccagttatagagtcccgccttatatatgtttgtggagtgatgcaccgcattgatatatcttgttatttttttagtgaattttaaaaacatgaaaaaacgagatatgtgccctcaagagacaaatagactttctgtatttaacttgtttaaaacctaacaacctgaaattaaacgtttcatttatttccctttaattcgaagtttccaacattctctaagccttagatatacaccctccatcctaaaaagattagcttctgatccttagaagttgattttttcctttttacggaacattacacatcaatgcctcatcaaatttagccttacatatttataaagtaatctatcccatattaatggacgtgactacacagctagtggtagctggtttgtctaaatcatctaccacttcatctataagagatactatccacctatacttcaaatacaattttctcttaaactactcatccaatctacgatccgattacaccgttgtgttcgtaataattaaatctttacaacaagatctcacatgattatattttgatgaaaaatcacaaattacttttatgatatgtctaaattatttttagatttcactaagttacttcttagaaatacaaaagtaaattcagtaaagcttaaaagtaatttacatatgaagtaacttataaaaaaagtaactttaattaatacattttttcattgaacaaattatcatatatatataagttacttttagatttgattaaaatacttcctatacatttataatgctctgaggtgattacttttattattgtttttagttaattccataatttgtgctgattaatttaatttctagatagagtcatgtttttatctctacaacggatttacttcaaatggcatgccaaagttaccttcgttttgttctaagttacttctataatatatgtaaattacttttaagctttactgaatttacttttatatgtctaagaagtaacttagtgaaatataaaagtaatgtagacatatcataaaagtaatttgtgatttttcatcaaatataatcatgtgagatcttgttgtaaagatttaattgttgcgaacacaatggtgtaatcggatcgtagatcggatgaatagtttaagagaaaatttcataagaagaaaaaaatgcacaacctaatagaaaaactacttgcatgcatgtctgtaacgctactggtacttctcacgtaattgtctgcgtcgctcgttaagtctaaatcaagatgcctctcgaaatagattttgcgtatattaatatattttatttttaaatttgtcataagctactccaactccaagtagcttatgtgtgagaagagcccgttgacagccctaccatgaacaacctcggcatcgggggaaagttgacgtcgacgagcccctccagggccttcaccaccatccccatggtcggcctcgcgctctccgcgtcctgcacgcaccagcacgccaccttgcacgccctctccacctctcccatgtcgacctccccgcccagattgccgtccaccgcgtccctgaggtcgccgtcgccgtcgaacagcatcctcaccgccgtcaacgggaagaagtccgcctccaccgtgccgccggcgccgctgtcgtactcgtcgtcgtcggccgcctccgcctgccgccgccgctgctccacgttcctcctcccggatacgatctcgaacagcatcatcccgtagctgtacacgtccgccttcgccgtgaccgccgtgccggcgatccactccggcgccaggtaccccacggtcccgcgcgtcgtcgtcagcacgcggctggagtcgtcgcggcccatgagcttggcgagccccaagtcggcgaccttggcggcgaacgcgccgtcgaggaggatgttctccggcttgacgtcgcagtggatgatgcggtccctgcacttgtcgtgcaggtagtgcagccctctcgcgacgcccagggcgatctggtacctcgtcttccagctcaggacgccgccgccatggccggagccggagccgaagaggtgcctgtccagcgagccgttgggcatgtgctcgtacacgagcagcctccgtgttcggtcggtgcagaagccgagcagcctgatcaggttgacgtgctggatcatgccgatggtgctcacctccgcgcggaactgcttctcgccctgaccaacgccctcgagcttcttcaccgccaccggcgtcgcgtcccccggcagcgcgcccttgaacaccgacccgaaggcgccgccgccgatcttgtcggagaagttgttggtcacgagctgcaggtcacggtacgtgaacaccgtcaagaaggaggaggagtcctccagtctccgcaacgccttcgcccttttgcttctcatgacgagcaccgcgaccagaacggcgagggtcactgcggcggcgacaactccggcgacgacgagtccgatggtcattttcttggtgttcccggtgccggacaagtcggacgccacgccgaggcggatcgaaattctgtagccgtcggtgccggagccgttcgcgccccgaggttgatgaggtcgccgtaccagagcgtgcagctgccgttgtaggagtaggcggtgcaggagcagttgccgaggcacgcgagctcgcagtcgtcgtgagcgctcgcggtcgcggacggcgcggccacgccgccggtgggcagactgttcgccttgggcatcgtgaagaacgtgtcgtcgcgcttcgtcgtcttgcccgacgcctggccgccgccgccgcacggcatctgcaggccggtgatccgggcgcagccagcggttggtcgccgtacagccactgccgcggctgccgctccacgaatccctggaggcagccgcactccggcacagagccgtcggtgcagacgctgaaggagccgcagagcgagtagacgtcgcacagcgtgggctctgaccagaagagcacccaggtggcggcggactccacccacccccacagcatgatctgccccgccactcccacgacgatccgcgacaacagggcctcgtccttgacttcgaagacgacgtagctctcgttctcggcgtcgacgtagaggaaggtgtacggcgactgaccttcaggtcccgattcctccggcgcggtcgtccagttgccgccgccgcctctccagtactggtggctccgttccaggcgagccgcaggtgctggctcgcgccgccgccgccggcgtcgagctcgagggagaacatgcccggggtcgggtcgttggaacctttccaccgaccaggcgtgtcgcctcgccggtgagcttgttccggcggagcttgctgccggggagccacgtgttgtccaggtggtcgaagctctgccacagcacggcggaggtgttggacgcgtcggcaaggacaaggttgccggtgttgaggatgacaccgaccgtggagttggcggcggcggcgatgccggtgatgttggtggaccagaccggtgacctggtggcgcggtcgaggaggaccatgttgccgtcgctcgagatggagagctgcgacgattccgggtcggtgagtggggcctgcctgttggcaacccacagcttggtgtgttctcgggttttgtggtaccagatgcccatgtaccaacgctgcaaggcgttatctgttacgattacgaacaaggaaatggttaggtgatacttctacctaataaattaagggttaattagatttatgccacataaaattcatgtgttgtaattatgcctatgatcttttgcaaattactgtccattgattttttttatatatatatagatttggagcttcaaatcttacatatagttttcaactaatggatacagtccgttttgaagaaaataaccgaaaaagagacaaattaaacatgtcaaaatcataaatctaaagaaaaaaacagttgcaaaatttaattttggtgctctataaccaagtgtaagtacaaactgaatctacatgaatacaaatttttatgcaaaatcctactaacgaaaaattgaaagataggagtaaaaaatctctcacaagtgaaatagcaaactgcttgtaaaaaatgatatttatgcttctatgaccattaattttgaccaaattaccccctttttttcatctcctctactacccattctttcctgaggtttgctccggttcaacaaaaagtaccttgaggtaccggtacctcgcaataccaaaacattttcgatcgttggatctagctgtgcaggatgggcattgctagatccaacaatcggaaat

SEQ ID NO: 27219 - DNA, 14871 bp, Oryza sativa
ggagcaaaccacttttttcagcctcgtctccatgagtagccgcctgtagcggtgtctcatcaccccttccctgatacgcttgtccacgggaagccgccaccacagacaaccccaacagcaataaggtaggcatttctggttatgtacatggatattcctctctctaggctcatattattttttatgaaataaaattgaatcaattatattcgtattcaaaagtagttatgattatgcttttataacataagacataagtgatatcctaatagaataattgtcggtcaaactcttaccctgacaaaacaaaatatgccatctatttttctatagtggaatttattttggcctttacttcaacaagctatagccaattagtaaagagattgaataacgaacgactacgagttgcaaaatcatagtttgattaaaaacaagaaaactactttaaaataccatctcaaaggcagggattttttttatctatggttggtgagaatatgcataaccattatttcttcacaatggtttacatgtagcatgtagttgtctttctcaaattcaaaaacaaaatctctgaaatcagcaaccggtcattgtgttgatcgaattgtgcacacatcactgccggcagctgacgtcgaaccaaagtaaaagataacatcggagaatacttagctataaacaatgattcacccaatcttctcatcaccatatccatcaaagccaatccgacgaaaacttagccacctagaatgccaaaccacatagagtctctaatatgacgtatctaagaaggtcatgacatgtaggatgtcgtcatcactatttcgtccatctggaactaggtttttaccggtggcgaatctaggaatttttttaagcccaggcaaacctaatgatgagtaaaaagtacacttaaatccatataactatgtagactatttagtatacgcatatgtaaaattttcaattgtcgagttctaaattaaggagaagaaaaccaatgtacgaaattatattgatgaaatgatggtcatgcattgttgatggattagattatagtcttgtattatcttaaaatgaaaaatatgatgatgaatgttacagttaagctgatccacttatctgacttatatttgaactagtaaataaattaagaacgtaattacctactacgcaactgcatgcaggtgaatgtctgaaccctgtgactaagcaagataactatgtactgcttagggcattttcaatggtagagacgagtatggtctcttaaacaatacaagattactaagagaccatgtctttacaatagttgagacgacaaaggctctaatcattaactcaaaaaatattccttttattaatattctttctatttttttaccctcatgcaaccatatttccatattatagtgattaagagtcgttgttaagccgttgtcatgcataacaacgatgttttgtctctcccctttctctttcttccatgtcaacaagtattcctaattagcaacgctaagagaccactattgacaaccattatacatgcccttattgcactatatatagtgcactgaatgcagcaaaatgatggtaacaagtactactgatcacttgattcatgcagcgaagcccaggcaactgcccatgctagcctggcattggctctgccgctagtttttacagagagcttatccgacacgaagtgaggaaatggaagtcaacaacatcatcttctttaggaaggagtgtggcacccacaggtgtcacagatgtcgatactcctagcgttgatgacccggtcctaggtctacggtaatctaattaagctcgaccttctatgtcgtggctggtgacaggaggaaaggggcgaggcacatgcgccaacaacatcttgtcctaccatcttcattgattcgaagaggctaacaatagcgatggtatatagggtggaggcctccttcagcccagatggttactctagtagtgtctcaagaagacgtacttgttgtggaggccaaatctggctagaccttgccactgccttcctcgagagccatcgtcgcattctcgtctagggcaaaaaaataggtaggaagtatattatatataaaaagtttaatgcttgtgtcggtgggacacatgcatgcacgacaactagataccccataaattaaatgccgctcgaatttatcaattttatggctggactattattttgcaaaaaaaaaaaaggattttgggaccatataattgtcaatatccaaatccacatgagaaagtgtagtttaaacttgaataaaatctgaaatccagatgtctaccttgttacttttgtgaccgacggtaattttcaaacttgaattaataacctgaaatgcaacaggtcaaagtgtgtaatattacaaaataatgcaagtcaaactaatcggtccacatgattaagaattgaacatcgtgaaattaatgaacacgcagatgcagctacgagtgactgcaaaagcgaaaaatttgacttccgttgtgaactctgaactcttcttccgttgtgaacaaattttgagtatttgtttgtaattgtacgtctttgtctttgaatttttcaatacaatggaacaagacaaacttttatgggtgaaacagttcgagtgaccaacatttcattgtagtcggtggaaaaaaaaggctcggtgactcgttttttttaaaaaaaaaaagttctgaatgatcttttttaaagtggaaattatttaattttgaatgaaaattgttttcactgcggctcgttaataagaaaaatctcaaatgacagagaagaatataataaactatataaaagttcgaaaaaagctcaataaaaatatggccaaacttttttttcccaatccagtgcactgtacaatgtgtacatacgtatatttcattgtataattaattagtccaatcaattgatgcagcttcgccgattaagctttaatttgtatcattcggaaaaataaaactgtagatgtggtggtgaagtagtggtgcgtgatttcatccatcagggtttaaattctaattcttacgaatattacgcatatatatgtgcaagtaattttttaacagaaatttagtaagattaaaaatgtacagctactaataaacttttacctctttgagtatgtgttaggacattttcgtaggtgtgtgagcatggggttgcgtatgtagtgatggtgtgtgcgtacatctaccatgtaaatagttcgaataaaaaaagtaggttaaactgttaactgacactccgcccgattggcaacaaccaatcaggcaaaagaaacaagtaaacaacacacgaacataagggagctagcaaagcgtcgctgaccgcgatcgagacacgatcgatcagggggtaaccgaactgatgaagtgatgatcaggaggcgaggaagaggtagcttagctgctataggtacctggctggaagaagcctaccgcgaacctgccacccttggacaccagcctccgcccgcctgaaagcggccggccgacggccaaggtatcggtggcggcggcgcgcgacggagccagagccaccccttggtgcggccacagcagcaggcagctgctgatgatcagcgccagctgaaggagcggagagcagcggcaggaggacgaccaccaccacggtcgtcgtcgtcgtccaccccgagccgccattgctccaccaaacacaaacctccactagctagctagctacgacagatattagctttgcgaggaggagcgacagatattaattaatataaaaaggaatcgaatcgatcgatgggtatgggtaagttgacgtttgccagcgtcggccggctatccggggtgtgaattttctacacgttaggtgcaagcttattggtacccattattttcgtcttatctaaatattcgtcgtaaaaattacaccctttcttttggtcagtcagccttttgatatctgtctttttaggctcgtccacccaatcccctctgcccttccactccagggttcaatcccatttgccatttgaagttgaatcccatccccttcatcttgtggagtttttaaaaaggagtgcaaataaaatccaaaatttgaaaatgagtaaaattctaaaaactacctaggaacatcccgaaaattctgaaaaaaaataaaggactgaaaattactgtaaaattcagttggtaataagtaaaatagttacaatgatcataaaacatgacaaactaatgatctactagaaaacatgataaacttttaaacgagcaattagtgcatgctgtccacaacatttgactactcaatttaacttcacaacctttgatccatcatcatgacaatcagggttgacatcaaacactaagtacatacacattgttctataaaaaaagccaaaggatcacagaaatttgattcgtccaaaagttaagaaattcctctcatttcatctccacatgattactccatgaatgcctgaggaaaaaagtaataacgattgaagtgcgatgatgcaagaatgatcttataaagtcatgttcatgcgtagttgaatgtatgactatgctacacttcattgtttccgatatgaatttttgacttccgaccaatatcggtagattcctttccgacggtcccgtttccaatataccgatattatctatatggttaccgtttatggtataccgttctgattccgttttcgagaaaaaaatgaaaatgaaaatggtagagggtttttcctaccgttttcatcctaatcctcctggtatcttggtagttgtacaaggagcggaactccagggttttcgattactctctcttcggtttcagttgctttggactccatcctacagaaaggtcgtccgtggtcgttggcggtgccgctgtttttcgaggcctgttgggaattgtttttcgagtcctgttgggaatatagtgtggttcctccgtcaccgatctccttcaatattggagcagcatttctttttcgctattttaaccatagcagtcttttttttcttctaatatattaacgtgtgatccttttgcgcgttcacgaaaaaaaacccataaatccataatagaatagctaacgaccagcccaaacgagtctgaattctgaattatgaacagatcatcaaagatcacacgccgagtaatctcatatttcgagtgtttcacttgccgaattttcatttcttgggttcttcctgggtctcatatattgaatcatattatcatattggagtatattttaaacatgcgaatatgtgatgtcgtttacttccattagttccaacaatctccgagctcatcacatattccacaatatgcatatatatcaagctgagccattcctggtggcgaagatcctgtgcgagacgacgacgccgagcgcgaacgcggcgacggcggcggcgatcgcgctcccccgatcccacctggcccgctccttctccatctccatctgcatctccgcctctaccctcgcgtcctccatcgtcgccatcaccacctccgccgcgccgcccgcggggcgcttcggcacggtgaggcacagcgtggcgccgtcgaagcgggcggcgatccggtccacatcggccgccggcggcagctggaactcgcggtggaggcggacgtgccccgcgggccgctgcccgcgcaccgtgacgcgccccgcgccgtccacctgcacgcggaactcctccttcctgaacccggcgaggtcgaggcgggcgacgtagcccgcggcgccgtcgtgccacttcacctccggctgcaggtcgacgtcgcggggctccacctccgccgccgccgctcccttcgccgatctcgatcccttgggcacgcacgtcgacatggtggatcgatatgctaagctatagcctcgcgggcgatctggaccaaggaggagctatggatggtgagatggagctccaaggagggagccatatatacttacgtgattgtgtgttgaattggttattcgaagcgttttcttcaaggtgacacaactctcgatcgatcgatcgcaccaagaaaattggtgtttattggcgtcgagggttgggtttgggtagggatcttggttttgtctcgttttccaagcctacaagctacgcacagtactcttctacttacatttacttgctttcggcatggatgcatatacatggcatcaggcatctgctggttacctaggactacgattgccacctacgagaaatgtccaattcctctcatctgaagaaaacgtgagcgggattccttttataaatacatgattttagtaatacaggaaccgatatatgaaaaatataggaatagaattgacgtagtatatatgaatcccacgaaaatcaaagtcacatatgtttaaaagataatgtgtataggtggctcacaagaaaataacatatgaattttgatggattttatgttgcttttgactactcaaaggaaaaaaaataaaaagttgtttgagctcaaatcctatatatattccccaatggaatggattctaaaagaattggcatatgctctaatattttgttccaaacaaaacatgtgtataggaaaatctctaaaattcttatgaatttcctccaatccaaaagagcgggttggagctacagtacttccatcggcagatcaattgatcaagtcatcaagcatgtggcaccatcttgatgttcaattatggttggtcattaaattcttcctccatatttaaatataagatactgatggctttatatggacaaattcaaaacttgaacaaccgatagctctcaaagatttattttgaaaacataaaaaacaattatggatagatttttctttataaatactattataattttgttagttagtagtcaaagttgaaaagaaactggaatgtcaaataatgttatatatttaaatatggaggtagtataagctattagttgctagggaaacccaactgcgtacatagcaattataagctagttccattggcagaatgttattgagaaacacgagacgatgtgcattttatataaactagcaatgtgctcataagtgcaatgggataaactaattaatatttttttttaggaatatgcaaaagaattgtgcatctttatacaaagacaccatggccgcgaaagggtatacttagtaaaataagaaaaacacaccacgctgcgtgccaacaccactaccatagcctgaggaagagacctatgtgccaagacggctgccccaacataactgattgtcgttgggcctacaatgcagctatgggtgaaagaacctctaaaatgatgcctccaaggaggttatgacactgaaaacaccgtcatcgcttgtcaaaggatacttggatgtggttttcacttaaaggatcccaataaaaaagatgagggaggcacctcgagaaatgcctttaagagggttgtggcacccaaaggcattaccgtcgccggcctaggaataccatgctagatttcccatagaatctgcctacacccctgttgttgagacctcatcgaccaccaatcttgccaacacatcatcaccaccacaacgtcgctctctacttgacttctgtcctactgccagcacaaccacaaccatccatgcctacacactggcacgaccatgaccatgaccatgacaatgaccaccgaccgttgcacgatggcgaccatattggccttcctcctatgccatcacctcaccaagaaggagcgaggtgactgccaacacccaccacttcacgtcggcaatctcggatttcctctcctgtcatcgcatataccgtctcaccatagagttccccacgatcagatctaaaccggccataaaagggaggagctacaaggagatgaaaacgcactagcaacagaggacgacccgtcgttgccacccgtgatggtgatgttctgcggctcgatccaagtttgaggccccgaatccggcggctgctccaccaaccagtgcttgcatcactgccttctgcatggtcaacctcacgagtgcatgcgctctatccgtcggctgcttgctgcatgggccaacatgctgctaccagcctccgccttcatcaatgcgtactagacctctgcccggtaggccccacactccttgccaactacagaccctcgccgttgcaaccccgcctctagccagtaacacgaatagcctctgaccacacccactacatcctcagcaccaagtagatttagagtttgttgtcataggaggcaatctttaggttccaggggcacactgtgcaaccatggagaaggcctcgctgtcaccggtgacctaccgagcggccgtcggcgacgatgacgaggggaagatagggtttctggagggttgggaaagatgcagcgtgattcacttagtgagtcgctggagcggctcatgagacctttttagaagaaaagtttcataatctcaaacctaattaatatttatgactaatattaaataattgattcagtttcgacatatctttgtatgattgcatatcagggagcaatttcaacatctatgactcgtaaacatgaccatcttcgcaccagagagtttctttttaaatgtttgtgttagggagcttaattcgatgcgcatgcatgtggagccatggagccgagcagagtaaagataaatcaccaattaacaaaagagcatggaggtgaagatagacccgagcatatctttcttttctcaatgaaagcctcaagaatatctcaaatcaatcttaagaaaaaaaaataattcaattatctgcttatgcacaacccactgaattttgcgtaggaatcttttgcacatgtgcagatgcgtatcacaataataatcatgataggaaagcgatcttgtgcagaataagaactcgatctgatgaaaagcacacatggacatgaatcggacatcatatcaagaaatttgcgaaaatgcttagtgacgtaagtccgggcgactccaaaatattggacacactcgtccttatccagaacacttagctacctcctccaccacacgttcccacatctcttcattttatttttaccctccctcttgctctatctctcctgaaagacttcatcccaatggccatacggtggcagaggaggcactgggcctcgcttcgttaaaaacacgatgatgacgacaacggcggtgcagggtacatgacaacagcagaggcagtgtgtcagggggcatagggcgacacaggatatgatgaagacgttggaccttgccgccattggcggccgccgggggagggggcagggggcagggcacgacgacacgggatggggaaaaggtgttggatctagctactgacaaggaccgaatgctgatgcagctggccttagtcggaggacgcccgtcttgcgccactgctcgcctgcgtcttccctgtgtcgtcgcctcccccgccgcatcggtggttctggtggctgaagtagaagaagacggaggtgggttcattttcttagagcttttagagattttgcaccccgattgtttttcttgttgcactttattttatcaaggtgtttcattatattttgatttggtgttgcatatattgattctttgtgttgtgattggtatgtttcatgttgtattttgtcacaccccgatccggcaccgccgtacaatggctcctgacaggagcgtgtcgtaggaaaacggcgcgaaccacttcctacgaaaccgcgatcacagtaccagtcccaggacatagtgctggtacccacggtgacaaatatgattcattgcaatccttaaaataaatagaggacttatttaccttaacttaggttgcagctcagacagcccgagaatacaaccgacgacgcggacgaggaaacaccaacaacagcagcagtgaaaccaacggactaacacccaacaccacaggcgacggctgggaaccaagacaaaaccctaatcttcacttcacttcatcttcaacttcagggcagaggaactatatatatttatatagagcaagggtgagtactttcgtactcagcaagtcacgggaataggtgtttaatacaagcttggaagagaggcaaggttgttttgcaaatcttttgtttgaaatcattttgaaatcactaagtgatttatttcttttcaagtttaggccaaaaagagacttgcgtctcgattcgacttaagagatgcttttcaacaactcaaatggtaatgtaccgacctcccaggtcagatcattacttcttggctcccagagtcatttcacttgattaagcggctcccggagcctttttcattttctcggactcccagagtccagctgcccagcagcaaagcaatccgtttctactcgagaagcctagtctatgatgcccacagacatcccgaatcacacagattcgtttctgaccactcaggtcatccatctgccacatagactgattctggttacgattcccattccacaacaacttttcacaaagcacaggcaaacaaatctacgcaacgggaaccacctcacatccgcccatgaccgtgggcacggctgttcgaacagatagttaacctctacagaggggtacactttacccacaagatacgaacttattccgaacacccgtcggtgtcggagtttcgcaacaaagcctttcctaagccggcccagggttacctcatgccacatagaaggatcaaatcctcacataaatataggctattttagttttcacaaatcaaactccaaccacctcgatcggtaattcagcaagcttctcttccttgcttaccaggaacccggtttggctccaaccgaccccgccccggcgttccccaactattggcatgcaaggtttccctaaaccgactaattacttagccagggtggcccataccaccttgtggttgcactttgttatgcttgatgagtttcccacaggaatcggtcctcatatgcaaatacgggacaacgccacgtaggcacggcacccgcatcgcgagttttcacaaactattttattttcaaacacaccgacaccacatgtcgggttttcaaggcttctcaaacccatttcccaaattttcgacaatcaacgatgtatgtgggatatttagtatacgcgctcagagagcacgaataccgaagtaccacaaggatggagcaacaggaaatcagggtagtacagcctacaggaattagtgcgactactgggtaggtccgtcgatttggcacgcaaaccgaggcctagcaaattaagtgtgtgattctaataatgcaagttacaaacaaaataataatgattttccaattataggagcaattgatcaaagggtgacttgccttgcttaaggtcttcacgaagcttcacgaatcttcgagaaaacccgcgatcgacgaaaatccggtaaccgcaactatacgcaaacaattaaaaacctacacaaaacccaaaataaagatcatatttagactaaataatagtgccattaaatagatctcaattttacggaattattgaaagttgaacggagtcaatcggatgaacggatctagagatatgaatttttgaagcttaattggaatttctggaatatgagaaatgatttgttggaatttttggaacaaagaaatgatctattgaatttatggaaaagaatatacccaagaataccctttaattactcattgacatgtggggccaactggcggggaagatggacttttgtgtatgtgagttgatttggtggagggagaaaatacagactttttaggccgagcgtgaggcgcggcccaaaggagattggcccattagggctcgggtggggagagagaggcggaggctgactgggcggctgacggggcaggcgcggacttggtcaagcccacgtggactgccacgcaagcgcgagagagagggaggccaggctcgcccggatcggacggctcacggcggccgaggggcgccggcgaacggcggcgaaccggagtgaggcgcggacactggaagcaagagggagtcgaggcgattccatccaccggctcggatgagggagaggcggcgcgacggcggccggcgacggcggccgtgcggcggcgggatgggtggcacggcgcgggcgcggccggcgaggcgggcggccgcggaggcgcaccggggagtttcgccggggctcaaggagggtggcagcgcgaggggttgaggagagaagggccgacggcggaactgcggttgcgcacggcggcggcggaaacacggccgcggcgggctaccgcgagcgtgggtgcggcgagaaggaaaagtggggagcggccaatgggaagggggcgcgaggaactccgggagtgtgacggcgagctggttagagagagagagagaggccaacgacggcgcgtggcgcgcgcggcatcgagggtggcaggatgatagcgagaagagagataaagagggtggtgacagcattgcgcgcggtaaggggaaggggcgggggctcaccggcggccacgaatcgaccttggcggcggcggtccgctgatgggaaggaggcggcggcgcacgactgggttccagggaacggcgttcgcgccggtggtctcggttcggggacaccgcgtcggccgagcggcggagtctagcggcgaatttgacaccgaggcggcacggtgccgaggcgagcgcgccggggaagggagtgcgggagtgcgggggtggtaggatttggggacggcggtggagcggcaagaaccgaacgagaagggcgctcgaactgggttttataggcggtggtaaagtcggtttggggggaaggggggggggaaccgacctagacggtcaaggagcgggagatggcggtcgagcgtggtcgcgggcccggcaaaggaggcgatggtggatggaagggaaaaagccaaaagcggaagggggaaaggagctttgctcccttccggtttttgggccaccttagggaggagacagcgcgtgggagagagaggcgctgcctccgcattttggacgcacgcgagctgtggcgcagaggtgggtgcggcggcagagtgggcgcgggcggctgcgcggcgcaggcgggccagggcgaacggcgaccgagggcggtcggccaccacgcgggagcgcgcgcgcggagcaagggcgcggcggaattcaaaggcggaggcaggaatcggtgccggtgagtgaaacggggagaggaagagcgagagagagagagctcggctcggggatggctcacgcgcacgcgcgtgcggcgaacgtgcggagcgagggaggggaaggctgagagagagaacgggccgggccgagagagagagatgggccgagggaagaaaaccggtccacaaaaaggaagagggaggagataggcagagtggaggggatccggcccatccaaaattagaaggaggcaaaatagacttctacagagaaattgaattggagagaattggagtttaggtttgaattcaaatttgatatttggacttaggaacatagggtggagtcaaggaactggttcaaggaagactcggatattttggaatcgagacaagtatttggcgaggattcaaaggaggcgattgaatttcggagacttgaattggaattggaatcttgaggtggacgattttgatagcgacgagagggaacaacgatggagattgaattgagatccacggcacgacttagactctcactcaaagaacgaaattttcgcatataggattttctagaattagttttttttaacgtctcacgaaaagcggagcgttacatatttggttgagacactttcattcacgggataaaacatttttccccgtctgatgaaacattttaaacttttttttattgaatagtgaaacattttataataatacattgcaacattatccgatatgatgttttgtaaaacatcggacgtatgattgtggcactctctagaaattggatgacgatttaatcagtgcgaagtcgtttttatccaagactttttcatggttgctgtttgatcggaatcgggcggacgcaggacacaatacctcaccgtgcgacacactgatcagtggacgacggaccaaaacccctgacagaaaacactattgcgaagaaacaaataagagcacaagcctactgtcccgcacctaagaaacacacacacacacactcatgtggattacaggagttatttttcatgcatgtactcagtactcccactaatcccagcaaatcaatctctgagctcacatacacaacatcattcatcaagcccatcaattaaccattcctggtgtagagtaagatcccgtgcgacacgacgacgccgagcgcgaacgccgccgcggcggcggcggcggcggcgaccacgctcccgctgtcccacctggccgcccgctccttcttcttctccgtctccgtctccgtctccgccacctccatcgtcgtcgccatcaccacccccgtcgccgccgcggccgccgcggggcgcttcttgggcacggtgaggaacagcgtggtgccgacgaagcgggcggcgacgcggtccgagtcggccgtcgggggaagctggatcacgcggcggaggcggacgtgcggccccgccgccgcgggccgctgcccgagcaccgtcacgcggccggtggcgccgttcacccgcacgtcgacctcatccttggtgaacccggcgatgtcgaggcggacgacgtagccggcggcggcgccgtcgagccacacctgctctcgcaggtcgccgccgatctggatcccttgggcacgcacgccaacatgatcgagctatggttggatgggttgagaacttggatggtgaga

SEQ ID NO: 27220 - DNA, 11907 bp, Oryza sativa
agatttaacgtggaaaaccctcccaaaacagagagaaaaaaccacgggctccagccagcaaaatatcttcgctatatctggggtgaggttacaacgctacacggcggcttacaagaagtatatatatggtggaaccctaaaggggatgacgatccgtttcgtgggggctccgccccgcacccccgagcgtccccaggtgcacggcccttcgctctactacggtagaagctgtcctttattaagtgtaaatgaatttgaatcacaactcaacatgtttgtgtgttgaatttgtttattcgaagtgttttcttttaaggtgacacaactctcgatcgatggtaagaagaaaaataggtgtttaattgacgtcgaggtttgggttagggtagggatcttggtttcgtctcgtcttccaagcctacaagctgcgtagagtagtaattacccgcgactatacgaggttagcagaggtacgttgccacctatgagaaatgtgcaagtcctctcatccgaagaaaactaagtgagtgagagtgtgagaccaacaaaatattctaagactcgatgtgtggtcatgtcgtttgggccatttactccctctgttttatattataagtcgttttgatacgttgtgcaagtcctctcatccgaagaaaaaaaccaagcgagtttaaccaactaaatattctaagactcggtgtgtggtcatgtcgtttggaccatcaatattttgtactccctttgtttccctttgcttcgtattataattcgttttgactttttccctaatcaaactttattgagtttgaccaagtttgtataaaaaaaatataaacattaattaaaacaacagattagttttattaaatctacatttagtatattttgataataagtttattttgtgttaaaaaatctattatgtttttttataaacttggtcaaacttatttaagtttgactaggaaaaaatcaaaatgactttcaatatttcgtacttttttttttacaagaagggctaagccgtagagatgtggtaaaagagttatgggtttatgaccattgaccccagtagtacactcactgaaatttacatcctagtgcccacaataatacacaagtgggtacgttttaaatagaatttcactgaatttactaaagaactttcatcacttgattcgaatttatgtgtggtgaactcactcctttctaatgttccactgtagatttgacagaatggaatgtagaaattgtacatatattgggttcttttaaattttcattgcctataataaaattggttgatatggcaagggtttgtttgaatttacatttgttgggtttcatttttcatcatctataagggaaagagtttcatatacctcccttcagtggcaaacacaggactaaattttaggaggtgccgatgaaataaagcatactaatataactagattaaatatgaggacttttacggtacattctacttaaagtatatactatcagtatatttgatctaacggtgtaaattcatctgatcttccttccaattattttacggtataaattgaatagaatatatttgtcttttaatctatttgcgtgagggttaattttgtaaattcgcgtttctaacttaatcaaatccgggcttttgcgcccagtcaaagcgaattttttttgaagcggcgcgcatgggcgaccgccgtcgctggctgcctttgcgagcacgccgcgccgcgcggccgtcgacaaccacaatcggggccgccgccatcgggaatcgattcgatttccctccccctttcttcacccaaaacctattagtttttccaaaaatccccaaatcgtcaggttgcgggaagcaagcgccgacgggctgcggaggtttgcgggaggcggaaggcgacgagcagtttgtcctcaacgggttcaccgccgcgaatctcagcttcgatgacatggcgacggtgaccccgaacgggctgctcatgttgaccaacggcacgaaccagctcaagggccacgccttcttcccggtgccgcttcagttccacagggcgcccaacagcacggcgatgcagtccttctccacggccttcgtcatcggcatcatcggcgcgttcgaggaccagggcagcggcaacctggcggcggcaggtggcagcagcagggcggcataattagcataactaatgtaattagcatggttacataccaatataactaatgtatgaacaattctgtgactactatccattcaactcccacgtttcaatcttccagagaaggccttgaaagaagaatgttcagactccaaaaccattaacatcgtttccaactttagacgatatattagagaatccaatttaatagcacaattttttggagcaatgcagtatagagttgggctgaaataaacagctgttacaagctcaaattacaaagcaaaaaaaaaaacaaccgaaggaattaatattcatccaatggaaataaatctctattttaaatgactagacaacccttttcagatttttaacaaataccaaatctaccctatcatatactggtagtatatatttacagtacaatgtatcgtaaaagttctcttaaatataagataaatctaaaaatcatacataaatatattgtaagttcctattaaaaaccttgaaaaactatctatcttttgatcatctagtttttttcctctatctagcaacaagtagtaacatgtgtgaactattggatctacatctgctttggccagctgatgggggcttgagcccacattgcctccctgctaggatcttccctttgaaaccgaaatctaatcctctaaaatttgtaataccatttatattatcccctaaagtgtttcggacatttgtatcgatgcttgtttgtaagctcaatagtacaaaagaaagataagtggaaattttaactcatgcatattatgtagtacaagtatacatgcatttcgatcgatacacacgtgagaatgatactgggtgaattgattaattaattagttgttccgggagaatagtttggtggagacgaagacgccgagtgcgaacgcggcgacggccgtggcgaccacctccttgttcttcccgatggcctccgccagcttcatcccttcctccgccgcgcgctccttccaccacgcggccgtcttctccggctccggcgccggcgccggcgcgggcctcgaggcggcctgctgcgccgccagcctcgccctcgccgcctcgatcctcctgtccgcctcccgggacagcctcgccttgtgttcggccctggccttctcctcctcatcatgacgctctcgcgccgccggctgcggcggcgccgccgcgggggctgtagccttgggcggctcctctttcttctctctagccgacagctgggtcctccgctcggactgatcactgtcagtcttcggcggcggcggcggcggcttgccggcgacgtcgtgttcgtcagccttcttggtctccttctcctcctcctgattggccttgggcggcagggcggcggcggcggcggttgtcgccggcttcttgggcacggtgaggacgagcacgctggcctccagcctgccggtgatcgcgtcgaggttgcacgtcggcggcagctggaacaccttgttcagccggaggccgccgtgctggccgcggacggtcagccggccggcggggtccacgtgcacctgtaactcctccttcttgaactcttcaaaaacaaaaaataatcaaccgagaaatcaagaaattaacagtaaaaaccaaccaagccaacgtatagatcaccatttcacctcaccattacacatgcatgttggaagaactaattaaaacagttagtaattacctgggacgttgacgcggaggagatagtgggcgccggcgtcgagccactcgtagaccggctcgaagtcgccgtcgcgctgctgctgctgctgctccgccatggcgcctagcttagcaagtgctagctagctacctttccttgcaattccaatcgaaatctcctacccggtgagatgcagctagctctgggtaattaatctgagacagatcttgagatgagatgaacaagcgatgctcgatgctgctcagctgctgccggtgatcgatcgatcgaggcagggcacgcataaatatttgcgatcacgacgcaccctggcttgtggtgcgaggtcaggtttaagattattccaagctttttcttgaggatcacatataaatttcggtcaggtttaagatgattccaagcttttcttgaggatcacagataaatttatcatcaagaattggggaaaggatagatttcgcgcggcgacgtgtccggggcgccggtgcctttcggctcgcggcacggtaccgaggttacgtcttcttcgtcgtcgtcgtctctccaaagctagctatagttaattttctttcgcgagaagctttagctagctaattaattagctatcttccagttttggatcgatcgaatgtactgtagcgatcaggtagtttatatgccacatgttcatggctagctacttcgccggttgatggatcgcgtgtgccttcgcgtgatcactctatacttgatagtgtaatggcgatggatatatggtttcaactctaatgtctcgtgtttaattctctaacatgctcacaactttttgtaattatttgataaccaagttcctctttgattgtctttttttatgactgatcactgtttatttctgaagtaaactgaaactttcagtccatatgcccgtgtttttttttcttaatcaaactggataggctgaaaagcggatatgtaggcttgatccaagcccagttgcccactgaatacatagtccggctgtgtttagttcacattgaagtttgtaagtttggttgaaatttgtacgatatgatagaaaaattgtgtgtgtatgaaaggtttgatgtaatggaaagttggaagtttgaaaaagaactttggaactaaacagggcctccatcctgtccagagtccagcagactcatccttggcccaatccaggtccagcctagctgcgatcacttcgagtaaccaaacttgtgatgaaatgctgaaagtcacgtttggaacgtcgcccacgttagccttgccaaaatattaacaagacaaagttttgggacaaaattccttatacgtccctccactttgcgttctaaatcatgctctatatgtctctgatttttttcatttttatatcccatctatgctcgtccctttagttgaccgatcggcttcttctaaaacaactatgttacctttctcatacatacttatgtgctacctacttaaaaaaacatggatctcagtgttaaaaaatatagtaaaatcaaacgggacaaaaaaatatatatatttgtcacaattttaaaaaaaaattaaaaaatttcatgaaattcatacaaaattttcaccaaaatttgaaaccccaagttttatttggatttgattttcaataagaatgttatggatttcatcaaatttgatttaaatttcatttaaaaaaatgtaagttctagttttcaaatttgtagtcaaataattctaccatcttttttatatgaatacttttcacattgagaattatatttcttagagtgcataagtacgaaagaggcaacatagtcattttggaaatatgtaatggtaagtcatctaatgaaatgggtgtataagggatcaaaatcaaaactcaatggcgtataagggatcgggcaaaattcaaggacataaaagggacggatagaaaactgaggcacataagaaattttcttggtttggtgttgccaaatttgtggttagaacttagaagttttgcaattaatcaaatagatctattgggaatatttttgtgttgtttgttagggcaacaacccaaatatgcccaaagtgtcctattgttttgcattcttttttctccaatttgtttatcaagtggtttgctacgaattacaatgttgtaaatgcgtatgatccttcatctgctgttcttcgctcacagtttgtcatatttgaacttggaaggtttgcatgtcttctttttttatggtcaaaaaagaacagatgaaaaactatgcatggccgtcaatggcttgggattggatgaggactaacaacaggcaatagtccagggcttcttggcttcatgatttctctaataagctattgcatattgtgagccttgtctctgttcatgatgtctctaatgttatccatggttgagacttattaaccattaacaaatgtatgtagctgcctggctgcttgtggcagtaaagtcatttcttcaccttattaactgtcactgcttcctcagttgctatcagttatgagttatacttcatctgaattacgtgggaactaatcaacttgtaattggaatcttggcaaattgttctccttgtcattgacattaatgtttcatactttcatataggggattttcccgtgcaatttttacacggactagttaaattggatttgcatttggaatacaactcttaggtcctatttccatagataaattctctaaattctcatatgtgcaattatattttgcatacagtaaaatatttaaaatagggttggatttaatatacaactctttcttatatttatattatatatatatcataaatataatttattttgtatacaactatttatattaatctacatcgttataatttgatccaaccacattctaatggttagattttgtctcttcacttaatgataatttctaggtctctataacgagaacatggtgtgtccttttcgagctatctttataatatactaattgatagatagatttatttctttcagataaaaatcagaggcgacatgtcagaaatttgtcgttctagtagtacaaagaacaagtacatggaggacctagcagcttgcatgcacagggtcttggcatctcgtcagcccgaaatgatcgtccatgtctggttgtgtgcatggatgaatttcttagagccgaccataggtccatagtcgcaattggctcatgtttttatatcccactacattctggtgttttgcaatccttaatggcatcaaggacacactaggtttgtaagttagttcgtcaggaaacaaaataattagtgcctcctgatgacatagttagtctgtttctggataatcatggagaaggatatagtagtatacagatcaagttgtctttactccttagggaaaaatatcttggcatctatttaagcagatgtgtgctcaattcttctgcacagccttaagccattccagttccagtgttagtactattccgatagaggttagctctggattcattcatgtcacatagcctactttgcctttcttcttcttcttgtgcttgtgtcaccataatctagctcacttagtcacttgagcatgctaccatcatgttatttgccctgtacaattgatcacatttttttcttcaggggattgtgttttaaatcatcttgtagcttgaaattgagaactaaatgttttatagtctagcaggtaatgagttgttcagtcagcgaatcaatgtctactactctatttggttggtggattgccaaaaaaaaagtgaggttagaatgatatgcaggtaaaattagccaaaaagtaagtctatgacatgtgggccacaagaataaaaaagagaggggagaccggtttgtgatagtgaactaaacatttttctgtagaaatttgccaggatttaggttggcactgttagtcacgtgatgatgtgccatctctggctaatagtatcttgattttttttctgaaatgtttggttctagtaattcaagcctgttattaaacactaaccgatgcagttctaggcaaaattaaaactgcacaacagaacaagttgttcttcacgcagaatgtcacaaacctcatttttcagtagtttttttttaattggtggttctagaggttttgaggttcgtataggagtaccccatccttttaaatttgatgaaaattttgatgaaataaatgtaaatttaatattatgaaatttcaaagtatgaggtaggaccatctaacgaaaatttcttccgccactggttttttttcaaagtcttttatatcagtctccctgccctgaaccacgattacagaagagaaaaataaggaaaggaaagagaaggcatgggcaacctgttgtgctgcgtggaggtggaggagtcgacggtggcgatgcgggagcggtttggtaagttcgacggcgtcatggagcctggctgccacttcgtgccctggtttcttggcctccaggcccgcggccccctctccctccgcctccgtcagctcgagatccgctgcccgaccaagaccaaggtcacttcacctcaaatcactaaaaaaattacactttcctacgcaccagagtttaaatcctgatgtctacaagacgacacatataactgtgtgtattattagttgagttagagaccgtaagttattacttttattgtgaaaaatgaagtcacctactcatctcgtgttttttccctctttctgcaggacaatgtgtatgtaactattgttacgtgtgttcagtaccgtgctctagccgacaaagcgagccatgcgttctacacgctcatcaacaccaggtcacagatccaggctcacgtcttcgatggtaattactttcttaattgttactatggtgattttcgtttatagtaaagatgaaaataaaataaaattatggtggataaagacaaagttaagacacgaaaaataaaaaaattaacatatgattaattaagttttaattattacaaactaaaaaatgaagttatctaatattttaaagcaacgtgtgtatatataaagttttcacatcagttataccgttttaccgtttagcagtgttaaaattgagaaaaaaatctatatcttactcggaaaagacagttaagcatgtactaaaaagataataactgtgaggcatgcagtgctgaggacgagcataccgaagctggcgctggaggaggtgttcgacaagaagaaggagatcgcggaggcgctggaggaggaggtggcggaggccatggcgccgtacggctacgaggtgatgcgcgcgctcgtcgtggacgtggagcccgaggaggccgtgaggcgcgccatgggcgagagccgcgccgcggccgacagggcggtggcggagcgggcggcgcgcgccgggcgcgccgaggccgacgccgaggccgcgcgcctcgccggcgtcggcgccgcgcgccaccgccaggccgtcgtcgacgggctcagggcctgcgtcgtcgcgttctgcgccgccgtcccgggcgccacgcccagggaggtcatggacatggtgctcgtcgcgcagtacttggacaccgtgagggagatcgccgccgcgtccgcgtccgggtgctcggcggcggcggcggtgccgttcctcccgcacggccccgccgcggcgcgcgacgccgtggcgcagatacgcgacgggctgctccaggccgtgcagcctcctgccgccgccgccgccgcaagcgtcgccgccgttggccttccattgccattgccagtcgccagcgtttgcgaaggtatcacagaagagcagtagttgagttgagttgggttgccttactgtgtcagtgtgtaataatgccaatggttactgcaaatctagctactatatatgctgtgtcttggatgtgttgtgtacaagtgatctggatcaagaaaagtgtcatgcagtgcttctcttgttctttttgcaattgaattgcttctgcaaggatgccagaacttaatgatacacattgagcatgtgtggagcacacgaactaagcagaaacatccctatttccctttggagagactaagcaaaatccatgttccaggttttactgaatcttcctttcatttccatcaactccccaagcatgggaacaagatttatatcatgcataacagtatataccacattaagctctccaagatgtcaattacgacactacgtaagcatacaacgaaaggatttacataccagaattcagatggaaatccaaccgtatgatggaaaaccagatcaacgaattcaacaaagatgtggaacacagagatatctccatcatatttgacagtattcagcaataggtctcaaatcacccaaaattattaacaacaggcgccgaggataaaaatatatagccaatgctaatgtttgcctagggtaatggtggggaaagaactcaagatcaaaatgaagccacaatggtagctgtggccatgttttttccatgttattccaatccacaagaactgaagaaaaattcctaggatgcaaaacatactcaatgcttgagcaccaaggacaagccaactttcgtgctcttctcaattgccttggtgtcaacctcaccagagatggtgattagcgatttgggacgccattcatgctggacgagcgcgctggccatgccatagttgttgaagcgagccttcactgtcgtgtgagggtccaatgagtgctgggacccaaagatcagtgtgctctcattccttgagaagctgtgggacagctcagctcctacggcagtgttcgaatggtgctttaccaggtggtagtaggatgcaatcaaggtatcaccatgattgttcctggacaggaattgtaaggtcagttaccaaactaaataaactgatacaggagtaatgaccacaacaaccagtaaacaagaaatgttattctggaattggcttctcagtcagacttggaagtaacatgcagtgctaatatatgataaccatgcatagaatcaatacttacagatgcagagaagcaataaggtctgaattggttagactcaatgcagcattgtacttggtgaaattgctagtcgcagtgtcgaatgcaacatcaacaccaactgagagctctttgcttccaaagacaccagaaaggttaaccataggattggaattcaggccaacacttgcattgatgccagcatattcatgaaggtactggagttcaagctgttaaggcagccaaaaaataatattaattgcaatgcctgtcatattggatgttttaaaaaaaaagaaatggagggctgcccaaaaataccttccctgacctctggtctggaactaccaaactaagaattgatttcaaccctggagttccaaactcatcaaccgtgactgttgttaaaagctgaaagatacaaaaaatcatcaactcatgattatgcaggaaaaactacagtattaccatgaacattatgcgtgtgcaggaaaaagagaactgaatgcttacatcggactctgagtttgctttgacatcaacagtcaatttcttgttcttaagctgggtttggagctcaccaaagacagactcatttttccttgttcctgcagctgtgatagtctgcagtacaaacaaaaatcattaacatagaaagcacaaatcaaatgcgcagacatgctgaaccgcaattgtactgaattgctgataacatatcaatctcctcggtaaacaattcataaccacagaccatatgtgctattgttgcatggaaggtgccaattgcacttaataatagatttcacagtcgcaatgtgacggcaataaatctatgatcttatcccccaagagacattttacagtgcttggaaggttttgaaggtacctccacttttaaaagaaatatcaggtgttgttcacttaaaagtggaggtgcccctatgtattatagactagtagtgcgcaagcatctataaagtggacatctcatcccatcaacatacatcatctgatcttaaatatgcacgtatgtagatcctaaa

SEQ ID NO: 27221 - DNA, 2436 bp, Oryza sativa
ggggtgcaggtggtgagggtgaacttgtggtgcgtcccgtagtccctgtaaagcagatctgcggcgtcggcagcggcgggggccatcaacaacaaacgtcacgtcagcgaggtcgagcacgagaggtgaacaacaaccatggcgagaagaaacgagagtgaagggagaggtgaggcctgggggcgcagggggcgccgtacctctggtcttcttgccgatgtcggtgtagagccctggcgccatggatgccgacggcgtcgacggcgagagggaggggatcgatatcgcggcggcggcggcgaaggcggttaaaacggagtcgcgcttcgctggctctctctcgctgcagatctcgtggcgtcctcctcttcgccctggacctggactcgctttttcttttcttttctctctaaaaataaagaaatgagctttttcttttttttctttcttttttttctttggctgggcgtgggcgcgggtgaggtgagagggagaggggatgatccgtgtcgtcgcgtcgtgcttcgtgcggactgcggagcaaacggcgggtcaggctgtcagtggggcccgcatcattcgacgccgccgtggtgggcatctgcgtctttattctaagcacgtgcgtcgggaagggtggttgcgggcgaccgtgggcttggttgggcctggcgaaccgtacagcgatctgatccctaggcgggctgcagggataagttcattttgactcccttaaaagtgacccgaatctaatccgtagccctgaacgacaaaccagatatcttgactcttaaacgttaatatcagtgtaatttgattctctcggtggttttggagagccgttccgctgacgtggcatccatatggcagtgttgacttagtatgccgttgacatggcgcacaggtggcattaaaattgaaaacatacacgtgagacccgttcgtcattcacacaaaagaaaaatatatgggaccactgacatgtggggcccacatatcaatctatcccttcttcctcctccctctctctcccccttcggcaagcgggggccgccagcgacggcggcaggtgggggccggagtggcggcagcgacatgggacctacccgtttgcccgcctgacgcatgcgaagccggcaccttcgcctccgccgaccaaatccaccgacaagcccacctgctacgtacgttgccgccttatcatcttcctccggttggctcatcccctcctgtgagccaccggcgacagagacagcagtgtggtgttggcctagatgtgagccgccgatgacgccattgtcgattggggtggggtaggattggggatctgtggggagaaatggaggggtggtgagagagagagagggagggcagcggcgggacagagcttggcgagggagctctataggcgtcgaggccggctgtgatgggaacggcggtgacatcctgacgcgggcaggctggcgcacctactgctcgccaaggcggcgtcgacccctccgccaacgttgccgcctccggctcctcttccatcgaccatgcaaaagtggaacgaaacggcgggcgaggaggatgttgcgccctactccaggctctccttcctcctcctcctcccaactcaccagccacgaagcttgccgcccatggcctcctcagcgccgcttcctatcatcattatgctggcgccgtagcaggatggtgcagctccgcctcgattgccccctcgcatgagcgccagcgccgagtccgtggctgccttcaccgcccgcggctacggtggcacgcccctgccgaggagagagggagagagggaggaagaaggagtcaaagagagaggctgacatgtgggtcccacatgttagttgggcccttttttttaatgacaaatgggtccccataaatttttgcacttctaatgacatataagagttatgtcaacaccacgtcggatgaagatcaagttaacaccgccacgtagtcgccacgtcaacgaaaccacctaggaaatcaaattgcaccggttttaacagtttaggggtcaaaattttggttttgcggttgagggtcaggtcactttgaagggacctaagtgaacttattcctgggctgtatctgtgtggaaggatgctatatcctatggcccatttagttatattgggccttgtttttcggtcgcgcagaaatgcagaaagaatcactcggtggacttaggccggcctttgccacaccacacaaacatataaaaaattcgaaatttttcatttttaattttttttaaatatttacagaaataatctatcgtcgcaaaaatttaaaaaatagaccctgccgccctagtggagggcggcaagctgacgtggctagacgacggctcgacggcgccgtgtgcgtattttgcgctttggtcctgggcggcaaggggcgtaatgcaatttg

SEQ ID NO: 27222 - DNA, 19383 bp, Oryza sativa
  unsure (1)..(19383): unsure at all n locations
tctttcacgctctggtgatatggcccttccgcgggctggctttttttgcatggaggccccttgccgccctggcagtgggtggcaagggtgttaatacaaaaaaatcaactttttcaatcggccatcaccacccgtcgagctgtcgtctgccacgtcagcttgccgtcctccactagggcggcagggtctattcttgtaaatttttccaacgatagattatttctgtaaaaattttaaaagaaaattttaaaaatgaaaaaaaatctaaaaaattcatcccctcgttcaaaacttttttggagggattttggatgcttttctaaagagaactactacaccacgggattccgttttaacaggagatcaattatgacgcggacatcacctcccttgcttctagcgcttcgtcattccaatctctcatttccaaccatgtcattaaacaatatactcgtacagggctactagacgtgtgatgcatatatgcctcgtaagtattaggtaccatatatgattcatctatgtacttcacacgatacttaggtaatagacatacatggtacctaaattctaggcatggtacatatgagtaccaggtctgatatctatcggatttggtactcaggtaactggtctggtatctatatgtattaggtatgatatttagatactgggtctgatactcaagtatcggatttgacacatataggtatcgggtttgatatctttatgtatcgggtctgatacttagataccggatctgatactcatgtatcggatttgacacatataggtattgggtttgatatctatttgtattgggtctgatacttagataccggatctgatactcaggtactggatctggtacatataggtatcaaacctgatatctatatgtatcgggtctaatatttacatatcgggtctgatactcaggtactggatctgggtacatataggtaccatgtctaatatctatatgtatcggatttaatatttagatatcgggtctgatactcccatatcggatctgatatttataggtatcgaataaaaagaaaaaaatagtgtgtattacacgattattataattatgctaatgcaattttttctgttccatatcaaatcttaaaagcatcacaaccaaaaaataaaattaaaaacaaagcaagataaaaaaagggaaaacaaaaaattaaaaaaaaggtcacatgaacggtccaggtatagatgaattgtagttaggccaacatattcacatgcccaaacggtccacatgggccggagacctgtttgtcaaaaatcctcgtgcaggaaaggaaaaacacatgcatagtgcgcgtgaaaatcatgtgcgcattgtctttctgatggaaataacgtttaccattagtgacttaagtcatcccgtttccacggaatagtgttctctagattttctcttttctaaaggatatttaacccttttttttgtgaaattccagtataaatttctgtgttcaagaagaacccttaatcgactaaacaaaaggtcctttgtaaatcaccatatagcttccccccctcgttcaaaaatttcttggatgatttttggacgttttataaacgaaatttaacttttttttctgaaattcccgcctaaatttctccatttcaaaataacccttaattaaacaataggtcctttgtaaatcatcctttagcttttcctaagggacaaagaaaaagaaaaaacgaagtgtcgggagaacacaaatgatacacgaactagaacgtccaatacatacccacagaaatcagagagtattaataggattgcaacaagcaaagcacacacaaaaattgcaggtacaaaagaacatggcggcggcgcgcgctgccggttttaggaacctactataatgccttgagggtggctgctcctcctccggcggcggcggtggcctggaggaggccgtcgcggacctgcgcggccatgtcgcggacggcgctggggccgtgggggatgaagacggtggaggacctggaggtggcgccgatgtcgcggatggtgtcgaagtactgggtgacgagcaccatgtccatgacgtccttctcgttggggacgaagcgcttgaggccctcgacgatggcctggcgctgccgggccacgccgacgccggcgaggtacttggcctcggcctccccctcggcgcgcttcacctgctggatcttgtcggcctcggcgcgctccgccgccgccacgcgcagccgcgccgccgcgttgatgtcgttcatggcgcgccgcaccacctcgtcggggacgatgtccacgatcagcgtctgcacgatctcgtacccgtacatggtcatcgccctcgccagctcctcctccaccgcccgcgccacctccttcttctgcccgaacacctcgtccaggttcatgttcggcacgctcgccctgatcactgcgtcaaagaattccacaccttcacgctccgaaacatttctactaccagcagaaagcaccgtacaaaatattattttaaaaaataataatctattattaatatagaccatagtattataagttttatcagtattatctctacttgatagtcgtaaaaaaaacatgtcgaaatttcttttctcgaaggaatccaacacttagacagtatgaagttccattgaatatagcagggaaaaattgtaaaattataacctcgaaaacactagtcaccgacccacacatctgaggaaaggctagcaccgaatcgatcaccggccaccgctaaaccaacgaggaactatagatgtaccccggcctgtcgaaattattatggttgtgggggtgtgattacgtaccgtcgaagacgtaggactggatctgggcgtgggcgttggtgaggcagtagaaggcgtcgtaggccctgtcggcgagggcgcggtactggacggaggcgacgacggtgacgaagacgttgtccctggtcttggtctcgcagcggacgtcgagctgctggacgcggagggagaggtagccggcgacgcggcggccgacgcaccacggcacgaagtggcacccgggccccagcaccgcgtcgtacctcccccacgcctcctccaccgccaccgttgactgccccacgcacgcgcagcacagcgcctgcgccgcctccgccgagtagctgctgccccccgccgccgtcgccggagacgacgacgacgtcgacgacgtcaccccgcccatcttaatttggtccccttgttcctgatcttgcaaagctagcttagattatgtactttcggagtgtgtttatgggcatgcaagaagagaagagcagagtttgactgcgaagaagtgacatcgctgccacgctttagtgacaaaacaaaaaagcaaagcaaagggagtattagtgccaatgatgtacaccagaccaagtaacctcctgattaagtcttgctccaattggcaaagactagcatcgggtgtgaactctgaacagatgaaacgtaatcacaataattaattgacgagctggttagaataacaaacacattgacacacaacatatgaggtatccattgaccggatagggcaataggcacctcggtttcaactgtcaaagttggactagtactaatgggacaaaatacaagggggttggaaggcgcagcacacaagcgagcgcacggcagcatggcagtggcagcgtagtcaaaaatcttcggccatatcagctccaatccgggcccgaaccaaacggggacggggacgcaccagctgggtcgccatcgattcggaggtctctgcatcggcgaccgcggctcacagatcgagtagtgagtgactggtgcaatcgccgtccggccttgaccgcgtttagtttctctgctgtgtgacggtcatttatattgatcgcactatcgcagtgtttatgtacacgtctgcaaagttttctaccatgcgaagtgatttgatgtcaaactaccatgcgaagtgtttgagggggttgtcactatgatctgatgtcaaaccagagggataagatgagcgcgaaagggatatctctttttggccgaggatacaccgattactcactccgcctcaaaaataaatttatttttcgctcatctcacatatatcaatacaaaaataaaaatactaaaatactcaaactttatcaaatcccaatgcaactattgttcactttaactactctcaatttcattgttgctttaattttacaaacttctatgcaataattattctaaaaataaacatattttgagacaaaagggacttaaaaataaacttattatacgagacgatgggagtagtttattattgagtgactatcagcggcagagtatctactgttaggctgactctggccttgactactatacttcctttgtttcccagagactccatttgtcggtatttggttataacgtttgactcttcgtcttatttaaaaaatttcaatgatcagtgtttttattgttattatacgataaagcatgaataatattttatacgtgactaaattttttggattttttcataagtttttcaaataagatggacgatcaaacgtgggatacataaagcgaaaaataagtttttttaggacggagggaatactagcaaaaacatttgtgatgtattgccggagatcgggaaacacttcttcctcacccaggctcaatggcactgctggctccgtcactgaatatcgacccgaaaacttgcatgtacaaagggaaaaaaaaagcaaagttttcggattgcgatggtgattcagggttgctgctctatggattttggtagacccaatgggctgcattttccatgacagtgcttgggttttcagtccaggcttcaggcggtccgatgacatttttctttgtttcttccttctctcccctacctattgaaaaccgcagcgtctcatcactgagctgcatttgcggtccaagatttgtggtagctggttaccgctctggcgaactccagattgtcgtatcaactgatctttagtgccatgccacgaacaaaaaccttccaccacaaaatcggacagcgtgcaaatgatcctagaacggatcgctgtactataccgtaccactaccatatgcatgtccccctcggccaaaaaaattaccctacaaatctaaacgcatgtgttcaggttcatatttgctacatattaggacggagggagtagttaggaattttttttttggacaaagtagtactacctccataaaaaaaaactcaacctcgtactacgaatctaaggttaggttgtgtttagttcagcgcaaaatttggattttggttgaaattggagatgatgtgactgaaaagttgtgggtgtacgacagattgatgtgatggaaaaggactgaagtttggatccaaactttagaactaaacacagcctaaacatactctatatccagattcgttgtattaggatgtatcacatcctaatactaggttgccttttttttttttgacagagagtatgtacgtagtggtgtaccgtacgtccgtaccagaagccatacggcaccagtctacggcacgcacaaagctgcagcctgcaggcaccagcttgtaactcacttacaacgacgcagtacaacaagaagcagtaacaatcaatccatcacagacaagagagtgagtagagagttaccagccggtaaaaaggatgggtaaaatgatcaggggagtaatggcacgtgcgagcatcttagattaccaaactcgcatcgtcgcatgcatgcatatgatcatgatctatctgtcaaaggaaggaggggtgcgtcgcgtaccacggcctacctgaaagcggagcttagctctgtcaccccatcaatggcacatgcgccttaactgacctgcctgcccttcctcccttcctcaccatctccataatccagcaagcatcatggaatgatgatggcgacgacgaagacgacggtctttgatgacgaccaatttgcctcccctttttttttgccattctccacatggcgattaattacaaggcgaaggcgaccgacaggtgatgacagtgcgagtaagagcccaaacccagcattctccgggaaggggcaaacctaaccacctcagtctgagcatttgttcagaagaaaagcaaaagaaaaacccggtttgatccaccccctctcccaagtcaagggtaagctagaattggaaatgtagaagcttaagcgacaagatgaaagtttgcacattgtacacgtttgcgcgcagttctagtcgttctggaaacccggtttcctccacgacacagggtgctcccaggtgccatggtaggttggttgggtgcaccaccaatgcacccaggttggataggaagtccagtcttgcactgatcattgttgaatggatggcagaatgagcaccaaggactctctcattgcagtttgccgttgttgggccttggggactgccggtacggggaggcgtgcgggccataggagaggctcctcattggctgctgcccgttgcgcgcgaaggtgccctgtgccttcatgctttggctgccaattgggttgccgaggcttgcggcacgctcctgctgcatggattggaagaagtatgaggagctggccatgtctttgaggttcaggaggggcttgaggacttcgaccacttgactcatgagaggcctggccttgggatcccggttaaggcaggcacaggccagctgagctgtcttctgagcgcctcttatggagaagttcccctccagacgggggtctacaagcctatagaatcgccgtctttctccaagataaggacgcgcccattcaaccaggttgtgttcaccgtttggcctattcttgtccattgaccttctgcctgacatcatctccagtagcaccactccaaagctgtacacgtcactctttgatgtcaagtgacctgagaaagaaatgaactgatgaagtggtggaacactgcaatataccaagtgaatgtggtgcagtttaattctcaaacaagtgaataaatagcaaattatgtacagtactgtgatatatgagtacattcattcagcttagatcagtcaatggaagttcaaagctcatcaaatcaaaatgggcaacataattttgagccagtgcaattatgattcttttggactgcctcagagagagagattcagataaacagctattgcaccaccacagcagcacatggagtgccttaaatatcagtaatcacagaaaattaagatggtgtgccatgatagcacccagatcattgtgaatgtgaccaaaaaaggtgcaggctataataaaacactccatgcacacatccttgtacacagatttcatctatgtcaagtcactgaaagtttctactgaagggctatctaggaaatttgtcaaaggaaatataatgtgccatgaaagattttactacatgtgcaagtttggatagaggttcagcagcatgatgcaatatttcaaaattactcaagcaagccaactaacaaagtaatgatcaactcacctgtcatgacatactccggagctgcatatccataagttcccatgactcgagtagatacatgtgttttatcaccctcagggccatctttagctagtccaaaatcagagagttttgcattgtagtcctgaaaatgaatatttaagaaatatgagaatgttacaatctaaatgaacatttctaatatgttttgattctcaaacatggttgcataccgcgtctaaaagaatatttgaagttttgaaatcccgatagataactggcctttcagcttcttcatgaagaaaagcaaggcccttagcagcaccaagtgctattctcattctgatggcccatgggagaggtaaagaccctgtttaatacaattatccaagacaaatatcagataaatacaagacacttcagaatagagttatactgaaatgaaacagttgggccaaatttaacgcaacacagcaataacagtgcataaactacattgtctaaaggaggagaacaaagagttgcacccaaggtatttagtcggtaataataaaacaccaaaaatacatcatttggaattggaaacatgtaacatagcaccacctaacacccttattgactgccagaaatcgtaatgaacagttagtaaggtgtcagccatttcttaatgaactcttaaatgccaaactgtcagacattcaagtatacagtacaacagaattgctacaaaatatgaataaaataaataatcaactacatcactagagcagagtacaatatagaaaagtgcatataaaaatgcaggtactacaagaaaaactgctaccgtgaacaatgaaagaactccaaactgttggcaacaaatgggaagaaaaaaatgactgacagtaggacgcaaagattcttactcctaaaaagatggttctccaagcttccacgaggcataaattcatacactagcaacctttggtcatcttcgatgcagtaaccaaccaatttcactaggtgtggatgttgaaggtttccaagaaaatcaacttctgcctgaaaatgaaataacgctagtttaattgatgatgcattagaagacagttgaataatattttgtggtctgtatgctgaagcaattcaaaacataccacccactctttatggccctgcagcccatcatggttaagtgtcttgacagcaaccgttaatcctgtgccaggttttacgggagcagttccgttctcctcaatccaacctttaaagacacagccaaaacctccttcaccaaggagactctcaggccggaagtttcttgtggcacacttaagttcattaaatgtaaacctacggagttggaaagctagtttaagttcctctccgactatggacgaaggtgagatgcttccagtgttactggatgttgtggaaccagaggccattggttgaactgaatggtctcgacaaccatcattcgctgatttgctttctgcacatgaaacataatccttgttaggggaataactaaaaagcttatatcattaacataatatcctaaaataactcaacaggaaaaggacttggttcttagcagaagatgacaacctgagacggttgcagcagaaatatttagcaagttctagagggtttgttgggatgtattttatgctatgtcccacactgtatgatttgttcagagtttttttttccctttctacgtttcaaacggttgggtcgaagattatctatatgaagattaaagattaaaaagaaagaaaaggcttctttcccaacaaaagcaggtaagtcagcattacatcaagaatagaccagttttttttcttccaaattttggttcccaaacaatgtaatgtaagaaaaggcactaccagaacaaattaatacattcgtggacagaggagtagaaaatgaccactccttttactccaacagagctggacatgaatgccatattcagccaaagctccaactatccatgtggcctgctagagtgttaagtgcaaactggagcgaccaagtatattaagtcaagttagcatttccctattgagcgtttcacttcactcatacacacacgtttgtcggtattcagcgcatgcattatctaattatagccaaatatgcaaacctccatgcaacccacacaccaataaaatataagcatctacaaacacaaactgaaaagaattgaaagtactgaatctaatctgctcgcctcccgccaaccacaggtgttctactcatctcacagcaaccaaaccgtcactacatatcttccccatactacaacggcttcatccagaggacatccactacagaatcccctggcactagcaagccacaaagccctacaaccaggagcacaaagcacgagcaactcgaacaccaatggcagcactccaaagccacagaccctgcagactcgtacacaacagcacagcaggacagcacacagctcccatcatcaatctcattaatctaatacccgtacgtgaatgaagcggaggccatcccgtcccgtcccattcccatcctatgccagtatgccacacacaccccacacacacacaccaaccactctatccaactcacgctcttgaattcgtaccacccaccaaagccctctcctctcctctctcggatcacaccaacacacatccatttttttcatcatagaatgctcccatcacaatcaaacattacttctaaaagtaaaaaaggataaaaacagaaaatactactagaaaacaaagcttccgccagcagccatggcgccatctcatctcatgcggcgctagcgtacaattctctcgcgcccgtgcacgcgtggcgccgccaccccgagcgaccgacgcaaaagcatgcgccgaaaacgaagagcggaacacgagggaagcaagcaagtagtacaagcgagtgcgggagaggatggaagagattaccgccgccgacgcgagcgctgccgccgccgccgccgccgctggtggtggtggaggagtcgaccttggagcgcgacgacatgcagccgccgccgagccggcgcgggatgcggatccagcaccccatcgcgggcgccgcgtcctcctcctcctgctgcagcaccatctcccccgcccccttccccttccccttcctcctccgcctcccctcctcctcccgccgcttcccctccttccccatcacccccacccgcgcgcacacacgcaccttcaccgccgccgcccacccgcgcaacccccgaggtcccccgctcgtcagcgccgcggaggaagccgccgccgcgcgctccccccggcggcgagcgcgcagggtggcatcggcgacgccgcgcggcgggtggtggtggaagggaagtcgaggaggagagtgaagaggaggggtggtggtggtgtcggggcagcgcgggcaggggaaaggcgaaggctgagggcgaggatgcgggcagagcgggcagggcggccagaaagccaagcggagtgggaatttggcaaagaccgagggagaggagaggagagccccctgcccctgcaccttcttatggccgccgtccgcatccgtccgtctatagaacccccgtttttgcattttactccctacaagatttctaatatatccttcaagattgtagcattatcctttctctcatagaggcttcaacctgctgcctcttcttcgcatcaacgtggtcgctttcggcatggtaaagagtacaggaactagggtttagagtttagtgctgaggatccttaaattcacgatattgtaatatgtccagaaaaatgcatgagaggtgatacgtactaattaaacgcgggaagatgtaataagggatgacgtaataacgtatcccaaatacgcgcgggaggttgtagcaattaaaagcggaaaaataaaagttaacggtattggatgatggagttttaagtcgggtttaatgtttgatgtgttctaaatacacgatactataatatgtccaaaatagtcttgagagtcaatatcgattaaatgcggggagagataataagggacgaagtgatgacgtgttccaaatactctcaaaagattgtactagttaaaggcggaaaataaattataacggtatcactactatgttgtttacaaatgccttttttttggggtgcgggtggaggggtgcttatagctatccaatggatctatgtgtaaatactagaaaattttgtctccaaccgatattcctcgcaaagcatgtttatccatagaaagaaggtgatgaaactctgcagggtttaaactgataatcttggcaagcattaacttttataaatactcattattcacataaaagacaataataaatacagtatcaatatgtggtgtatccaagcaaatcatttatcaataaatccaatcaattattactcaaaatgtgtgcgcatatgtgctttaattttgagttttagataaagtaactcgttatttcactgaaccgtcgcttgattgcaaacccgctaagtatatgcaattcgagtttatgacttcgagtctggttggtgtacatcgtttctgacgaagatatcataacttataatccttatgtatattggtacgtggatctttacaagcataatatacaaccaaacacgtttatgtgatgatattattttcaaaaccacggaatcaaaagtgtaaatgaatagagtttgaggcagtacaaaacagggggtggaagtctgattaacgaatgcgtaaaatatacattcaaatatttgaaaaccaaacatgccaaaaactagcacggttagattccaagttttataccaagaacagaaaataaaaatgggataaaacatactattagaagcgactacaatccttatttttttcaaaagacaaacctgtaactatgctatatgcatttgaaacggattaaccaaaaccagctcgaaatttttcttttggtaacgtaggcagaactatgttcatattgagaacggataagctacagcctttcaagataagcatgtctgaaggctcgttgctcggttgtccacagtagttttgacttttgtcttttgatgttaaccgtgacatgcacagtttcagttcaaaggaacaaataaactaaaaaaaattacaaggttctatctgcaaatcgacaccaacacacgcacattttgacgatattcacgaatccaccatccatttcaaatccaacagccccctctactcggacgccgtccgttgaggcgttgatgcctatctcccgcaaacaaaaagaaaaaaaatactccaaaaaaaaaagaagaagagaacacgagagaaagagagcgcccattattctggaaacatagcgataacgaacccctgcgactgccatcaatgacaagtgggcccacccaaaggtggtcccggtgtgccagttacggcgctcgcgtgcccctctccccaccgggcccagtggcagctggggggtggtgcagatattagtaacaaaagaattttggtaggatgataaaagaataataaaatattaaaataccttgcatgtattggtcctttttgtgaaaagaagcacttggactttagagcagagagcagcaggggttggctggcttgctatgctggcaacgttggcaggatctcgatccgtattctattatgctatgatactatcttactatgaaacaatatcaatcattttattctaattttcatagtatcccgatcttactatttatttacacatgatcttacgaaatcttagctagtatcatgattctacgatcctacaaaatattatttaaaataaggtggattgaaaataatgtgaataaatattcttaagttttacataaaaaccaattaaatttatcaaaatcaatttatatgcgttaatttatacaacatattatatattttatattaaaaatatataccttctaaaatatgatagtatcgtgatcttataatattataaatcagaaaacgttcctagtatctcaagactgattacctttgttggctttgggtgtgggtttggtttgagttagacacgggtagttaaggcacaaatcatttcttcatgcattcacccaaaaagaaggctacttagtacttaccggttcttgaaacagccttaaaaagaggttagtaatgattcgaacccaggaaaataaggctcattttggtatgagaaatagtaccggtactcgagacttaatgcgtgacgatgatttaatttgaccagtgcataaataagtatgtgaattgaagtgccgttatattgtcattgtctataaataccaagacaaactgactttttagaaggttttagaagggagaagacagggatacgacaccataacacaaaagtagacacaaaagtatatgatgttttgggatctaggagtagaatttagatgaaacgttgacctattacaccctctagctactataaccaccatacgtgcacagaaacattgtgagcttaccctctcccatgtgtagaggtggatatcgaccaccatgactctcctttacagctttgatatgatcttgtcaactcttccaagtttcaaagggcttatttgcatttagaggtactccacaagaaaaaaaaattaactcatcttgcatgtaacaaaaaccaagaaatctagcgctgcaaatctcttcatttaagttttgatctatgaaaattataaattaatatgtccatctcatttaaaaaatatagaaaataaaaaatacataatttttagatggagggagtatatgacaaagacaagctagcagtaggattggggaaaatggacggttaggattagctcaaacacatccccatcctcaccaagcctcgtccatcacctaaatcctgaagattccataatagtaaaaagattgttaactaactgaaatcccgtgtgttatttcggacatgcgtagttgtaggtaataattaggaagaaacgctttttaaaacaaataagcatgaataataataataataataataataataataataataataataataataataataataataataataataataataataataataataatagcatacagtataaatggttgagattaagcatgtaagagatctaacggctcaccttattgcttcacgtacgttaagggcatctgacagagtatttgcatatggtttgctaactacatgagtttgacgctatgaaattttacaaagaggaggaggaagaagaagaagctactcagaaagaaccaaaccggccttacctagaataactgtcctgcccactaaattaattaaccaacatgtctgaacacggtcaagaatgtctaaactgccagtgaagttgttcttaaacaaacatgagctagcgactgtgattaactaatcatatatagtacacgttttgcccctaaacaactgctagttgcagagtgttagaccggtcaacgaatagttttctcctattagccagtataattattttttccccaataatctgtgtgccgtagggtaggactaggaaggcctcgattgtcaatggccggtaagaaagttaggtatccaccgaataataatgcactgggatggagtggagtggacttcatcacacagggaatctcttgctccggaaattatatgcatgcagggttatgaacatggcagcgacagtagcttcatcttcatgggacccaagtttgacaaattagtgaagcttcgaggataaaaaaaagtagtaatgtgcggaagaatttgtaagttttagaatcggtcgtgacggtggtggtggcggcggtggtaatgacggttgtcagcagctacaaaatctctaccattaggcttccagcagggaacttattttctctagtttttggtaagaatgattacacttaccctttgttaccgaagttttactttataccatatgtactctatctaatgttttcatattggactaaatatttttaccatttttcactttggactcacctaacacttttgtataaccacatccaacatctcctccgcaaacatgtgagctacacataagtagaaaagatcattggcatgaggacgctgatgtactcgtaaagatggtgatccaaagagtataaagggtgaaaattcctagttcaaggtgaaatgattggatagaaggcgattcaaaatgaaactttgataataaaatgtgataaactgcaattcaccctattaggaattattcccaacgttttagaatgttgttttggttttgtccaaagttaaaccactttaaattaactagatttatttataggaaaacataacaacatcaaattaatttcgttaaatccacaactgaatattaattatatttatttagtattaaaaatgctaatatgtttcccgtaaacttgacaaaaggtgatgaaatttgacttaggaaaaaaaacaccttacgttcttaagcagacagagagagtagggagatgtttgggattctggaaatggaggatgatttgctgtgaggatatagttgttcctaatgtgctgtttcttgaaaaaaagttgccgttccaaatcaagacacactttacgctgggcttgggctgtttttaccatcccgacctgtgcaagcttgggccgagcccgtttccagcccaactcagacaggcccagctttgctttgcgattcgcgctctgacgtgcgcgggatcggtcggtcaaccgcgaccgacctactccgaaaggcacacgtgacacgcctttgccgcctttgcgatctcaaagccaaagccgagggcacacgccgcctttgcgatcgactcgcgcgtctcctctcctccttccagggctcaggcgaggggggtacggtggtggtgggctcgccggagagatggccgagcgcaaggtgatcaacaagcactacccggacgacttcgacccgtccaagatcccgcggcggcggcagcacaagaagcagatggtggtgcggatgatgctgccgatgaccgtgcgctgcgccgcctgcggcgagtacatcgggagggggaccaagttcaactcccgcaaggaggacgtcgccggcgagaggtacctcggcgccgtccaggtgttccgcttctacatccgctgctcccgctgctccgccgagatcgtgttccggaccgaccccgcgagcgccggctacgcgctcgagtccggcgccacccgcccctcctacgagccgtggcccgcggcggcggcggaggcggggcgggaggaacgcggcggcggcgacgccatgacggcgctcgagggccggtgccgcgacgccaggcgcgagatgggcgtggacgccgcgctggaggagatgcggtcgctcaagtcgaggcgcgccggggtcacgccggagcagctgctggagtcgctgcgccgtcgcggggaggcgctggccgagctggaggaggacgacgagaagctcatcagctccatcgcgttcggcaacgcgaaagagcgcagcctcagacggatcgacgacggcgacgacgaagacgacgaggaggatttcttcgattcgtgcctggccagagcagccatggccaccaccagccaccaagcaaagaagaggccgccgccaccgccgcgagatgcggttaaatcgttggtcgtttcgaagaagagaaggccagagagcatggatcaagctgcatggccgccgtcgtcggggaagaccaccgcgagcaacggtgctcttcaggtgctttgctgtaactatgacgacgaggagtagtaggagagctaagctaatgtgtggtgatggaatttgacaatgattctttcccttatggcttgtttagttggcaaaaaaaaaaattgtccctacatatcacatcgaatatatggacacatatttaaagtattaaacgtagtccaataacaaaagaaattatagattccgccatttactgtagcaccacattgtcaaatcatggcacaattaggcttaaaagatttgtctcacaatttcctgacgaactgtttaattggttttttcatgtctatatttaatactccatgcatatgtccaaacattcgatgtaacaacgtgaaaaattttgtttgggaactaaacaaacccttaattaagccattttagttagacgctgatatgatgtagtacgttttaattaattatcgcctgaaagtagtgcgctcagtatacgtactttgtaattgtcacgtataaagatattgattgtggatttcagtagttgagagatgaaagaactattcatagagaggcattaattgatttcactgttttaattgaacatatactgattttgttactcctgcttgaatgtcctaaagaaggagagtatactcctggatccttttcaaggcttcagctatgtaaaatggcaaacaagccgcagtaccttttttttggcagaaatttatcataaataagcaaagaattaaaaaaaaaggtctatataaagtttgggactattaccgtggcgcatttcttcccaagcgacacaaattttcaacctttgattagaacgggtgtggcaactagaaaacttatatgacagcatgttttctccactactataaaaacactcacgtcttctacctttcccagtccccaccatcgtacttacttcctcctccaagtaaaaaatccaccattccttgaaaaaactatcccttctaaaaacgagaaaaacaaaatccaccaacaattaataaaaaaaaatcagatacggggtatataagactagcataaaaccattcatatgtattcccccaatacaatttgtaagcacgggcgtagcactacatagaaaaagggtcaaaaatttaaaaatatgtgttctggcagtgtaaattatatgtcgtccatattgtaactttttaatcatagtacatctcaaattacaaaacttaaattgcaattttacaagctcacacgaaaaaggcaaaatcacaatacaagccgtgcatgcctctacttttttttttcgtttttgtgaacaacgtgttcttgtggataaatgaaggatcaaaatctaatcgatccattcaggataaaacgtatcaaaagcaaccgataaaaaaataaatatttggaaaaaaacaataaataaaaccgtaaaatctacggctcaacaacaaacctccgatatgtgccgtttatgtggtgacagttgtaggagccttccagtctgtcaagcggtgtgcatatcaatggaggccaaaggattcagtcgtcgtggttttgccgcaaaactctatcgatctgattccctactgttgttttatctcatcagaaagtttgcttccttagagtggttactctctaccttgttagagatggtttattggcttaagttgtatccttgtacgatgtactagggtatatccctaaattctgtctcgttgaataaagttgttcatgttatcttaaaaaaaaaatcagtctggtcgttcggtcggagtcggactcgagtcctcggcccggtccaaatacaaaaagagcgcacgccccactcgacacgttgccccacctcaacgtgaccgactcgacccccacccaagacacgccggcggctacgcccccgaactccccatcgcctcgcccgcggattctcctcctcctcctcctnctnctctttcctcgccgccggggacgcgccgncggctaccttttgacgctccgacggtggtgccctttttctgtgggacccgggatcctagctcccctcctcccccgatgattcccggtcgcctgggcggctctcctcccgtcctagggttccggcgaggtcccccgcggctgcgccggcgagatgggtgagcgcaaggtgctgaacaagtactaccctcc

SEQ ID NO: 27223 - DNA, 7407 bp, Oryza sativa
acacgcttccgttaaccgtttacttacggtaatttactgcgatgtttgcttgttttgtttggcatttgtactgatcaatgtcttagggcctttaggcatagcttgttatctatcttttttgcttctgagaatcagggttgcgcaacatagcttaaatctctctgtggtctttgtattatatttaccatgataaaatgctctagtagtatagtgtttgccatcgatatgcggtgttaatgctgaatgaagcattgagcactccatgttcgctgttgcctgcctaagccatgtagcccctgatgtttatgtgatcagagctgaaatggttgccaagtaagtgtggacttaatcgtgcaattgaagacaaaaggttaaccatttaactgtggacttaatcatgcgattcagaactgtggaattaaaaccatttttacactgttacttggcaaccatttcagctactgtggacttaatcatgcaattcagtatttcagaagatgcttataaattttggttggcctttctggtcaaaatatgtgcttgctattcgggattgtgcactttctttctatagtagcttctgtactactctgcatcttgtgctcctctttattgctttactggagagagttggcatttacctttcttttacattgaatactgactatatcctcataatgttttatattttctcaacatatagttaaaacacaacagccttttttgccatctttctgctgtcgttaaacttttaaccatgattggtaattcattgttgtacggcaaagcgtgagcttttatctggttattctgttcttttgtaattgtagaatttcataccaatggtgtatctgggctgctagttttaatgctaatttatgctaatgtgatttcatttcttgtgtgcagaaatacctggggatacaaatatttaggttttacttcaagtgtacgaaatgttcagctgagataactttcaaaacggaccctcagaattctgattacacggtggaatctggggctagtcgcaattttgaaccttggcgtgaagaagatgaggtgggtgatccagggcatatcttaggcacatcttatttgtttcgactaatattatattgaaagtgacaatgacgatgtatattccttttttcaggtagcagacagagaaaagaggaaacgagatgaagaggagatgggtgatgcaatgagagcattggagaatagagcaatggattcaaagcaggacatggatatacttgctgctttagaagagatgcgatccatgaaggtagaatatggtctatgggcatctgttcttttttctgtaaataaaaattgaaataagtcggacttagtgtgctgacattgttttcttgtgccttttgcagtctagacatgctggagtcacagttgaccagatgcttgaaattttgaagcgctctgctcatgataaggtaagatctcaaaataattcttttgcttttgtttaatgaatgaacaagtcattgtagcccctaaactatctcaagaatcaatcctcaactatgaaactgtccagcattcaccctctaactcctaaaactagactaaataaccccataactctggttttagtggtggcttttgccatgaggtactagatgcttgctgttggtgccattatgaacctccacctcagcattactcttcatgtacatgaaaacatgatataacccagcaaaatcttctcaactttcttcgctatacctgcttcttgtggtcgtttctggaagcagtagcaaacttgatgttactactcagtaggaaaccttgggttttaggtgttgggagtcgaggatctggccttgtggccttgttgctgctaggatgtagagcgatggtgaaggatcaggggcagcggtgacagctagacctgtggattaggaggccatatcaacgggtgaggtgttggtgttggttggctacctcttctgtcatagatgtttatgatctgcatgacccagcaaaagggagcaatgtagctttgatctgaaccgctaaaataaaaatcatgaattgtcttgttattaattggatggtggatttaatctgcacttggtgaaaagagtcaggaatctccatgcgaataaattgaattggaactagccagatttggaaaacagtacatagatgatagaattgaccttgacgattgagctgatatgcttgccctgcaaccgtatgatattcatggtaatttacctgctgggatgcttgtgctcccacaaccatgtacaccttgtactttaccttctgcccagcagcttgcactctgctcaccggggtttcaacatgctgtgttagcagcattgggactagtaggtttgtcatgtcagtgtgatgtaaaggtgatggttgcttgaagctgttttgttagacaggcaaaggacagcgtgaagataagagagtagaaagaagcagcacagggtgactttttttcctgttattatttaattatttaacttagatatgttttccaccacatagatgccatgtcagcatgataccaggtactccctccgtttcacaatgtaagtcattctagcatatcccacattcatattgatgttaataaatctaggcatatatatttatctagattcattaacatcaatatgaatataggaaatgctagaatgacttacatcgtgaaacggaggaagtagtatggagtggtgggctatcactcccgttctgttttgaagggtgaactttaaacaattctgttgttgagggtgaaaacagaccttttcctttaaaaaatgtttgacataggatagttcaagagggagaaaacataacttttcctttaaaaaatgtttgacataggacttttcatctttttggtaatatttatgatagcttccttacaagcatgggtggccatggtgtgtaatctgcctgcttaaatctcgcattgtttttctaacggtgataattttgggcaatgacaggaggagaaaacagtagctgagctagatgaagaagatgaaaaacttatcaaatcaatcacttttcgagtaatcctctacctcaacttacatacatccctgcatgtgcaaaactgtgtagagagagaagttacttcgtacaaattataaggcatttttttaacttgtgatcctattatttaatgcagaactcccaagattatgtaaaacggatagaggatgatgatgacgatgatgaagatttggtgataccgggccagtcgagtagcacatcaaaggtacttagcactcctgtttgatcttgtaggctccatattcttaacctccagttacagtaaaaatcattggacattagctggcattcacatattaccaaactagccctggcagatccattaggtactaaagcttgctaagcttttatttccatccccctttgtcatttaaactgtaaagtattcagctttttcttaatagacgtattggatttcttaaatagataatacctgcactttgagcactgaagctttgttctggttggaaaattttttagcatatatttttagttattagatttaatgaacagttggagctagggtagaaggccatttgaacataagtccaatgataatggtaaattttggtcaccaagcagcagtattatgcaaattggtagcaaacattggcatagtcatttaaaactattattttttaaaacttaatttaaaactattgttttggagtagacattgttgtagcattttcagaattgcttgtgtcagtctcaagagtttactggtcaattttctatgctaatgtagagttattttcttatgcttccatttgatgtctcttgaatttatttgctttgttgactaacagttctattgttctgtagatgaatggatcctcccagtcagtatcaaatgcaacagatgtcctgaccaagactagtggatctgataatgccaataaagaaggtaaaaactaagcagcatatttgtttttatcatgattatcgttatcctgaattcaaagtgttacattttttccccgcaatttggcagggatcgtgtgttattcccttttcttgattaagcagcgttctattttggaaacaaatgggctgcccgtgttctttatctagttattaccgcgtgttacttaccattaaatatgcactgcaggaaataagatctggccatctaagatgccaaaatttatagtcaagccaaagtctacccctacagatcctatcaagaaacagaagacggaaaccacggctggcccggatactggcaaagcgccagtcgcagaagaaaatagtgagcctgcgcagaacaatgtcctccaatccctctgccaaaactacgatagcgatgaaagtgagtgatgactgcgtggctgcttcgtgccgtaagcccgtaacaaccgtaaccgcgaatcgccaccaactgctgtggcattggttgcagcggatgacaattccactcacagaagaagaatattacgttgtgctaacattggataaccagatccctgaggatctattgttgccacaaatctgaatcccgggaattcattggttaagtatatacagtacttcaaaatctgtggctgctaacattgtccaggcgagatttatacgtgtgtggtttgttgctgaatgcctgaagagatcaaaagtcttgtaaaattgacagggaagatgtttgttgacgttgggttcttgcaccaatccttcatttctacgcctagcttatacacaacacaaatttgaccatgtttagtaattctctcccaaatggattctccttaaatccccttcaaaatctaagctgtacatgaaatgcaattccattcttattttatctcggtttccgttagcactttttcaaactactaaaggctatctgtgtaaaaacatttcatataaaagttgctttaaaatatcaaataaatcacgtgttaatagtttttcgtttttcgtgtgtcaatttaatcctcatcctcatgaaactcaattatcatctctactgctctcatctcagaacaataaactggaagtacaactgaactcccatgaccccctcaatggaagatcttaactaactactcttaactatagtgaaaatcgccgtgcgtacaaacgaggaaaggaaggaaatccagttgggtctccaatctcacgcacgcggccaccaccagaagactacgcacagccgccgccgccgggacgccaccacgctccccgaggctgatccatccatggaggaaaggcccgtctcccaccggagtagttgcacggtcaccgacgccgacgaggatgacctcccgacgcagtggaacaagtggcgccgcgcagccgccctgtctcggaggacccggcgcgcgccccgcgtcgccgtgccggccagcccgacctgcgcctgcggcggccgcatgcgcagggtccccaagcccaggcccatgcccaccgccgtggacgagcgcgccgacggtgcctgcggcggtctcgcccccgtgctgcctccggcggcggcggcggcgtggtatccgtatgatctcatgtgcacggagtgcgacggcgagaccggctggcgccggcggaagccggcgtgctgggcggcggattggaaagccgcgcggccgcggcagcgatggcggccatatccttccttcgccgacgtggccgctgccctcggcgatctgcggctcggcgccggcgacgacgatgatcattccggtgacgttgatatgatctcttgttcgtttcaaaaatagtgtgatcatctcttagggccgaaatttcagtgtcacttgtaccgtagtactactattctatatgtgatcatataatttcatagtagaaaaaaagctactaatttagttgtcctaaactatgaaatatcaattcttctcccctgtctaattctttagtcgtctatcgacaattgttcgtttcactccagttattaggcaaaataaatacatataggttcaaattattgtgccaatcttcctaactaaaatcggttctatattgatacgttatacgatccaccattccccaaaaagagagaaaaaaggaacatagatactgaaaagaaaaagaagatatcaagaacatcttaatttcctttcagatgatctgttgcacgctttccttccacctggcttcctggcttgaatcttgtacaaatactaggtaagtacttatttgcatatttcatgacttgacagcatctaatcagtctctgctaagctcattgctgtgttgatgctgaaaactcattacagcgaaattgaaaacatattatgattcttcaagaatggaaaaaaagggatcaaggatgaatctaagctacagtctgattagaaggtaggaatgataagagtagtgctgacctgcagagaatgtcacccgttcgtgtggttttcccatagatccaatctgggatgagttcttgtcgcaacctcaactgttcttttatctcacctggaaccttatcgatttaggatcagattgcagtatccggatatgtataaaatgatgagcatgtgttataaaatgggcaccggtaaacagtgtctcatgctctgttaagtatgggcttgaaagaattgcagttgaaagaatcattttagggccttttttttttgcctactctattttcttgatcgctaggaatgaattcagaggatatcattcgaggtacatacatctatccactattttagggttacttgtaattatcttgtaaatgagctcttgttttgtcattacagtttgttcccttgagcccttgactgaaagatcagaaagatagtgtcaaaagtgccaggcaagcacgcgatcagcttttgtcttctaaaggtatctgcaaaacctgtttccttttcctccaaacctctcttctccttctgctttatctgcaaagagagagaatatcaggttcggatgccatatgtagagaagcgaaacggaatttcagtaacaagcgagcccgaatctgaaagaaaatgataaacacagtatctttgtgagttaccctgctctatttcaacaaaaaaaaaaaaaactgtccattttattttgtaatcaagtaaccaactacatcttcatagagggtagtataaatagagatatatatatatatagcagaaaccatgatcaatacatgttgtaggataggatccatcaaacagatgctcataattctgttcgtaaattatgcaaagcatagtgtactgatataactttgcttacccacacattgaagtttgaacatcgatcctcttgttctactattcaataaaaaaaagcgtgaatattagggaagtatctaatactccctccatcccaaaatgtttgacgccgttgacttttttaaaaatgtttgaccgttcgtcttat

SEQ ID NO: 27224 - DNA, 14244 bp, Oryza sativa
gtcaacggtgtcaaacatttagggaaggagggagtatcaaataattagaagggtgaggcttcgaacccatgtcgtctagcccactaccttgtggagctagccggaagacgcctgggcgtttctcgttctgctattcaataaaactacacgatcagaacagaagcattttgtcttatgtcacgaagatttggagaatcaagggattaacattgttatgcttgaagcatgttcctcacataaatgacagttcttctactggacttatgctagattagtaagtctctgcccgtatgactatgacgtgtgactaatagaacaaaggttggagatgctacggcatgaatgtgacatgggagtgtgcgtaggaagaggtcaaagatcacacttttctggcttggtcgccggcgttggtcgtcgccatggttgagcccccatcttgctcctgcgaggctaccccgctgctgcggcttctccggtgtcgagatccgctaaaaccaccttcgtcgaggactacacatcccctggcttcctctccgtcgctgtggtccgctcggcctactagggttgtggcacagtccacgcttctaagatggatgacggatagtttggcgggaagagccggcttggcgcgaggcaacagttaaggctgcattgtttcagtgccaatcatgtgaccatgtacagaaacgtattggaatttcagcccaatccaaaagaagctgaatttgggaataagaaaaataaataaacatgatacttttgcgacctaaatttgtttgataacaaactgtggttgtgaaaatagaagtagtataaggccgaccagtggccaatatcataacagcctcaatcgagtaattgatatggtagaacatgatcaataagcaataattgagatattggtggacaccaactagttcagcagatatgaaaaccaaaggtgcatcaaattaatatatttacccaacgatccatatataggagagaggtctagtatgcgatgttcttaagcaacttttatggctctttttttaaacattttgtataatatatgattacccataaatccatacgagaaatgcctacattatgatgttcttgttctttttagatacattttgaatagaatatgtttactcacgtaatatccacaagggagatgtctatatgttgagatgttcttcacgtgatcttttagatgcattttatatcgagatgttcttcacttgatcttttagatacgtttcaaatagaatatgctcacataatatccataggccagggagatgcctatacatcaagagatgttcttaagggcatgttgttcatcttgtaagaggatcaaactaactaaagaaagaaagtataaaggagcaaactaactaaagaaagtataaagtggtaataatgtttttgttatattattttgccaagtgggttccatttaatcaccgacaacaattgacttgataaaacaacttcgatttttcgaataatcaatcgaagcagctcctacactgctatcaaagtaatactacctctatcccaaaataagtgtagttttgcactgttcatgtccaatgtttgaccgtccgtcttatttgaaaattttttttatgattagtatttttgttattattagatgataaaacatgaatagtattttgtgtgactaattttttcttaaacttttcaaataagacagacggtcaaacgttggacacagaaacccacggttatacttattttgggacaatggtagtataaatcaagagcatttgttctaatttaatttgcatcctccctagaacaaggtaacttctcgaaaacaactgacaacaatgatacaacatgcattcgtcccaataaatctcatgtggagtaatacaagctttttagtaatttggacatgacattcatacaacaagttgttggaaccaccaccttgtcgtgatggtgacggggacaattgatatccagtgataaaaactgtgaaggcagaagggagccgtcagttgaaccttgtgaaagatatatgatggatggatagcatgttgtttaagggcacatttatactgtgattactctcctcaatactgagatggcccaatgagatgttggagaaaactctttatctcggcgctgtcttgcggacatttttaggctgagagtcattttttttctaattatggcatcttgaaaaccactgttgatttcatctgttatataagggaagatcttactgtaattgcttcgtttatcattagacatagttgttgtttttaatggaaaaaccgggccgaacttctaaaactaaaaagcagcccacccgcttccatagaacaatatcgcggcaacgtattgactaagatgagccaattagatgttggagaaaactatttatctcggcgctatcttgcggacattttaaggctgagagtcattttttttctaattatggcattttgaagaaccactgttgatttcatctgttatgtaagagaagatcttactgtaattgcttcgtttatcattagacatagttgttgtttttattgactaagatgagccaatgagatgttggagaaaactatttatctcggcgctgtcttgcgcacatttcaagactgagagtcatttttttttctaattatggcatctcgaagaaccaatcttgatttcatctgtgtgttatataagggaagagcttactgtaattgcttcgtttatcattagacttgtttttattatctcactagtcatttagcatctaaattttggtaataacaaaaataaacaatcataaaaatattcctgtttaaattatgctcaagcaggacctatcaaactaattccacgtagaagggattatttaaagatacaaccaattgaagattgatgcccgaatcaaccaaacaaaagatagatcttgccataattttatttgctactaaaattttagcgttgcatgaattttggcaatgtcaactcatgcaatgctaaaattttggctatgcgtttttgttgggacaccttggggtttacttggccccaaaccaaatgaagccccttaacaatgctatcaaaaatttagcagctgactaagtgctccaacttttatcaaaattttgaaaatatctaatattcgacgcacccatatttcaataaggttcatattgtttgtaaacccaaactaatgtctcagaattttggtagagtatgtccattttatctattgcaaatgttttagaggtgtgtgggtttagttgggtactttcgacaaaaaaaaaggctatcatgtgcttcaatcttgcttcaaatacaaattcaattaagcatgaaattaattggtactatgcatgtcgttcgtactactgtggaggttttcttcattctggaccaaatcagtgaatccagatgaaacaaatatgctgctcggcaaccatactgaagctgacattttctccgatcttaaaattgttttgttatcataggaagaactgacactttttttttttgcttcgcagatatcagcgaccccataggtttaatgtattccatcttctataggagcttctcctgtctcatttcctttgcttcaaacctagctagtccccacccttaaatctttcacatcacagtagtgggcaaaagttctgataattcactggtttgttgtgcatgatccgacttattctcattttccattaggcaagataaggatttcaccctctccagctatcctctaacggctcgtttggttggagggagtttttagaagggattgggagtttagagggatgatgctattaagtgttttgtttggttgggagagacatgagaattttgataggatgaggatggagaattgaggaaggaactccctccttttcaatacctgagtaggggcaggtaattgggagggaattcctcctttactttgtctaagcacatcttagttatccgtttttattaatgacctaatctccaactaaactccctatcaatttccatcaccccaactaaataagatattgggattaaaaatcaaattctcatcttaatctcatcataaattcccttgtgtaaactcccaatctccttccctcaagttaccaaacaagccgtaaggatgaaatggcgctagacatcaaacatgaggacactcccaagtttaccacttaatcaatcacagtgtacaatattattgataattctcatatagttatgtttaaatttaaaaattacgtacataattctcatcatatactgtgtaaaaagttctcatcatataaacaaaccaaattggatgctagggcggctaatcacatgattagtagaacattacaggacaaaccttcacatattcttctagaaggtcctcaaagtcaaacacccataaaccactaaattcagacattcattagggaggaaatcaagagcatatcttcttaattgttctgcaccctttccggaacaagctgacttgttcaaacggtcattaagtttcctaaaaacaaatgatagcaatgatacaatatatatcatgtaatacaaagcttgttccagaaattttgaacatgagattcacacagccggctgtttgaaccaccacattgctgtgatgatgatgatgatgggataattgatatataaggcagagggaaaccatcagttgaatgttgtgaaagatgatggctaccatgttgtttagggacacgtttatgctgtgattctgtgattactctcctcaacatgtataccacgatgtcaataaataaatagggacctgaagtggtaaagagtgataccgcttgctttcctttcatgggctgtatgtgtgggtatatagctgatagagtgagataaatgagaaaagtaaggtggtgagatgcaagagaatatttagaatcttttttttagataatggaagctttattaatctcagtaaaactctatcaagtgatacaattattctgagagcacctccggctttgcacccaaagagtgcacacagccaacaagaaagaaacaaaagataaactcatcatccaaatagcagggacaaaaagaacttcaggagccctctaaccgtagcctagaacgccacccatgcgccggggtagaaaactccatggccactagctccaattattgacaagccgcaatgatagtaccccgcaaattgaccttctgaaggatagcccatgaaagataacctacaaagaagaagatatgtttttcctttcaaaaaccacatcatttctgcaaagccaaatagaccaaatagtggtagttgcccctaataagaccaaagatctcaaattgcgtggttgtcttcttatccaatgcccaaacatatgagttgtactattaggcaaactaatattcgaagcaaactggattaaagaccaaactgcacgggcaaaacgacaatcaaagaacaaatgattaatagtttcatctttgtggcagaaagaacaagacttgtttcctctccaattccttttaataagattatcttttgttaagactactccacgatgtaagtaccataagatcttaatctttagggggactttgattttccagattcttttgtttatattgggaacatcggtctgtaccaacgcaagataaagagatttaaccgagaatctgccatcagttgttagattccatttaaactcatcttggtcgtgagataatataatattagcgatgcgtgagagaaggtgattccacaccactaacttagagccagtaaggtccctgcgccaagaaaagcttagaggactggtttggaaaatttctgaaatagttgcatgtttatgcctagcaacgttatagagacaaggatattgttctcttaaacaggcattccccaaccatttatcttcccaaaaccgtacttgagagccatctttgatgttgaaggagccaaacccgagaaaatcaggcttggccttcattagactagcccaaaagtgtgagtcttctgctttccactgagcttgagacaaaggctgtgaccccaaatatttgttccttagcatttgttgccacacaccatctgtagtgagtagtttatgcaaccacttgctaaggagagccttgttcttaatttcaagatcttgaattcccaacccctccttggtctttaggacgacatatgatgtcccaccttgctagtctatatttccttttgtgtccatccccttgccaaaagaaccttgatcggaaataatcaatcttcttgatcgctcctttaggtatttccaaaaaggacattatatacattggtaggctggtaagcactgaattgattagtgttagtcgccctccaagtgataaaagtttgcctttccaacttgccaaccgtttttcaagccgctcaatcacttccttccactccgaattacgaggtctcctatgatgtataggaatgccaaggtaacagaatggaaaagaaccaacctcacattgaaaaaggttagtatattgatcctgagctgtttgggcttcaccaaagcagtaaagctcgctcttatgaaaattaatctttaagccagataattcttcgaaaacgttcaacaacattttcagattacaagctttctctagatcatgttccataaagagtacaatatcatcagcgtattggaggatggacaatccaccatcaatgagatgaggcaccactccaacaagctgtcttgcattatttgctctctggatcataaccgctagcatgttcgctataatattgaataaaatgggagatagcgggtcaccttgttgaaggcctttctttgtttgaaagaaccgtccaacgtcatcattaactttgattgctacacttcctcccgaaatgaaggactcaatccaagaaatccatcttggcgagaaacctttcatacgaagagtttgtagtaggaaaggccattttactttgtcataagccttctcaaagtcaatcttaaggatgaccccactcaatttcgatgcaacttatgaacagtttcatgtatgacgacaaccccatctaggatgttgcgacctctcatgaaagctgtttgagttaagactcactatacggtcagccaccgagtttattctattagtgaccaccttagtgaaaattttgaagctagcatttaggaggcaaattggtctgtattgttggatacggttagcttccttgactttgggtatcaaagtgatcaccccaaagtgtatttagaatcttttaaaaaatggtaggatcaatatgttgacacactactcttgtgtatgtattatggagaacctatgttttgattagtcgtactatctttctaacgtgtgagaatcatacctatttcattatgcaatttctttctcttctaactagggaagagaagggattgttgtaacttaatcggtatggggagagtgttcttattgtttcatttactattaagtattattgttggttttctcatctcatctacttcattgtgtgaaattattgtaattgtagaataagagaatcacacaacaataaacttttctaaacattgtgcacattccacccaaattttgaaattaaaacacaagtgtatgggtttattcgaattggtgcccaaaccaaccacaaaaactttgttaacaccgataaatttggccattttcttcactaccaaaattttgattgttccaacttatacaaagctacaattttggctatggattttggttgggagtccatttggtttcaaaccgtatgatagcccttaaccccccttaacaacagcactaagaaaaattggcagaaaaacaattgttccaaccctcatcaaaattttgaaaatgtcccagatttggaatgcagatattttgcggcctcagttaggtatgtttgcccacgccccacccaaaaaaaaatggtaatgacatattttaataaaccaaatttatcgctggtgagattagtgctacttgaattttcttttcccaggttaggagtgctgggattttattcacaatggtaagtttggtaacatcttccatcaagattttagaactttttagggggttttaatgtttttctgtcttaatttggagagaaacaagtctaatgggccagaaagcccaatgccctagcaaggcccacacgtggcgcctcctcctcctcgtctccttccggcgaaagcccaaacccttctctctcctccccgcgccgccgtcgagatgtttcggagcccggccgccgccgccgcctccgccctcctccgccgcctaggcccccgcgtatccggcggtggaggcggcgcttccactcaccggcgattcgcgcctccggtatccacctccatcctctcccgctactcctccgcgccgacgtcctccccttcgccgccgccaccgccacccccaccgccctccgacgccgcggcggatggggataaccgagcggaatcgggggaacccggctccagtctcagcatcaccatcgaccgctccggcctgtacaatcccccaggtccaaacccttcctctctcgcgcgcgcgctcgcacggacgcaacggcggtgtctggatttagggttttctcatggtttgcgtcgggtttatgccgcagagcactcgcacgagccgtcgtcggattccgagctagtgaagcacctcaagagcatcataaaggtgtccgctgtttataatgagcctcttcgtgataatctctactgtttgccaatgcggaaaatgtgatttggtgttgtgaaaattgtgattcggaggttagttccgcagcgggcctatcagcgtagccgagtacatggaggaggtgctgacgaacccgcagtcagggttctacatcaaccgcgacgtgttcgggacatccggggatttcatcacctcgccggaggtcagccaaatgtttggagaggtaaatttgtattgttgaagtaataattaccatgcctctgcatatcatttttctttcgccctgtagggttattagaatagggaatgaccgaatgatggcactcaggttcaaagcaattcttcttgtgaagattataggacaattaattcatgtgttcgtgctatggggtgctagatgagagcaattaatgatgtttcttttcctcagatgactggtgtgtgggcaatgtgcctctgggagcaaatggggcagccagagaaagtcaatctgattgagcttggtccagggcgcggaactctcttggcagatttacttcgtgtaatgcatttctgcttgcatctatcctattttgaactttcccgatttgtgtctttgactgatgcatccattggaacaggggtcatcaaaatttgttaatttcaccaaagcactcaacattaacttggtagaatgtagccccacgttacaaaaggtgcaatacaatactctgaaatgtgaagatgagcccattggcgataaaacaaggacagttagcaagctttgtggagcccctgtacactggcatgcttcccttgaacaggttccttcaggatgtatggagttctttcattgataactttgcttctaatgaacattaactattgttgaaggctcataagcacttgtattatcaactttcacacttggtaaaatttgtttttgtactgaaaataagtgcaatttcagttttgatacccaaagaatggcattttgttttgtcctttctattcaaaggtccattttgtttttgccgctgcagttaccattcatcagtttggcagcactgatttggcatgcattgttaagtacagtagggaaagctttaaggacattagctatataagataaggggaaacattatgttttttattttattatggtaccgaatgtgccatcgtgtataattgagtactacctccgtttcagtttataagactttctagcattgctcacattcatatagatgttaatgaatctaagcacacatatatgtctagattcattaacatatatatgaatatggacaatgctagaaagtcttataatatgaaacggaggaagtaacagattgggtttagttaatctgcggttcaactcttgtggcgaggagccaaaagaattgaatgtgccaatggactgtaatttttctaattagttgtatcatctccttgcacatatgttaccatttcatatttggtaatttagttgtttttgcatgtgtaaagtgtatagtgttctcgtgatatatgctcatttttagtattagattgtaaatattttctcgtaagtgtcatggttgactttgaaactggttgccgcctttatctagttctctttttcgtcaagctattttctttttgacatcttgatcagatttcttatgcttgttctgtttgtatatgtattctctgcagtgccaactataattattgcacatgaattctatgatgccttgccaattcatcaatttcaggtctggttacaccagcaattccacctcttaatgttttgtgacacaaacagattgaatattgttcatgcattccactgaaccgtcctttttcttctcttcagaaagcatcacgtggctggtgcgagaagatggtggatcttgcagaagactcatcgtaggatttacaaattttatttttaagtggttaaccttatggagatgtgtaattctaactttgtagcaggtttcgctttgttctatctccacagcctacagcctctttacttttcctttccaagcggtgcggttgggctagttctgaggaacttgagaaagttgagcatattgaagtctgcccgaaagcaatggagatcactgaacagattgcagatagaattagctcggatggagggggtgcacttatcattgactacggaaaagatggaatagtctctgatagtcttcaggtttggatattaaatttgttttactgcacaatatgaacccatggctctgtccaatcctggtctaatgcctctataacattaaatttatgtcctagatccatatgcttctgtagtctgtaacaatggctagtgtttgaacctaaattcatgtcctgcatttctgcattatttggattttgatttttgtgctcacactgagcttttgctgtatatttttatgtaagaaataatttaattaatttctttggcactaacaatactataatttatgcaggcaatccgcaagcacaagtttgtacacatattggataaccctggttcagccgatctgagtgcttatgttgattttgcatcaatcagacactccgctaaggaagcttcaggtttgcacagatatcttaaatcctttctgcttgtttttctcatgtccagacaaacatttcttactaggtctgtcttgaactttctgcagatgatatttctgttcatgggccaatgactcaatcccagttcttgggctctcttggtataaacttccgtgtggaagccctgctccaaaactgtgctactgatgagcaggccgagtctctgaggacaggctactggcgtcttgtcggagatggtgaagccccattctgggaaggtcctgacgaccaaaccccaattggcatgggtactaggtacttggccatggccattgtcaacaagaagcaaggcacacccgttccattcgagtaaaagaaatactggaaccgtttctcctctcctcaggtaaaataacatcactgccgtgtaactcttatgctgctgatgaattctgccggcgggcagtccagatagataaggacgattcttgtcaaccttttctaatgcacaccatacatggactcgttcagatgcgtgctgttttttttataagaagtgtgtactgctttgtacttgctgcacggaaagaattggtcggtttgacattcctgttactacataggtttcttcgtgcaagatgggatagtggttgtatcaaagtttctggtacaattcctgaatttctactagtgttcaaccttgagatacaagttatgcacattgtttagctgcggagtcagctgtttagaccttgagatgtcatgcattacgcatttgtgcctctgtttggtatatgtgttccagttcactgcttctaaagtctaaagaggctatagattagtatttaaaaccggtttacccgtttcaaaagcatgcttatcttatgtcattcgtgcaaagccttgtatgattgtatccttgtatgccaccaatcagttgaagtcaaatatgtatttgttcggtacaattattccaagtcactgcatttttcccccagtcaagttactactataatactctttagtaccttcttccacgccaacaaagcatgcaatttgacatcctaacaccaaagccccggcaaaataatagggtaattaacagtctccattagactttgacaagcctcttgtttgttctaccaaatcaatcactgccaacatcttcagacatattgatcccttcaaaagctcagagttggaaccaacagcagtccaccgtcagaatccatcgaagaggtcggtaaaagaagttttagagatggacacggttattaaaaaagtaggtagaagtgaatgatgaaaggttgtgattggatgagtagtggagataggtggaaaaggtggatggcgcagggttgtaattggttgggaagagattgttggttaagaaattattatattttgggacaaatcctgaaggctaaaagtagttatattttgggacggatggagtaattagtaaaaaagaaaaaaaaaggttggcagaaaagcgactctccaattattggcttggcatgaaacgatatggcagatggaagaaaagaaagaagaagaagaagaataggcagaaaaacaaaacggaaaagttgcaaactgaaaacggccttaatcgtgtttactagtattatatggtggacgtgatgactttggatggacacgagagtcgccgtctccatcaccggtgcgatgagtgtcgccggaaaactacattgtttccattcacatgctatgacgggtagtagggtaggatcgacgaaaattggtgccgcaaaacaaccgtgagtaatccaaccagtgtggcaggcaatcccccctcttgctgtggatatcgtatcattatcccggaatttaagtatctgtataaattgaaagggtatgtagtggcttgatccttgtcgacgtgatctgatcctattatccctaaaatagagcctcaccggttagcctaataatacaaagaaaaagctaaaatttaaattttcaaacttgattttgatcttgattttgagatgttttcaatgtgatatttttttttaccttttaatatattttcaatgtaatttttttagccttggcttttaagtcactataacggatatataaaagttttacttataaattaatttttattctctaataagacgttctaacttaatagggaatatgatcaaccgatgagacactattgttttataggagcgtaagactagttgccctgatcatatatgcatacgacttgattttgatcgtgcgatccctcgagtaccctgatgggagcatgggaccattcaacacaatcctatatgaatatctgatcgaaacatattcagtagtacttaacacctacaatttcaaaaataataaatatacaaacagcgctagactaaactacagccttgtaaggctataattataaaagaacacatacacacggtcacgtgccgataatgccttcgcataccactgagagagaaattagcaatgggccgatcacatgaccttcagccaccaaacctacaaattgttccaataaggatatagaatatcgagtcaccaagattctacgcatagtaccaatgaggatacagaggatcaagtcatcaagattctacatatacactacgcgtcctcctgtaaatccttaaaaatagatcaataagaacatatgatgaatcgatatgtacgcggttcaactatatccactacttaacactagtaataaagtagtagtaaactagtgctgaaatttacacactagttaactattagagcataatggtgagttatatgtcaactataaacttacgtgaaaaagagagagagagagaaaaacgagacgtgttactcttgcaagagttcgctctacgcatgctccaaaatatttatattaaatttaggagagaaaaaaaaataaagccaaccgtaccctatagttaagatattatactccctccatttcaaaatatttgactacgttgactgtttagc

SEQ ID NO: 27225 - DNA, 10197 bp, Oryza sativa
gtcaaacattttgaaacggagggagtatatgttagctctaacactctcccaattcagtactagaatcaaacatcaaccaaagaccaaaaagttggattttcagaagaagaaaaataaaaggtcccacaagtgaaaacctatcacaaagtcatcaccatctcctttttctttatatataaatcacaagtcatcaccatctttgccctgcatttcctcaggccagggaacaccagaattccaatgtcaacctcccccctttggaattggaatcaaacgcaggaaccaaaccaaccaacaaaccaaccaacctaaccaaccgaaagggcaggagcaacggcacgtccaaatccggtgacccaattcgtcgccccggcgagccccaccggctgcctccctgtcccttgccgacaaccggcgacggcacgtcccatcgctgccgacggcgacgccggccggccagccggaaagcccggacccggaccaccttttccatcagcaatagatgagacacatttcttcagttagtcaaacatggttcagactttcagagattcttttcttttagagacgaatcatcaaatcatttccaggaatcagttctgaatccgaatccatccatccacacgtgcatgatcaatttcagtgcagaatcggatcaaacaaggggacacagattgcacaggcatatggagaagatcaagatagacagatgctactaatattacttgcatatacatatattccttcttctagctagtgaggagggaggggggccaaaagaacagcattgaggaggcactgctaatgctaaatactgtcccaattgacatattttgccaaaacaacaaatcggcagacccgagctaggggccgcctttggctaaatcttttcggttagtggatgttactttcccctggctgagaaaaacaaacttcctccaggatcatattcggcttcggcacgagaagaaggtatcgtcgtccgccggttagaagcttgggtaagaatagggccagagccgagagatcaggatgaggtgatcctggtctcgaggtcaggcgcgaagctgtgcggcatctgatcgtcccaaaccaagccgacctcgtactcgggaacatactcctgaaatttccaaaagggtacatacaaacttggtgttatgagaaggaaattgccatgtagggcaatgtgtcgaaaatggaacagtgcaagctgtgagttttttttacctcaagcttcagaactagctccctggcagttggagccgagatgataatgcgccgcgcatcctccgctatgaatccttcgctgacagccatgtcaatgaaggatagaaaaggatcataaaacccgtcgacattcagaaggccaacctggtaaatattgaggagctgttagagctaggagtagagaatgtgcatttgagagcaataagggaaatcccgcgcgattaaaagacgagcattcctctaaaaacatggatccaagaaggatcactatcctagttaatacagttacacgacaccatatgaattttgtgggggccatcagcaaagctgattgctaggcatgatgaatgaggtttaatgcactgctcagatccattgggtcattaatttagcatagatgcaaacgataagttcctttttgaattaaaaaaaatgacaggtacaagatcctgcgaacatcattctattagatgagttggaacattcataaaagtataaagcatatatcatattaacaggaagcataaacaatagagggtgcagatctcgtgatccccaagctatcgcctaatgtactgtaagatctgcagatcatagagggcttaaactattggtcaataattcggtttctagatggcaaaaccttcagccaaccacatgggagcaccacgaagccataatcaagggcaagatgttagcacaagatctcaatggatccaacgactttgcgattattaatttgcctcaattgcaaccagagacaagaaaggaattcgggatcatgcacgcacaaccacatggcctccaaattatcgcgcaataatgccattcgttttcttcgtgaatcttactagtacaagatatacagaggaatcagaaccagttggttacttaccggcttcttgtggattcctagttgggcccaggtgatgacctcaagcaactcctcaagagtcccgtagccgcctgtcgcgcaaattaagagtgtcaaattttgcatccttaggatgcagcatcaaaaaaaattcactgcaaacgacgtcgtagtagcaactaaattatcataccaggcagtgcaatgaacgcatcagcaaaccgggccatttcagccttcctctcgtgcatgccagagaccgctctaacttcaccaacaggctcaccagtgacctgcaaacgaaaaaccagtatatattgaggatccggcacacatcacacttgtttctctttcagaatcatgttaataagctcatcatcctagtagaaaaatatttaaaaaccttttttagtgaaactagcaatgcaaaagtccatagaaatacatggctgacaacattcggatgcaaactacggcacacagagttgttcagcgtgagatcatcatcgacattagaatacacaggaaatacaagttctacgtacgtaatgcagtggtcaaagaccacgacaatcaagaaagtcccatttttaagacattgtactaccgaatgagtactagtacaagtagagatacgtacaagaagagtaaataatcccagttactgcacttactactacgtgcaagccccagtaaattatccgaaggcaaggcaaatgcgatggcacatcctagacagctactatagctcaaaatccatttaagagcagcacgcaatgctgttggataggcgcattagattcatgtgatgagcataaatgcatcatgtccccccaataagcactagcagcatgccaacttggttctttattgcaactcctatttttcagctgcgcacagcagcagcagcagcagcagaagccagcagggagaggaattgaaagcattcatcaatttcgccccgaacaaaatggagcagcacggccacattaaaaacagcaatcaagattatatctatctctatcgatcgagcttgtgtaatagcagtagtactactcctactagcttccaggagtagacagctcacctctctgggcatcaaggatttcgggatgaccctgccaagaacacaaagagagaggaaacagaaaagcacatcagtttttagcacaaaagcggtcaaacaggtgtagtaagaacaagcaggcttgctttctctcccttggtaaagagactggcaaagccaaggcccaggctattgcacaggcagcacagctacaccacactagcaatacagatagatagagagagagagggagctggaccaaataaacactgcacaataatgagagcaaagaagagaagagcactagtactagcaagctagcagcagcagcagcagcagcagattgcaggagctgagctatgcaggagcaggccaagtgaagttggagtgtgctgctgcacaaacaacaattcaagcatgcaggcgagtagcctttcggaaacggaggcgaaaaggccccagatgcattcaaaatgccccccccccccccacactgagacccaagaaagagagacgaaaatgggcagggactcagcacctactactcctcctacccccaatctggcgatcaaaagctgccgtttttatcatcccagcgacgcatgcattctcacacatctcacctggcaagcaaccagagaaagatagagagagagagagatggacaaatggatcactcacccaatgacatggcgaccaccgtcgtgaacagcgtgggagacgaggcccatgaggccgatggagccaccgccgtagaccaggtctatgcccctctcgacctgcaccaacacgaaccaaaaacaaaaggggaaatgtaaaaaaacaagaaaccaatcaacctctctctactctcttgagtcgacaagaaaaatccaaaaggtgggggagagagggaggagatggtggtggcgttttgatgcatgcaaaaattgtaagattgttgttccgttcgggacgcaactgaggtcaccgcgctcgccagcaatcatgattggttttgtttgctcatctagaaaacctactactatagctgcctaggatactagggacgcgcaccaagagagaaacggccacggcgagccggagagtcggtcgccgccgccgccgccggcgagccggccggcgaagcccggagggggaagaaagaaagaaaagtagaaaatgaaaagattggatttttatgacggatttgggagggagggagggagaaaggacaatcaatcaaatcaaaaaagaagaagaagaagaagaagaagaagaagaagaagaagaagaagaatcctgaccagttccttgccgagctcgacggcggcgtcctggtagctggccttcctccccttggcgctgccgcagtacacgcagatccgcctgaaccgcgaccgcctttcccctgcaccaccgccaccgctctccggcgccgccgtcgccgccgcccctgctccggcgctcctctccgccgcagcctccattgccatcggcaccagcctcgccctcaggtaggtagagcgcgcgtgcgtgagcgaggcagcgattggaggagagagatggagagagaggaaattgaattggagggggaggcttttgcttgagttgaggcggatgaggtggggggaagcggggggtatttataggagatggacaaggagaggagtgggtccagcattgttgggggagggatgtgtgttgtgtgtgtaggggtagtattggtaccacgggacgggagtccggaggggaaaagattgagtttttttttctttttgtgtttgtgtgtgttagtagcatttttgttttcttttcctctcgcgcttgtgcgaaaattgcttgccacccgtcgacctccctctcactcacccaaacgttatctgaaaacgatcaggtttttccatcacacatcacacgtttgggaataggggtgaaaacggatattttttaaaaaaacgggtgcggatgcggagcgtgtttcgaatatcggaaatgggtgcggagcggtgcggacttggttcggaaaaggattaaaattattggatgttatgtatatatacaagggacgatattgatttagcaatacaggggacaacaataacgactcataagaataatccattgctaataacatgaataaataatatccattatatgaaaacgcaactacgtaagtatgagataagacgataaaatcctcgaacaaaggagtttacagcttgtttggtaacttgaggaaggggattagaagtttagatgagggaattgatagtgagattaagatgggaatttgatttttaatcccaatatcttgtttagtacacatggtacaaattgatagggagtttagttggagattaggtcattaatgaaaacagatggttgagaattgtttaggcaaagtaaaggaggaattcattctcaattaccacccagtacccaggtattcctcaattccccatccacatcccaccaaaattcacatgtcttccaaccaaataaaacagttaacagcttcatccctctaaattcccaatgcctcctaaacactcccccaaccaaacagaccattaggttaattgataatataggtcattaaaatgggtcgactcatgttatatgcaatagatagagtgattatatgggttgataatttcagattatctagataatccaatagaaatatcatataatccatatccgccagattttatagataccacatccaaatctgaatccacaccataccattcgcattcgcattcgcattcatatcagccggatttctaaaaacccataccttatcctcgttttgaacggattcagagcaaattggatcgatataatctaatccgttttcacccttatttgggaaaaacctaattctccgaaaaggatggacccagactttgagcaccctagactgtggcacgaggcataataaggttaaaagtccatatgctgaaatttattttcactatgatgtgtcgagatgatagcaaggttcacgttatcgtgcggttattgcgcttactgccggggagggggtcggttaccggtggttagggtttgagaaattttgagcaaattcaaatttttggaaaaaaataaaaaaaatcatggatgtagttcttgatttttaatggtagatggtgaagaaaatttttgaaaaagagtaagataatatcaaatatgagggcaaaaccgataattgtttaggaaatagaaaaaagaaaaaatgtattgggcttcatttttgtattttacatccacaagctagatttgaagtgtcctatatatccttccccaatttctacacacatttaagtgatttttcttttttttagcttcttttcatttttttttcatgctttctgcaaatatcgcgtttagcgtgcaaatatcgcgttaccgcgtcaaaccatgcgatgaccgcgacaaaccgcatggtaaccgtgaaaccgccaaaatttttaattcaaattttttaagacgaaattcacatggttttcggcggttaccaattaccgcagggagacgataacctcctgtaaaacggtaaggtaaaccctggatataaaaaaacatagaaacaagaaatcgaagcaattcccttattacaaaggaaaaccgaaggatttgattgccatgtcaactacaaccctacagaaaatatatgaatttgtcaactaggtattttggaactttggatactccacgggaaatcgacaggaattttatagaaaaaataagaataggtttgaggagagattaaaaaagagttgcattagacttttcaaagaaaataaaaaccaatatgtttgagatcatgttttaaatcttccaaaaagtgaagggaatatagtatttctatggaaattttccctccagatctttctatttcacaaaattacaagtttaagaacttgtttcacaaaactatagatttattgtcttcgtttatcacaaaaatgcaggtactttgcacaatatatcacaaaactacatattcaagaaccttgtttcataaaactacagatttaatatcttcatttatcataaaactacatgcttagtgtctttattatcacaaaactatatgctttagcatttgttaaaacctgtagttttgtggtaaatgaaaacactaaatgtgtagttatgtgataaccgaatacactacatgtgtagttctgtgataaatgaatacactaaatttgtagttctgtgataaacgaatacgctaaatctatagttttatggaataagttcttaaatatgtagttttgtgatagattgtactaagtacctatggttttgggataaacagaggcactaaatttgtagttttatgaaacaagctcttaaatctgtagttttgtgataaattatgcaaaatacctgtagttatgtgaaatttgctcaaaaaaaattattagagggtttcagtcttacaggttttctaagaaaatttccttgttccaaataatccctaagtgagtttcttcttgtttatggcacaagtgtcgtgcttttccttgatctcacgagcgtatcgtggctctagctcctttggaacgtctagtaattttacaatacttttcgcataactagttttgttttgtagaaaatcttatggaattatcattgtagaatctataatctactaacatgagtgcttagcctaaacatgatcaccctagtacggaaattttagggttactggccgttgtttgaagccgttgatgcgattctcattgttccttctgcaataccatcaaccggagtggaagtagaggatgaagtccctcgaactgctccggtaatcgtcggcatatgggaaataatcgtagcagtgagaacaccggcttgatcccgaaggggttgtcgtcgatcacttgcggggtagcggcggccttccggtcgccacctacactggcccggaaccgccacacgttttccctccatcgcctatgttgatcgggtttagggtttggctgtcagggagattgagaccaagagagatcgccatccgctcttgggccggcctccccttttatatttaacactgcagggaatcgggggcgactcaaaaggaaataaattgggcgccaccgatcataacgcgtagttaatcgggaattaaaacaaattagatcgctgtgatttcgcgtagacaacgggtggaaaaacggtgtagcacgatctcctcccggtttttcaaaccgagatatcaattttttcaacactcattcgatcgtcttcctggatacccttcgacaagggtaaggctgttgatgtcaacaataaggctgaccaagacattcacatcgtacaccttgccaccatggccacatgtttctgagcttgtaagtcatagtaggataatggcaaatcgcttatcgtgttacacgcatgggatgatggcaaaattttcgattatttatgaactatttagagttcaatattggaagtacgtttcctcaattgatatactccatatagtaatttccaaccagttactcccacgcttagggcatctaaaatagatgcaaaagtagtccatatgtaatataatattctattcagtcaccttgtattgttgtgcaagtagtcctcataaataaattatcaaaaggtacccatatacatatggattacttatatgggataaattatactattatctatctctatttatgtctcttttcctaatgttatcatgtatatatacattgtgaagattgctatagttaaaatctatttatgtagatcctatttatatggaccacttttgtcatgtatattggtgaatggtgatgcccttatattcagagcaataaacaacttgaattcaatatgctttctttttttaataaaaaatgaaatcatttttggtccgtcttaatttcatccttgggcttatactcagacccagtttcccttccatcaattcatttcatatcaaaattgaaaaaacacatactcttactggagtttagtacatttacgcacgtaaaaacttcatcaatcttaagatattacttatgagtttttaaagtgcccataagagtacacatttatagaagtgagtgtgtccgcgtgtttccgagtggttgcatccataccgtgttccaagaaaataatttgatgcacgtgtacagtgatgtgtatgtgcgtctgtgtcccgctatgtaataaaaataaaggactacacatttaacatttgatataaaatcccttctaaaatctgttaaatgtaattctttctcatttcctcctaatcgattccggagtatgctaagctcctccttgatagtccaaaccaaatctgtcatttggagaaaaattaactggaaaaaaaaaagagatggaacagggggaatgaagaccacacacggttcgttcgccctccctcctcgggcaaatcatcttatcccagtcaaacgggtgatcgaaatttattgccgtcgtgagtgcgaatcgcatttgcattgcatctacatcgcgttctcttctcagccacgtcgtgttgctgttgctgggtgacgacgccggaatgccgaattaatggcgagatattagtagggctgtggctggggatttgcagcacgcggcagccatggacaatgtgctgctgctttgcttcgctttgcttttttttgtggttgttgccaacaatttaattcatcgcgacgacaacgacgcattatgcatatcaccatctgcactgtccatggatggatggactgggctgggcggtcaaatcgtattcgtatctatcggtctcgtgctggaatcagatatggtatcggaggagggagcggtcaaatcgtatcatcatgggccattaatcaaaacgatcaattgctagtagtattgcccgcgagcaaagggcatatggatggatgtgtgtaggagtatgctctcctcgcattgcatgtgcattaattttgggcaagcgctgcctagttgggccctggattaattgctggtgtggttggaaaatggagtaacacctgaaatgattttttagttacttttt

SEQ ID NO: 27226 - DNA, 23122 bp, Oryza sativa
  unsure (1)..(23122): unsure at all n locations
aatatgaactggttatttcataaaagagtgtatacatcaattttatcagcattgggcagaaaaaaacctaactaattactttggcccaatcaaaaacctcaggatgagatgaaagagcaatctgcaatattatggtaacttggacgtataatttgacaaaaaaaattatattagagcaattacccataaaccataatagtcttctgaacattaaatcacaacatgaggtacaaaatagcctgaactgtggtttgcattcaggaaagaccaattaatgttatgaattaggaaataaatatacaaatctataatgctaacatcaagtaatgtaaatcttaattgatcatgatggtagaaaaactgaaaaaccatgctccgaaggtttaccttagtataagtagaagggtgaaggtcccttgcaaacagtacaaagtgcaaatttgacatcccctgcaactgaatttttaagaagaacttccatctacactgcagaaagccacaaactcatatattttggagtgcaaaatatctatatcattatctattttgaacaaatattgggcccgtaatattgctcttacctttacaaagaatcctcctgctagcatgaatgccatgattcatgactgtaactgaaggtacagtttttgccttttttttatatccaagagggtagctccaattgccaatcctaaattcctaatccctgcatattacttcctgggtcacagatttctaatttccaggtaatatataaatttaaagatgaactaaactaattgccagacaatataatatttgcatattaccttagctatatgatgtagaagctgaattatcctgagagtcgtcgttgaatccggcctagacgttggctcatcaacaatggtagattatgaaaactacctttcaaggcgaaatatttcatatatgatatggctcagcgaggatgacacgcaaggagtggggtgtgaccctcgtcgcgttccacctcgtcgccaaccacagaccacctcgcgaacatagaatatacaatgaaagattagcacttcatcgaactgctatttaaataaaaattagtgtaaatattagtttataacttaatgcaaagcttatttaaatgaaaattattctgttttacatactaaccttgcatcacatatctgtaatgttctttttaaactttcagcattcattgaccttgggcgcgcaatagctgtggaactgatctcagtaatgatgcccataatatttgcttgcatatgaaagtagaatagatcacagtcttataaggcaatgtacaaatagataaaatgaaaatattatagtaatatatcataccaacatagaatatgttttttatcaacaagagaggggatttcatggaaaggcgtcaatgaaaatgttatggcaggggaaatcaggtgggatgtcaatgcattcttctaaggttgtccatttactgaataaattcatgaagtcgtttgaaactggtttgtaagtcttgtttgcatctttaacaatgaacgactctatgtattagaccttcccttcatggatgagaggtttcagaacctcaattgcaactcggtatatctgaacatgaatgctattgccctacatatttttaataggatatactatattagtaatatgtttggtatactaatgtacacatacaataagaggcatatgagtagtgatttgataagtaccacttcatcaagtaagacaaggtctgcaggatgtttgtatcatcattgatcacgaaaatgccaaagtttagaaacccttgcgagaatctttttgtctgaatccccagggtaaagctgtgaaatgagcatgtgtgcaaaaagcataaacattttttttcgccaggagcataaacatttcagtatctaaatggagtaatgctatgcgatgaaaagcgatgataaaaagaacattacttacaattataagagccttatattgcaggaaatatatactatacaatactgtctaggtatctatttattataaaatgtatgtataaaagcattggggggggggggggtcttgttgacgaaaaacactacgtatcaagctgcgaagcctgcaacaacagtatatttgcattattatagtagctttggtaggaaaaaatgaaacacagtatgcagcaatgttgagagcagcaccgttgtcaacgtagcaggtagtatctcagtgtaaacaacctatagccctagattataatgaggggtattttttaccttgcaccataatcctttatctctcttaaataacttcctatatccctaattatattatggaatggagggaatattaaaatctgtggagactgttggaaacatagaagctcattgcatgagactgtcatatctgtactatgttcataagcttctcgtgtgaagtattttttacgacaaagcttacttttagagaatgataaaaagtttcatatttattttataaaagtttactaagaagagtacatgtagcatattttcgtatgctacatataacatattttccacatgttatatatattatctaaaaggaattctatacaaaattaattgttatctttaccgtcttcagatacatactatttttaatatattttaattttcccatgcataatattttctcatatgacaaagttataaacattagttatagttgcacaacaaattactatattatcaatggtagatattccacaccttccatgcccacgtgtaaattcaaccttccacaccaattaaacggtcacttgacgaaaaggatatatttggaagggaaatttttttcaaaattcagggtatgcaagtgagtgaataaaactcggagcatggaagtgatagcatatgatcttaagggaatacaatgatttttctttaaactgaaactgaccaccattaacatgattacggttacgagaagtgcttctatgctcctcgaaaaaaaacctgcacgaaaattaaatcacatcaatggctcagattaaaaggtgattactaggataaaccatcattagcaaggggcaattttgtcctggaagtaaaagcccacatccagcccaggccgatcgctccatcgatctgggaggttgacatggcaacagggctgggtggtgaagatcaccagatcggccggccatgtgcgaggaacgggaggggcgacgagctgtgcgggctgttgtcgttgcgctcggctttgagacgggttataggacgatgagatagaggaccagttctcgaagggtagtgtggaagcgacataccagatggagcatggccgcatccgctacggcggccgtccatgatgacacaaactcccggcgaaatactcgcttcttgtacctagcgaaaccttgatagaaatcccaacgattcaactgttttttgatttagtggttttcgtccttttcaaaagctgaaccttttggccgcttgacatgggtgttgcagatcttatcagaatatcattccaggtgcattgcgagggaatcgccatcgtgaatcgatcgatgagaggcggctgggtacgggatgggtatggatatgaacttttgcttcctggacgaaattgcccctcgctagtgaggtttatcctgttaatcactttttaatccagaccattgatgtgctttaatttttgtgcagttttttttattgagcatagaagcacttcttgttacgaagaaacatgcttatgtgatcttcagatgacatgcaatagttcttagattgaagaaatctgagagaattccatgtgagtatctttgaactgtgatgtatatataggagtacataccttttgcttgtacatttgaaacttagcctcggtgttctgctcctatttgtatcaagtcatatccacttctcgttacgaagcagaaactggtgctcttttatcaacttgtgaaggttaatatatcgctacaacggctagcatgttccaacagacattttgacccaaattaaatccattttcttttgttctgaaaattgatgttcagattgatgcctaacatgcagtggagatttcaattttactggtattctacctgtttaaatcttgcttatcccaaacagttcctctacgagagattttgattcactgttatcttccgtgacaaacaattacaggtgtacttacataacaagctgttctgaagcaggtcctgaagcatctctctgctgaattcgtgttgtttgcatatacggaactaaatgaaattccagatatgtttctgcatactatgctccacgaactaggaatccttaccacttcctctgaatgctttgatatataaaaaaaactgcatactttgatattcacttgattgtgcatcacacctgacactttacaacagcacaagtgatgaaagtaatgtttttcagaactgatacacctcaaactccctcagaagcactgtttaccaacctgaacttttacatgccaacacaaaggaattcagagctggtgcaacacaattttgttcttggcatcgagcatcgttcaacgatggtgaactgaacgtggcacacatcacagggcatccaatatgtaggagaatacttagcagtaacacaaagagaagtgacatgcatatgtataaatataaatcaaacacggggctttagacacggaaaacaaccaaattacacataatatacgcagatccaaagagagcagtgcaaagttactgaaacattggccccagagagtgaggttacagagtgcactcaaacacctaaaacaacatagcacgtcgctgctgctcttattgacttcctagctaaccccattgtcatgattaagggtaacaaactgaccattgccctatgcaagtaagatgatcaatgtccatctgccagtgaatctgagtacaagggaacatagggaagataatgcagtgtggaaacaactccaagctcacctatataatgcacttccctgctatccatttcataggatatcaatattccttcatttggcaaaacaaagaaaatgatattccgttccgggtgaatcgagacaacttagtagtcatgtccaaaatcttttctccttcttccaaatagatgtaaatggctgacagtgtgcttcaaggtccactgatcactgctgtagtcctgaagaacccatactgataagctgttatacagatcgtagcgatcggtatttacgaaatacagtcgaccttgagacagatctacgaacccgtcatcgacattgcagtcaggatcatcaagagtttgtggcattggaatggtcctccaagaattcccctccacatccaccactgcaaccacataccccatggtgatcaaatgcagcatcccgttgaagaacacgctcctccaatcatcaagcaccccgatttgatggccccaaccaatgtccttgtgactccacactccagtttcagatgaatagatctccagcgcgttgatagttgcatcaagttcaccatcatctgcttccccatccgcgttcgcgggattcttttccaccaactcgaacacatggaaatgggaggaggagaccgccggatcgaaccccaagtaggcaatctgtctcttgtcagaccttgcggattcaggcaggacgacccattgccgagtggcgtgattaaccactaggtaatcgaatctccgccggtaatcggaaatcctccagcagcggcagaggaggccgttgcaggaatcgaggaggtcgagggcgcggcaccggggaaggaagtggagcgaggggtcgaggaagagggggcggcgtagtggtcgaagaatccggcgatggcgccgtggaggtggtagcgagggaggcggtggtcggagtcggggtgggagatgacgcggcgccaccgccagcagacgcacttgaggccgcagagcgtcttgtagggcacgcgcgagaggacctcgacgaggaggtcgtcggtgaggttgtcgtccggcggcgggatcccctccctgcgcgcctccttggggggggggggggggggggcgcaagcgcgcgctcagggaacgaggttgttcatggggttggggcgcgtacgcgcgcgcgcgtcagtggggccccatgtccccatccccgcgcgcccccttttttttttcttttcctgttcgtactttttttttcgattttttcgcctccggacgcgtttttcctttttttttggccctttttttcgattatttttcaatcttttgcacatttctttataaatgtagaattgaaagtttataattttgactcttgacttgaaagttttcaaatttgagatgaaagtttcaaatctaatgttttaaatttgtgttgaaagtttcaaatttgagataaaaagttaaaagtttttaaatttttacttcaaaaattcaaatttaaggcaaaagttttcaaattttgacttcacgtatagatttatttttaattttttatttaaaaaatcttaaaaaaaatcttatcttaattatcgtcatatctaacactaatcggattagttattttattgtacgcgtttctggaaaaaaatcgcaaaaaagaaaaaaaactcacggtgcccaccaaactcacgcgcatgtaacgagggcccgccacgtggcacgcgcgcgacttctctaagtcgcaaagtcgcatgtacgcactaattagcaaaaccgagacatgacagttgcaatgttctcccaaatctaaacaattttgctctatattttatcggtaaattttctcccaaaatttattaaatgtaaatgtagtataattataatgaatttttttaagaaacaatacaaacgcgggcgaccacaatatgcgtgcactcaccgctatgagcacacgcacaccctaccctattaacctaaagttttctaattagcacgtagctaaaaatctggcgcgcaatttttgatgaggctgtttttttttttttttgcgctagcaatgacgtgcgccggattagaagaaaaaatcggataatcacggttttaattaatctttcattccttttaggaggtttgtttcttttttccttacaaaataaaaatctatacgtgaaatttaaaactttctatagaagaaaattaaatcacacctgtaatttaaaacgtccaactcaaaattttgaattttcaactcaaatttgaaaactttcaactcaaaatttaaactttcaagttaattttaaaaacgttcaactcgaatttgaaaactttcgatccaaatttttaaaactatcaactcgaattttgaaaacttttaagtaaaattgaaaactttcaagtaaaaatttgaaaacttccaactaaaatttggaaactttcaactcaatttggaaaactttcaactcaaattcaaaaaaactttcaacttaaaatttgaaaactttcaattcagatttgaaaactttcttggtcaagattttaaaacttttaatttgtgtgctggagattaaaaattttggaataaacgaaaaggaaaaaaagaaaacacgtcaggaaaagggagcgcaaaaaatggaaaaaaatatcaccaaaaaactacaagaaaacaagtcaagagaggggagcacaaaaaccacgtaaaaacatgtggacgcgatgggggcgctagctagcacgtgccagtccttttgttgacacgtatgcgcgggatagcaacccccacccccttcccccataaacacctccgatccccttcccccataaacacctccgaatgactggtccggcatatcttgagagttgagattgaaatatcaccacgggcaccttattgtcgatgggtacgtttctaccgctgaaagaataattagctgtaaatacgagcactcgtgtcaaaattaggatttgatgcaacttacatataattttaaatcgttaaatttaccttaagattcatgcaagttgggaaggaaaaaatcatagcgcacacgggtgaggagattcggtcttgtgctctctggttcgcgaaaatagcttgttaatagggttttttttttgaaagttatatacaagttgtatatttgtattgtagttatatgcaagttacaatatgattatactatatttatatctgttatttttttaaaaaaaacaagctaaatgctcgtgcgttgcaagggaattacaagtaaaattcaaaaggcaaaatataattattccctctctaatcatcatatcacatttggtataattttgtgtatatatgttgagctacacagttgctcatagtgatgaacaattgatataaattattcagagtgtttatagtgatgaacagtctatctatctattatatatattattaaggcaactaaaaaagaagccaccacgctcaatgtaaggctagaaatttccatattcatcacagtaaaagaaaaaaagttcaagcaaaaatacaatttagaaattaactaaaattcagaattaaaaataaagaaaatttgaagaaaatttcatataggacccaatacgagattaattaaaataaaatataaaataaaattttgaattagaaaaagaagagtttaaataaaaatgcaattagaaataaatgaaattcaaaattaataagttataatggaagacgagtccatatagaaacccactatgagattaattaaaattcaaaataattcattcataattgcaattttcataattgcagcactagtatagtgcagcctgcagacatttatgatcaacagtagagaaaaataattggcaatagataaaacgaaacaggttgatgaaatgatcaatcattattccatcattagctaccaaagtcaggatatatatacaacaactctaggcatctagaatatcaaaaatttccagtaaaaccactataatcggacacaaacagaacagttttaatagtttccattgtctagatgacacacattgttcaacgcaacaaggagacttatcaatgaacatcaacttagccatagccattgagttccactaacatgatcgatttcactagctaccacatgaaacattacagcaaagctaaaatgtacattttggaaatatacagtactgctaattggcgtctgacagaaaataataattcattatagccgagtataccctcgacatgttctacaattgtgatatctttcatgtgatttagcgttcaacagatcaaatattggaattttccttaacagtctaataaaaaggtgtagccttccttaactagttcatatcattccaacactgagaactaacataaactcccatgctaagcaaaacaaaaggtaggtaaggtagtctgactaaggaaaagaatccaacaaaaaaaaaaaagataaatagcataatgtgaaagcttaaacaatattgacgtgaataaacgcttcctcatgagggaataagcaatgtcaagaataaatttcttagacactaatcatgcatgactcaatggaaaatataaatatatgattatagcctataggatccatagttaaatggtaagtgctagagggttttagacactgtaaacaatcggataaacataatgtcatgcaagtccaaacagagttcaaagttactgaaacattggccccccataaagtgaggttactgatgacttaacttcaatgccataattaaagttaacaaactgagcattacgctatgcaattaagatgatcaatgtacatttgccagtgactccgagtacaagggaacatagggaagataatgccgtgtcaaaatatctccaagctcacatatataatgcacttccctgctatccatttcataggaaatgaatattccatcattcagtgaaaccaagaaaatgatattccgttttgggtgaatcgagacaactttgtcgtcatatccaaaatgctgtttgtcagttccaaatagatgtagatggctgacagtgtgcttcaaggtccactgatcactgctgtagtcctcaagaacccataccgataatttgtatagatcatcgcgatcggtatttacaaaacataggcaatcttgagacacatcaatgaatccatcatcaacaccataataaggatcaacaaaagtttctggcattggaatggtcctccaagaattcccctccacatccaccactgccaccacatcatccatggtgatcaaatgcagcatgcccttgaaaaatacgctcctccaaatatcaagcgtcctaattatgcagccccaaccattgttcctgtgaatccacactccagtttctgatgagtaaatttccaccgcaacgacatttccatcatggtcaccactcatacccatagcactatgctccaccaactcgaactcgaacacatggaaatgggacgaggagaccgctggatcaaaccccaagcgagcaatctgttccttgtgagtccagccagattcaggcaggacgatccattgttcggtggcaggattggccaccaggtaatcgaatctccggggatcggagagcctccggcggcggcagaggaggaggccattgcagatgtcgaggagccggagatcgccgcagtcgggaaggaaggggagcgaggggccgacgaagcggcctctgcctgagaagctgatgaaggatctgtggtcgaagaatccgacgacggcgtcgtggaggtgataccgcggcaggaggcggcggtggtcggggtcggagatgacgcggcgccaccgcctgcagacgcgcttggagcggcagagcgacttgtagggcacgcgcgagaggacctcgacgaggaggtcgtcggtgagcttctccgccgccggcgggatccacaccctagaatcctcctcctccgccatggctgcgcaagagagagatcagagaagcaaaagggatcacggcccgtttggttaggagggactgggtgtaaagagagatgagactatttaagtgttttgtttggtttggagacatgggaattttgatgggatggtgatggagaattgagtaaggaactccctcctttttaatacctgggtaggggcaggtaactgggaggaaattcctcctttactttttctaagcaaatctcagctatccgtttttattaatgacctaatctctaactaaactccctatcaatttctatcatctctaccaaacaagatattaggtttaaaaatcaaattcccatcttaatctcatcatcaattccctcgtgtaaattcccaatccccttctctcgagttatcaaacaagccgtcaggaaaaggacggcggcgcggcgagggctttgttgtggtgatcggccatacggtgtggggaatttcatctaatcccgatttttacggggaatcatattatgcgaaagaaaaggcgaaacaaggtatttacaaataaaaaaataatttataaataaatttttatataaatggtaacgattttaaaaaaggctgaaaaataaactacgatgaaaaaattccaaaatcaactctacatttaacgttagaaatttaaatgttttactaataagtataaacataattgaaaagatgaggagttttttttttattctgcactttagccctttggttatggggttttaccgaaacagataatatcactattaacaattatcgtacatgccatgagtttgatcaatggacaaagaaaccataaacccttccatgcgcacgcttcctatactattaaaatgtgtatttttttctgaaaagtttcgatataaaagttgttttaaaaaataatagcaatctattttttaaatttaaaataacaatatttctctcaaacactccaacttacttcctcgttttccgcgcgcacgtttctcaaactactagatgatgagtttttttgcgaaaaaaaatttctatacgaaagttgttttaaaatattatgttgactcatttttaaaaaatagttaatatttaattaatcacgcactaatggattatttcgtgttttgtgtatggggagttggggataggcacctcccgaacacgagaaatttggcattatgccatctttggaatggggtttcgctgaaatgtcattccggaacgtggcttcgttaaaataccactttcagacgatgccaacttactggaatgccattttctccattttacacgaattgtaaatgttttggcacatacactaatctttttgcgccttacctaagccgatgatgcctttgagctctgccgccgattgtagccgagtgaggaggacgggttgccatcggaataaagatggcgcatccggccgatgtcacctttgagctactccgctgtcgcggcgccggtttccgctgagcgagaaggagtggtatgggtcatgggagatgggtggtgttatggaggaggaaggtgaggaactgggacaatagccgccatcctgaccatagagcgaaccgagggggagactcgagttcgtcgggcttcctgtttctctcgccgccgttctgctttcccaacgctagagcggctcaacctttcactcatctcaccgtgggtgcacccgctcctctcctccatcccagtcctcgctcgccatctattgctgcgaccctaccaagcttgtcaacctcgccgcactgggagggctccctctgtcgcgtcaagctcgtgcgatggcaccagcgctgcctgagcctctaggcgtggatctagagccactgctataggcctgccattttctccaaggcacggggaggaggataatggcagtggtggctcgccggtgacggttcacataggaacgaaagggaagagatggaatctagagggtattttggttagcttgacaagaaaaatagggtaaaattcatgtgatttgataaaaaatggaagaaatagtagtagcatgttagccttgtttgaagatgacattctagggaagccaagcaatgtcaattttctcccccggagacagcctagtgcacagctgagagcatcctatttatcaacacaccctagccgtccattttccgtccctctcatcaacggccgtgatcaaacaccaacgctagtctccctctataaatcttcctcccccttccccatccaaaccctaaccccctccaaaaccctaaacctctccccctcacctgcggcggcggcggcggcggcgaagcacctcgtcggcacgacaccatgaggccaccgcgaggtaagcaaccacccgaaaccctaggattcatctcgcgctcgattccacttccacccttacacgatgctgttctgcgtcaggcaggggattcgggaggggaggaggagggagaggcgatggcggcggccgcggcggcggcggtgggaggggattcgggagggtcggggacagcggcgggagaggaggccgtggtgggaggggaggcaggacgccgaggggccgtggcggcggccgcggtggcggcgggaggggtggcatgaagggcgggagcaaggtggtcgtggtgccgcacaagcacgacggcgtgttcatcgccaaggccaaggaggacgcgctctgcaccaagaacatggtccccggcgagtccgtctatggcgagaagcgcatctccgtccaggtcctttgctcttactccctccatttttttttgcgttctacttatttagtgttttgctagaactgtagtatgattgtattgtactgtagcaagctgtaagatgttgcaatgttgattctatgcagtgtacacagattatgttcaaatcgtgctagaactgttaggataatttagtgcgctgtagaaagctgtaagatgttgcgcaatattgcttctttgtagtgtgatacaaagattgtgtacatgacgcttgtttctgttcatattgatctgttttattgtacatgactgttgtttctgcttttctgctatgtacagaatgaggatggaaccaaggttgaatacagggtgtggaatcccttccgttcaaagttggctgctgctgtgcttggtggtgttgacaacatctggattgtaagtttcttggttgaatccacgtgtgcaactttatgcttaagtggtttaaaatcactgtggtttgttaatgctgtagtataaaaaaatgcatcaagtgttaatgtttgcatcatgattttaggctcctggtacccgtgtgctgtatctcggtggtgcctcaggaacaaccgtgtctcatgtgtctgatattgttggaccggtgagatctcatttactgttctcatttattattcagtcacctaggtatgcaattttgccattcgctaatcaagtcattttgcagaccggtttggtctatgctgttgagttctcgcacaggagtggtagggatcttgtcaacatggccaaaaagaggaccaatgtaattcccatcattgaagatgctaggcacccggcgaggtaccggatgttggttggcatggttgatgttatcttctctgatgttgcccagccagatcaggtatacctttctcacaatgatttcatgatcttgaaaacgaccttagataatttattatatggttactagttagtattcattaagtgtgtgacaatggttttggtgacattctttgattacttgcgggctgcaaatgatgagcttactcggattccccttcaggacatcaaattggatgatgcagattcgagtttctgatgcattaaagcccattaccacctgttttttctttgctgtttttgcctgctttttaaactgtctttgttgtcagttttcttatgtctagctgtttatattccagtttatgtttaagcaacctccaacccagaagttctattcctacacacggagtagtattcttgtatgcttctgaagtacttaaattgtaacacgaagatgcattctttcttttgaaacacttctgttatatattttttgaatctatcctttttgaaattggttttcaattgttatgagttaaccatggctatggatttcttttggaagcgtttggtggccttgatgtcttttactaatttatagaattatttacagcacgagtatacctgcagttttgcttctatatggctgtgttatgcatatgaggactttgcatttcagtgccagcactacttactatgtccctatatcccttattatttaatattttgattgggcttagcatatgatgatcttactcggattccccttcaggacatcaaattggatgatgcaaattcgagtttccgatgcgctgtgcctccattatttcattcccttctctttgcattttatgagtattctgtacatcatatttggattgtgctagcaatttgccatatgcttggttgtttatactctctttagtatggtacaaccttcagcgatatgtgtgctttgttggtggctaatagtcatgtttttgactttttgcatattaattttcttgatattgtcttgttcttttttctgtaatatgtcagctttcctggtatagctttctctcctattgttattttgttagtctagtgctaattagaactattccagtacttgccgtactacatttcttaattctgtggcagtgtcggacattgatatgtttttgccttgtaacattgcttacaataattcatgtatgtttgctgctagagtctcggataaattgtctgcatataaaattccctttatggaatcttcttccatggccatgtcctttgttgaagatcttgaagattctcactgatttttgaaacctttcctatggaatcctctgtcctgcaggctaggatcttagccctcaatgcatcctacttcctgaagaatggtggacattttgtcatttcaatcaaggtacttttgtcttttctctcccctgaatcctgaagataatcaccttgattgaggttgagattggggagatattagatgtaatactaggtattggactgaaattgtttgaacaggcgaattgtatcgactccaccatgccagctgaggctgtgtttgctagtgaagttgagaagctgaaggcagatcagttcaagccctttgagcaggtgacgctggagcctttcgagcgtgaccatgcctgcgtcgttggtggttacaggatgcccaagaagcaaaagggtacatcttaagaagaataaaacttgtggttgtgagtgactggtgctaaaatgtagtgctgcacaaaacttttggtctaattgtttttcacttgcaccctggtttgtaaggctgaaatttttggacaaatgatgctaggagagaagtaaaaagtcactcaggttttgcactgccctttactgcaagttgcatcattattggtgctactaggggtgatacgctaatcaatagggatgaaattggtcaccgaaattcctcacagttcctgtttccgacagttagaccgttatcgtttttggccacatatatacaattttgatttttttttatgcgaacagtgaatattttaattgataaatatggtgaccgaccgagtgtctttatgacgacccccttcctaccatcaaaggttttcattttcgtcataaatcttgcgatgacttgccttttcattttatcagaattcttgcctcatcttctacttatcagctaaaatttaaattttcaaccttaaatttagctaaaatttaaattttttaccttaaatttagagctaattttaggggttttttttattaaagattatttttatcctttgcttttatattgttaaaaacatgtatataaaagttttattcataaattattatttttttacaaatacgccgttagcgaagcgaagtttctaattttcttgctctcaagtattataataagctaatgttataggtaacatttccatgcattgagagtataatgtggacgttaaaattatcgtgacatgtccatgctcaacgcattgagagtatagatcaacgctaatattaccggtaacatgttcatgcattgaaacgggcccttctgatttggatggtttgggagtattgatggaacctaaagcacgggattgagagcaatgtggtgggaggagggagcggaaggagaatgacttcacttttacgaaaaatattcaaccaacctttcgagaaaaataaaaaaaaatatcaactacgaacttagttcagttaggccttattttgttcccacatcaaaattttttcacccaatcacatgaatgtttggtcaaatatgtagtattaaatatgaaaaaaactaaatacatagtttgtgtgtaaattgcgagacaataagtctaactgcgccatgatttgacaatgtgttgttacagtaaacatttacaaatgatggattagattaattaggtttaataaattcgtctcgcagttttctggcgaaatctgtaatttgttttgttattagattacgtttaatacttcaaatatatgtccgtatatccgatgtgacaaacaaacccaaaaatttaccccaactaaacaaaccctaagtgaaatggttgctccaaaaaggaaacgggattcgctttttacattaaaaaactgctctgatccctgaaaaaaaactgcactgaactaatactccctacatccccaaacgtacgaaacagaggctgtgtttagtttctgaaattggggagaagtttggggaaagttggtagtttggaaaaaaaattgagagtttacgtgtgtaggaaagttttgaatgtaatgtgatgtgatggaaagttgggagttaggggaagtttagtgtgaactaaacacacccagaaaatgaaatctgaaaaataatttagcactcgagcaattttgttatgcgttttatttactttattattagcaacgtggattccacgtgcaagcatactatttgtgaagaaagtagtggatttgttaacaacatacttcctctagtttttttatgacgttggctagtttaaatttatactggtgaacgttacacatatatgcatggaggtagtatctttctgcctctacatgtgtcaacaatctttaatcaaacaaagtggattttgcttgctaactaaagattaaactttgggtcactcattgcttatgaaccaggccttgctacctcaactttggtcggttgggcttgtatattttgcttgtgatttggtgtttcagcatcggaaagaatgtatgttcttcaatgttggtatgtgatcgagttaaaatgcttttatagctgtaaatattgttgatgtatagcacgtgcattgttgttgtaaatcttaagagtggccagtgtaccgaagaagatccggcggtcacggcggcgaggcaaggaatttctggttgcggcgatgcgccgcacctatcgacgacaagcaaccatgcggtgcgggggactgagaatttgggtctgagctgaatttgttttaaaaagtctcaatttaggctcctcaaacaggggttgagtttggatagtatccctcatcaacgaaactggaatagagctgattagttgactgattatgacctgccagaggaggcatgggccagctctttggggtggcggcagggttcagcggcaagttcaaaagtcgaccgacggagagacgcagatgaggtgtggtagaggccacttgctgtcaatgcttgtgcagtggtttctgagttggtgggcgacaaattacaacgaaggttgtagggtttcatgcgaaagcatcgcccagtggatcactgggccggcaaaggctatgccttcgggtgtcgttaccccttagggcgccgctaagggtacctctctttattcttggcgagttttctttgggtgaaaaccacatctttctaagaatgtgggagatggcgacgtccttgatggcgtgacctacgtggtggcattgttttcggaatctcgtttctgtggtgttgttggaggtctggcgatgatcagccacgcatagcggggggtcattttggaatgctacacattctaatattgcgaattgacatgagacctcgtaatcctgacaggaggcttgttcgattaggatacaacacatcgtattactttgtgaatctagatatatcaattctattagtttattttgatacggacaaagtatccatgacactctgaaactctgctagtgttaagctccagaaacagagaatgcaaatgtcatgaacaaacaactcaagatgtatatgtgttgcaacttgtcaagtgaacagctgaaatactgagttgccttacattatatgctacgaatataattaaaatgttcaccgcaaaagaatgtaattggaatatatccgtataaataacatcccatagtatgtgtaacaacgacccctcaaacaaatgactaaaataacgggtgtcacaaaagaagaaaaaaattcacaatttacgctgctgggctggcttcttcgcaggcaaaataaggcttcacagttccatcgtatcagcagctagcgccagcactgaagtagctaataaacagtggcataacttagataaaaaaggtcttcatctacacaaaaagaagatcccattctagcccccctcaggtatttacacaagggggggtagaccttgattgattgaagttcatcttcgtaacggtgccgatcagcagttcacaccgcattgccccaaggcgacggctttctgagtaggcgaaatgaaaggatcgatcttgacccacagaagggagaagatcgacgcgaggaggatcgaccagacgatgacgatggtcggagtgcggttctgcctgcccatgagacccttgaggaaggggtagagatggaggatcacccagatggagaagaagagctttccaaagagaggaccccatgattggtaaccgctgttaatggcatatgatatacccgccaccatgcccaccaggttgatgacaagcacggtggtcgggggaatgaggagactggtccacttgaacacgtatagctcagcaaagtcaccatcctcatcggacgcctttgaggtaacagtgaagttggtatcaattcctgctaacactttcagaagaccttggaacacagcgaagagatgggcagatgtgccaccaatgacccagaactgttcatttctccaccagtcctcgataccaacaccactccatcggagctccagaataccagttgcgaaaatggaggcgaaaagcagaataaagaacatcccagcataattgctaatctgcatatgnnnntaaggtgtgatcagagaagttccaaaagggcagaanctcccaggnnnnnnnnnnngttttnntnaataannanccntnatgattagcaaaaggtattgttgattgtggtcataacaagtgctacaaaaacatgggggggtttaaaaaaaatttttttaaaaaaaaaaaaaaaatattcaatcccggaaattaacagaataagaaagtgaatggatatcctttgactaacctcaggaatgataaatttgttggtgaggagacagatagcaggaagcacacaataggcgataagtggaatggatgtaattggataaacaatggtgttaatgtaagccagcctctccagaagtttcaaacgcccattgtaaccataccagataggacaatgtctgctaagcagaatctcaacagacccaagagcccaacgtagcacttggttaagacgatcagacagattgattggcgcagaacccttgaagcatggccgtggtggcatgcaatagattgatatccaacctcttgcgtgcattttaaatccagtcagaatatcctcagtaactgaaccatagatccagccaatctgaaatcacattggaaaacaaaaaagttaacttctaggcttctatttctatacagaacaaggagtccacacccatgacttggcaagaagtagaacaaagatctctaggaagaaagagaaaattacgggttgccccactaacctcttttccccattcagttttgtcctcatatccacaactgataacatggatggcttccttcagtagagatgctgggttcgttgagggtggtatgcctccttgagtcatgaaggtggacgcaataaaaattggcgattgaccaaaacgtttctctaatctcttctgggacatcagcactgacctttcatcttcataacctaatgaattacaaaagcaatattagaggagggagccagcttgagtatctcaaaagtctgtgtaaacataagactagatagaagcataatgttgataacactaaatgcagtggttgttcataacataaaagataaaagatgaacaaagactagcacaaaccttcaatgccctcttctatatcttccatgttaaagataggagctgaagactctgttctcttcatcatacggtttttgctatccatgtagctcttgctctttttctttctgccaccacagcagctcttaacaacaatgttaggttccaaatcagcctcagttagtacaggatcatagccatacaaggcctgcctattgaagcagcaacctgttcccacataaactggaccctgaatgccatctaaacctttcatgttaatctgcaaagcagaaaagcatgtcagacatgaaaattttgatatgatggacaaacaaaggcaccattgtactcacatcaaagaagactatgttgcgattagcgtatcgatcgtgcaagtcaatgccatcaaatctttgtgggaactgaacataacaagttttccttcctagtgcgggatccatcatgaagcacattgcttctctaagagctttgctactgttgaagtagtgatcacaatccacattgagaagataggcaccatttgtcagcacagcagatacacgaatctgcccaccagaaataggggtatataagtattgggttgataaacttcagtgataaatttacagaattgaacacataccaatgcattcattgcaccagccttcttgtgatgctggaatcctggcctcttttcacgagagacgtagacaagccgtggcaactcgttaccatcagtgtcaagcccaccactgtgccccaagaacacctgtaatcaacataacaggagtttagtatacacgaacctgattaaattagaatcttaaaccactcccccattagaagtaaagatcacctgaatcatgccagggtgatcccttgggttattcccaggccaagcagtgccatcagccatggtccacccctcttcaggtactttttgtgccttcgcaacaagagcattgatccgtaccttgaattcttcatactctctctgaaacagagtatccaaagttaaatactcaggcacaatgcagattggcggtaatctaaccatgacagtagaagcttaccttcattgcccgcctttctttaacaaaggaaggttggattttgtccttcaggtaatctattttttgagcaaagtaaaactctggagctcgtggttcaatattgtgcttcttgcaaaacggaacccacttcctagcaaattctgcagtttctgacagagcctcaaaagttaacatagctgaaccatcgtcagaaacatagcatgacactttgtcaacagggtaatccacagccagaatggacaaaacagtgtttgctgtgatcagaggaggttcctttagtggatccaccgtactgacaaagacatcaatgggagcaagctgtgatggctctccctccctatcatatctgcaacattagattggacgcctcaggacacagaatatcaatgtaagagagtttcagtgccacgaccctgaaaaaatgtatatcaagtatctcatcttacctcaatgcaagcctgtcaaggtatgtttcacggtttatcgggtaccactttgggaattgatctaggagccaggataaggcaaaccaaatttcacagataacagatactagccacaatccataagcatcccgcactggatgagtgacacgatattggaagaagaacatcaggatgataagacggagaatgataacaatccggtaaaggttgagctggtttgaagggataggcactatgcggctcagaggtagacgtgcatcatcaaccctgtgaaagacaattacagaaagatcaatatacttgaagcaatatatacaatatacatcaaactgcagtagtggtaaagcatagtcaatgaaaatctatatcctgatcaaactcagaggtataaaactatctaataagt

SEQ ID NO: 27227 - DNA, 5963 bp, Oryza sativa
tttttgggtgtctgatgtgaatttctataatgcaaagatacgtatctaaatccactgcaaagcagcgtgtataatataaggataggttgtccatacatttgcatatcttcaccatttgaaccagtcccttccatgtctccccctcttgcctctggatatttattagctacctgcatcatatttttgtcctgcttgttcctccagctggcaactctttcttgccagtcaacactgttaatcccataggaattcaagtccttggaggggtccacaatcctcacaggaactggaatcataatagagaaatgttagcactttccaaaccaatgtttttcccaaggagcaatttatgatgagtaagaaaagtacctggaacacttggatcaacatagcttgatgttccgctgcggatagaatggcgatcgggggaagcatcagggatctctcctgagatctgaatgaaaatatcagtttgtcagtacccaagagcacagcattcttacagaaacaagttcactgatacaagtgagaacttatatcatgttaaactgtacctgttgcccacttgtcagacggggaatccgatgttgttcgtggcgagaagatgaagacaggtcaacatcttccccctgtctctgtatctgccactctggacctttgccattgccatgcttataattgaattcattgtccaggtcatcaacatcttcctcctcctcatcgccctgaactctagggctacctgcattttgtccaaggcggcaaaacaatcacagtatacatcaatcatttgtctttatggaataaaagacagagttggtagtctaattttatatgtggatacatagatatgaagcaagaatcaaacatgaacttagtaatgatatattatatgacatataaataatagaacagttgtacagaaaccaacctttgtgcctcttgtatctagtcttgcactgggggcagcactggttcccttccttgcgctcgtactcgtagcaagggcggcagaccgggaaggcgcactcattgcaggcaacaaagacgtcgccggtggccgagacgccaacagtgtcgccacaaatctggcagacctgaccattcacactcttccctggcttagcctgcatcaagcaagaaaacgacagttagtacatgcccaaacggaactacagaactattagtaattaatcactaactaaagaaccatctgcttcgcttcaagtcgaaaccaaggtcctaaagctagaaatggaggagctctacaaaagctgggcatgaattccacagttctaatgattcagcctctgcgtcatcagtactaaccaagctgagatctaacacatcaatggcacctcaaatgctacccgcgaagcctagactggggaattccgggagctgcattgctctagctaaatccctacaattccacaaccaccggacatttcctcacatgaggattactcactaacaattccacacaggaggacactacaatcgcccgcgccaaatgcacatagggaaaactgcgggggaaaatccccgagcccagcacaaaaaaacaaacgcaattttgcggggattcgattcgagagatgcgcacccaacaccacactcactccctctcccctcaccccagatccaccaccgacacgctctcatgtcgctcgctcatcgcacgcacgcacgtaccggcggtggcgcgtcgccgtcggggcggatcatgacgaactcgttccggttgcgggatcccgccaccatccccgcgttcgccgccatcctcctccccttcctcctcctcctccactcacagcgagaaacggctacgcagctagcagatccgcgcgcgcgcggcaagcctagatcgcggcggccgccggcgacaccaccattcgccgctccgcctccagatctgcagcgccgcctcctccactcccctcctcctcttcagctcgcgctccactacttcctctcgcctcctcgtcttctcttcttacatacgcgagacacgctcgggttggtttcgcttcagttggtgggagtctcgccaccggctaccgccggtcacccggctcgcctcctggccgtcggatgagatgagggggagatatctcggccgtcggatgaggggtggagctgggcacaggctgtcacccgctgacggggtgggcccgggtgaccggcggtagcgggtggatctgtcggcgcctcggcggtggacgggaatgccctcctacctgccgctactcttttttttttgtggtgttttttggaggtaggaaagggggaaagaaatgtggcatgtgcagcaagcgtgtaacatgtgagttggcatcaaatcgatggtgctgtgattggtggatcgaaattatatggtgagaattatttgcattgccaagcattctgtgatatttgcagggaagttaattcaattcttaattataaaaacattgagaacttatgtttctcgaatagcagatgtaatttgtgtattggtctagttttctgcaatgtttttccgttctaaacatgttttgttttaatttgccacagtatatataacacttattttgctgacgtggacaagagaaaatagttgtttcttcatggagaagatatacctcgagcacatgacaggaaaatatgagaaaaattaaagaggaataatattaagtgcaacattgttagttgttttgcataccagcttttaagtagttttctcctatatcatcaataatattacaagtttgaatattctcaatgctttggattgtcattcttaaccaaggttgatgctaacttaagcttgtgcataatatagacttggtgcattatttgaaaatggaaagaggacctggttaggggctcgaggattgaaaaaagaagtgcattattcacatgattaaaactattcctcttctgatttaggggtaagcaatatcttatattaatttgtttgcactccctgaatcgattaataaatcttttatagaacctgctgtgcttagagtacctaacactcctcccaggaaactaattttcttcttgccgtttcatcgaccgacaaatgcaacgttttggcacacatcattacggttttccaccttaccttgggatttataacaaacaacaagattgtagttctttttacttatttacaccataagcgtatagtacatgctatgcaatttttatttaaatttacagcaactaatatataaaatcactaaaataaaagtccctggctctctttactccacatcccatatagatagctactgaactcccctttgttttcatcattgcacctcaaagattcacaaactgaacataattaatttgtgatgccagatgtagattaattaagcatgcattaagaggaaaaaaaatcagaccagattatagggagcctgtcactccaaagttaacaagaacaaatgagatgtgctgacttgtgctttgcaataagcacactgtcaggtaaaccgttcttgtcccaataatggcggttgggctgccactgtcctgcccgtcggtggcctcttttctttattgttacttgcaataatcactaatatatattttttctccttctctctctctgtaatctctcctagtttctttttgttcctctaaccaaattggaatcttcacatcgcatgcatggaaaatgatttgccatcggcttgatggtgctgctgtatttctgttacactgttcgacacgaaaacttcagtttggtttggtactgttgttgttcatcataaaccctcacttattttacttcttttttaaaaaaataataaaaatgggttacatctccggcctctgtccataggcatacagctaaaaaatacatctcacttattttacttctaggatgcagtaacaaatacatagtagaaagtgtttttttttaaaaaaaaaaactagttgcaagccatgtagcagtgaagtcaaagaaactgactaaacatgacaaaaaaatttctcttaacttgctaaaatctatctggtgatttgtgaggaacagcatggaggttcaggctctactttgtctgcctcttttgcccttgattacaacagtggtactacgtactgtagtggctgggattatgctgcaacaactaattgaagtattaaaacgagtgttgctcttgcctgcagcctggttgatggtctagtctaattaacccgtggattagtattagtcctgtcgattattagctgtcttgaggccaggggcagcaaccaccgctggtgacgctaacgtgtctctgcaccgctggtcacatgcgaagttggggcaaaaaaaaaaaaaatcaagggcagaaacgcaacgtgggggaatattcagagttgtctcgtgtacgtactctactactctctgaagaacagaactggacagtgtacagaacggtcagcatccagttaagttaactgtttgtacgcagaactgaagaggaatttcttcgagcatgttgctgtaactaattcttgcgtgtgtatccccagagatctgtgtatttttgtttagaagaagaataagagagggagaaaaaaaaagagtggtcatcggtttgattttgagtagggtatataaactggcaagcagtttctctgtgtgatgatttttcatttaatttaagtttatgtgattcagtttccttctctagttctcttgagtcgtcacaagaaaataatttggaaagagaacggaagcaaagcagagaagacgaaggcctcatttgtccttgcttagatggaccgttgcttagatggaccgtgattttagcttatgaccctgaattaggaataagtccaccttgacccccttcattggtggtcgaatctaattcctatctctgaaccacagtatcggatctttaggtcccccactattaaaactagtgtaatttaattcgcttggtagttttgcaggccggttgcgctgacgtggcgtctatttggcgggtgttgacatgatcttcgtcccagcccccaggtggcgtcgacgtgccgctttagctcccaccccctacagacgggtgatggggagagagagaagggaaagagacaaaggaaaaaggaaggagagaatgggtcccacagaattttaaaattctaataccacacaaagtgatgtgttaacgccatgtaggacgaagattatatcaacaccgtcacgttgttgccacatcagcaaaacagtcctccaaaaccgcaaggaagttaaattgcacctgttttaatagttgatgagttaacatatccggtattatggttggatacgaatcagattcggccactggttaagggagtcaaagtgaacttatattccgaaatgaaatgaaggaaatcttgaccagcccaacttggacccagggacaggcccaaggcccggcccacaaatcctcgtatcattatctcttggaataagttcaccggtggtccctcaacttaacagcgagatttgttgaggtcccttaaccataaaaccagaaatgtgtactcctaaacttacacaaaccgtgcacacaagatcctatggcagtatacatggccccacaaaagtgcgtggggcccacctgtcggctgcacatctatttccttttccttttcttctcttttctctcttctctcctcccttcttcgggccggcggcgggcggaatcagcgagcgccgatgcgagcggcgggcgagcgcggcaccacaacggctgtgagccgcgggcggagcgggcggagcggacggcgggccagcgttggctgttggacgggtggaacgccacggcccaacacgctagcagagacgcccccgccatggccgccgtgaccaggcatgcgtcgacggcgccggtgccggccaccttgctgccacgagcgcctgccgccaccggtggcttctcgtcgtcgtccatgccgtgtacgtggaattaaaggtgacaggaaaaaagaga

SEQ ID NO: 27228 - DNA, 624 bp, Oryza sativa
aatcacgtgacggcccaggacgtgctgacaactccagacgtcatcgttggtacgttcctcgttcattccatccctgctacaattttgttcgactctggagcttcccactcgtttatatctgtgccattcgtggggagaaatcagttgggggtagaaaggcttagaaaccctctgcttatcaccacccctggaggggttatgacagcaaagtactatagccctgccgtccctatagaaattcaggggattccttttccctcggatctgattcttctagacacaaagaacttggatgtgatccttgggatgaattggttggcccaattccaaggggtagtggattgcgcgagacgcactgtcactctgtaccgaggaccagaacaaccggttgttttctttgcacctccaacctcttgtcagaaggttcagaacttcatcagatagaactgtcagaaacccccatagtcagagagttcgcgagacgtgtttccggaagaactacctggtatgccgcccaagcgagagattgagttccggatagatcttgctccaggaaccactcctctgtacaagcgaccctaccgtatggcagcaaatgaactggccgaagttaagaaacagttg

SEQ ID NO: 27229 - DNA, 617 bp, Oryza sativa
aactagccctgagcaactaaatgtctttaaatgctgtttactgcaaccctaacccctctatgttataattcctttgtactcccttgcatttattctgcatttgtgggtgtgtcttgttgagtacggtggttgtactcagtcttgctaaattttcccaagcccagatgaggagttcctggaagatgaaggctttggtgtctagctcgtgcctgccgtcaagcgcctgtggtcgtcgccctagtcttccgctgtttttcgttgtctttgagtgtgctgggccttcgttgcccatgtaataattctatttacgcttccgcttgttaaactctgaattgtatcaacttttggtgtaccttgcctcctgggacaaggattaatgcacgcacgtcaggaacacccgttgggttatttccggtcgtgacacctgcgtaccattactgggttagcgagccactcggggtggaggacttccctgatgaagccagctttgagaagtttgtcgaattcttctcgtatggcttgttttcgctcgggtgcgaatctctgtagtttttgtttaactggcttgccatcgggtcgcaccatcaatttgtgctcaatcacctctctaggatttc

SEQ ID NO: 27230 - DNA, 8912 bp, Oryza sativa
agcttcctgttgaaatatttacttgctttatatcttaaaaagagtgtatcggagtataagccgtacacgctagatctatctgatcggctatgctgtaaacgtctataatctcattgttaatatatattccgatctaagtgatttatattgtctcggcatggcgaccgatctatcccaatcacttgatttaagtatatatcgacataaagattatatactgttaatatctatagccaatcgagtagatttagttttaatttacttattaacaactgccgatcgattaacatatgacatcggctcaaatataaatgatatgtcatcggcgactggccgatcggctatcatttatggatttaaccgcggtttctttgtctattatttcttgttgattgcaggatcaaatcaactggcacgctgacaaacctaaaaggcaagattttggatctgcactggagttaagcagatctcccaggcctcgtatttttattatcaacacgcttttggcacgcccggtgggaccgagtttcgacaacatcttctgctgagaaagcaccacagtcactggcaacaaaaccggtgatccctcctcagagcaagattccaaagcccacaggaactagtgagtctgaggttaatgaaggaaacattattccgatcactgtagacaagctttcaccagaacaaaagaaggagtttgaattgatgatgaaacatacgcaacaacaattcatgaactcattaacagaaaccaaacaaggaaaagtcattcaaaagtataagctgaaactagtagctgatatgcctggaatgggttcgtcaaaagatggtgacactcaagcagctaaaggtagtacaaacgattcgggtgataaaggcacataccctaaggatggtgaagttggagttgtaggagatggcagtgaagaacaattgcagtttaacaacttccaggaccagattgactatgctgtgcaacatgctttgatcaaccaatctggagtacttgttaatactttaacaaatatggtgaagactgttgtcaatggtacaatagccgagcaccaagccacggggccagtttatctaccaggtggtgttttcccaaactacaggcctttggtcacaggtaactagcaggatgcttccaatataccgccagttcagccgacggcaccggtttcaacccctgcacaagctgcaccatcgtcggcacctaggcagatggttaatcctcgattgttgaccagggaacagccacagcatgttgggcaaaatatcaatcgactgactcaggagcatgttgctgcgatgtttttaccaactccgacaacagccgacccagtacagtcattgccgattcaacaaacaccacagaggcaacagacggttcagccgattcaatagcagaatgcaacatacatcagcaaggttgagaacacctgataatcggcaagtacagcacgtggtcaaccaggttgttcctgagcacttggttcataatgtgcagccagatcaatcggttgtagcccaagttattcctgagcatttggtacgtaatatacagccaaatttccagaactatcagggaggtaacttgaattatcagtatcagcctccatcgccccatgtccagcatcagcaaggtggatcacctcaactgcagacgttgccgcaatttaaccagtttgctcctcaacttaatcagttcgagccgattcagcagcatgtgcaaggagtacctcagcagaggccttgggctgatatgattgcagatgtgatgagggagcagtttggactcaagccaaaggacactggaaacttatatcgtcatccttaccctgagtggtttgaaagggttccattgcctagccgatacaaggtcccagatttctctaagttttcagggcaggataatgtttcaacttatgaacatatcagccgatttttggctcaatgtggtgaagcatcggctattgacaccttgagagttaggttgtttcctttatctttgtccggatcggcgttcacatggtttttcttctctaccatataactctgtcaatagttgggccgatttggagaaacagtttcacaactatttttacagtggaatacatgagatgaagttattagatctaacggcaataaggcaaagacatgatgagtctgtgcaagattatatccagagattcagggagatgaggaataggtgttatagtttgtctttgactaattctcagctagccgatctggcttttcagggtttgatagcaccgattaaggagaaattttcatcccaggatttcgagagtctatcacatcttgcacagaaggtaacttttcatgagcaacgatttgctgaagctaagaagaatttcaagaagatcaatcatgtatatccctatatatatgattctgaagaggatgatgattccgaagtatcagcagccgaatgggtcaggagcaagaaagtcataccatgccaatgggtgaggagttctggaaaagaggaaaggtttgactttgatattaccaaggctgacaagatttttgatttgttgcttcgggagaaatagattcaacttcctgctggtcatataattccatcggctgaggaactaggaaagagaaaatattgcaagtggcataattctggttctcattctactaatgattgcaaggttttcaggcagcaaatccaggcggccattgaagggggaaaggtcaaatttgatgactcaaagaagccgatgaaggttgatggtaatcctttccctattaacatggtacatacttctgggaggacagccgatggggggaagaatcaatgttttcagatgaattcagctagaattatcaacaagtatcaaagaaagtatgacaagcagcaggagaggtattgtgaagaagatgatggtggatttgatcctcattgggactgtgagtttttcagattctgttggaacaaaggcatgaggctaccatcaattgaagattgccctgggtgcagtgataatacaggaagttcaagccgatccaacaatagaggtaatcggctaggtcataaaagggtgtctgttcatcagaggttgggcccggttaatcaagattgctaccaggatgacgatgaggataggaagactcagtggtgtccttctggtattttcacaaagaatcaaaagagaagggttcaaaggttgaggaatagagaacgcttccaggaggtgcaacaagagattaatcatcagctgaggaaaacaaagaccaagcaggagtggcgtgttaagagcgcggttacaacagccgatgaagttgaagctaacaaggcgagaagattgcttaagggtaaggctactgcatctgcatcggtgaatatgatttttatgctacctgcagaatttgaagctaggcaagccgatgttgatgacgttgaagaagtttctgctagattggttttgtcaccagaacaagcgatttttgagaagccagaagggacagaaaatcggcatctcaagccattgtatatcaatggatttgttaatgggaagccgatgtccaagatgatggttgatggaggagctgctgtgaatttgatgccatatgctacattcagaaagttgggcagaaatccagataatcttaccaagactaacatggttctcaaggattttggtggcaattcgtcagagactaaaggagttttgaatgtggagctgacagtcgagtaaaactgttcctacaacatttttttgtcatcgatgggaagggttcctatagcctgttgcttggaagggattggattcacacaaattgttgtattccttcgaccatgcaccagtgcttgattcaatggcaaggtgacaaggttgagatcgtgccagccgacatgtcagttaacgttgctagtgccaatttagctctttgggagatggatggtattgattgcctgtctggaaaagtttgggatggagattttctaaaagtgtccgattgtgatatacagctaattgaagatggagagcccaaattattatgttgagggcgtcttggagggttcaaacgtctacaccaaggacacagtagatgatctcgatgacaagcaaggagagggtttcatgtcagctgatgatttggaggaaattgacattggtccaggagatagaccaaggccgacattcattagtaagaatttatctccagaattcagaaccaagttgatagagcttttaaaggagtacagagattgcttcgcttgggaatattttgagatgccaggactcagccgatcgattgtcgaacatcggcttcctatcaaaccaggggttagaccatatcagcagccaccaaagagatgtaaagccgatatgctcgatgctgtcaaggctgaggttgcacgattatatgatgctggcttcatacgtccatgctggtatgccgaatgggtttctaatatagttccagttatcaagaaaattggcaaagtcagggtgtgcattgattttcgggatttaaacaaggctaccctaaaggatgagtacccaatgccgattgctgatcagttggttgatgctgcttcagggcataagatattaagttttatggatggcaatgcaggttacaatcaaatctttatggcagaagaagatattcataagacagctttcaggtgtcttggtgcaatcggcttgtttgagtgggttgtgatgactttcagcttgaagagtgctggggctacatatcagcgggccatgaattacatattccatgatctgatcggctggttggttgaggtttatattgatgatgtggttgtcaagtcaaaggaaatagaaaatcacataaccgatttgaggaaggtttttgagagaactaggaagtatggcttgaagatgaacccaacaaaatgtgcttttggtgtatcagctggacagttcttgggatttcttgttcatgggagggggattgaggtaactcaaaggagtgttaatgcaattcagaagatttaacctccggaggacaagaagaagttgcaggagttgatcggcaagataaatttcattagaaggtttatctctaatttatctggaagattagagccttttacacctttgttgagattgaaagccgatcaaaagttcacttggggggcagagcaacagaaggctttggataatatcaagaaatatcttagttccccgccagttttgatatctccacaaaagggggcaccgttcaagttatatttgtcggctggtgagaagtcaatcggctcggttttgattcaagagctcaaagggaaggagagggctatattttatttaagccgaaggcttttggacgcagaaacgaggtattctcccgtggagaagttatgtttgtatttatatttctcctgtacaaaattaaggcattatctattatccaatgaatgcactgtggtatgtaaagccgatgtggttaagtacatgctgttggctccaattttgaaaggaagggttggaaagtggatatttgctttaacggaatttgattttcggtatgagtcaccgaaggcgattaaggggacaagctatagccgattttattgtagatcatcgtgatgactcaatcggctcagttgacattgtgccttagactttattttttgatggatcagtgtgcactcatggttgtggtatcggcttggttatcatttcccctcagggggcaagtttcaagtttgcctatactattaagccatatgcaactaacaatcaggctgagtatgaagcagttctcaaggggttgcaattgcttaaggaagctgaagccgatgctatcaaaattatgggtgattctttgttggtgatcagtcaattagcaggagaatatgaatgtaagaatgatacattgatggtctacaatgagaagtgccgagagtagatggatggatttcggctggtaactttaaagcatatgtctcgggagcagaatgttgaagctaatgatttggctcagggggcatcagggttcaagccaatggtgaaggatgtcaaagtagaagtcgccacaatatcagccgatgattggaggtatgatgtgtatcaatatttgcagaatccatctcaagtggtttctcggaaattgcgctataaagctttgaaatataccttgttggatgatgagttatatcatcgaacggttgatggggtgctgcttaagtgtttgagtaccgatcaagccaaggttgcgataggcgaggtaaatgaagggatttgtggtactcatcaatcagctcacaagatgaagtggttgcttcggcgtgcagggtatttttgatcgacaatgttggaagattgttttagatactacaagggatgtcaagattgtcagaaatttggagcaattcaaagagcaccaacgtcggctatgaatcctattatcaagccatggccattcagaggatggggtatggatatgatcggccaaattaatccaccctccagcaaggggcataagtttatattggttgtaactgattagttcaccaagtgggtagaagctattcccttgaagaaggttgattcaggagatgctgtacaatttgtcaaagagcacataatctaccgatttggtattcaccaaactattacaactgactagggatcaatctttgtatccgaatagtttgttcagtttgctgatagcatgggtatcaagttgttgaattcttctccatattatgcacaagctaatgggcaagccgaggcgtctaacaagagtttgatcaagttggttaaaagaaagatttctgattatcctcggtaatggcatacacgactggctgaagcattatggtcttatcggatgacttgtcatggatcaattcaagttcctccttataagctcgtttatggacatgaggcagttttaccttgggaaattagaatcagctcgagaaggacggagttacagaatgaattgacagctgatgaatattataacctcatggctgatgaaaaggaggacttggttcaatcaagattgagagctcttgcaaaggttaccagggataaggaaagggttgctcggcattataacaagaaagtggtgcctaaatctttttctgaaggggagcttgtttggaagttaactttgctgataggaactcgagataaaaaattcgacaagtggtcgccgaattgggaatgaccgtttcaaattcataaggttgtgtccaagggagcttacatgttgcaaggacttgatggtgaagtttatggatgagcacttaatggtaaatacttgaagaaatattacacaagtgtttggattaattcatgatcggctgagtttgccgatgcatgtaatgccgatgtagttgacatcgcctttagatggccgatacaaattgtatcgcccttagcagttttaaaacatgatcggttgtgtttttccacctatggtttttgtcttaaactcaaactggtttttggagttcagggtcattggattggccgaagaagtgatatctaaaccagtgatcatggtgatgtctagcagagtgtgggtcatcggcccttgattgaacatgaaggcattaagagtgttggaccagaaataagctgcagaagccatcagaggttcatctttagccgaattttctattgtgagagcaagcgcttggccgattcctagttcatcccaatgaacctgcttgctagccgatacacgcttgtaccatacgggtcataacgacaaccagtctcccgctcccggtcgagatcgaggacgagatcatcattcgacaagcaaggctcctcaaccaagcgacccctcgtcctcgtcatcatccttgtcagactagcctccccgacgatgtcagcatcgcgggctaccttttgctctagagggtggatgcagggcattcatgcccgaactccaggatgtacggtggcccgagaaattccgactgggagcaatagagaaatacgatggaagtacacacccagaagaatttctgcaagtctactctacggttttctatgccgctggtgcagatgatgttagcgaccaaatttggtaatttcagtatcggagatgaaaataaaaccgaagcggaatcaaagaggtagatcgttccagaaaaagagcaagattcggctgaagtccaaatcggctacgaccaaagtcggcagagttcgagtcggacaaggtagtcgattcagctgaatcagacaatgtgactcagtatacgtcatcgggctgagttaatgtgcttcatatggattgccacacacggattcggtcctgaaacgacaattgtatctattaattaggatattctatgtaatttccttagagataagtttgggcaaaagtttgccgcaaagacttatggtatcttagagtttgttagagataagagtcgtgtccaacatagacatattttgtaatctcgggtataaatagaccccgagccccatgtaatcaattaacacacgttcaatacaatctcggcgcatcaccaccttttactttcgttttgttttcaatgagttcttgcttttgggttgagctgcatcgggttcgatcttcaactataggtaaaacttgttatggcggcttgcgttctcgagattagtgcttccatctttatgacactctaatctcgtttatgtaagttgttgagttatcatatatcttatataatctctggcaatatcattatttaaccttctatcggctagcatatactcctagaagacagccgaataggttaaataccgatattgactttgattatataggatatttatcactctatgaagcttccaatggcttgattttctagatattgtctttcttttcatacttatggctgcatcagttaagtttgacctcataagtcgtgcttagaactataatct

SEQ ID NO: 27231 - DNA, 7511 bp, Oryza sativa
tctgttataccgtaccaggtccgatatcctcaaaccttccttggggatcaagatgatccatggtttaaaagggaccccctgagagaggttcaggggatcgaattccatcgccaacacacccaccaaagttacgaagccggagtacgtggagccaactcgccgggagatctcgtcgaatccctcgactacgatctcgtctgtaccatctgttttgactactctctttgtaatttgttctcgtcagcatcaatctcatataaactggactagggttattacctgataaggggcctgaaccagtataatccttgtcttttatctgcttgatgtcgtactacatagaccctcattccaatgtaccccaatactctacttatccggtccgcgagtatcactcgtcgacagtggcgcgctaggtagggagacttggtgctcaaggatataccggtatgacttcaagactttccgacaacagtaccaacaccggcgtcgatcaaggagcctctacctcgacatcgctggtattgactcaagtcggatctatcgtctttccggtctataccgttacaccgatctcgactggaccaatcactatcgggaacgagaaaggcacggttaagactccgagaaacgatgccccgccgacaattcctcccacccaagtggagaacggaacatcgacggtcccaacacctgggaggaatcctcaagcggccgaattttgtcctttgtacaaaaaatcagagccgacaatgactaccaccctaaagctgagaccttggtttcctgtgcataagacatccaaacatattctcgaggactgcccggtgatactccacgtgaaagctgaactctacgcctgctgggagcgtgagattcagcgcacttcaccgacaagaatcacctactgcccaattcacaaatctaggtctcacgacatcacaagctgcaggattttcctcagaactctgaaaccaccgcatcatcgcgtccaacaatcgcgagttcaaactccgtgtgttgccaaggagcgagatgcagtgatgacatcaaatcggttcgtaggatatgttggtactaatccaaatgagccatctgtgctacacctcctagaagactacgaatcctcctcggagttgccatgagatgtaaacgtggtcgacaacactgaaacaagtgcgtccgcagcagtgagaatgcccgctcaacagttgcgaaacctggatgcgatattgagtgaaagtccttttgatccggtcacaaaccccgacgtcaaccaatgggcgacgcgactgtgggagaccgtgactaacctcaacgccgcatttgccgaagcagcggtcaacccggaacaacatgaggatgaagggccaactgcaggagatgcggacggagaaaatcccaacggaacgcgtccctccggtgaccagtcacctcgagagagacgagaccctactccaccgcgtcccgagaactgtgatcttcgcgatcacttagacaaccggtggagggacagaagagatcgtgacaacaatgatcgccatcgacatcgctctccttcacaccgcggggataacgctgctgcccgacgacatcgtcaccgcactcctccacgacagagaagggacgatggtcggggaggtgcacctaatgaagatcgggaccgacgggcccacagcggtcgccgcggcgacgccaataacgacttccagcgagaccaagcagctaatcgtcgagatcaggagcggaacggcggcaaccgacgagatcggaattcccagtctcattctcccggtcgaggtcgaggacgagatcatcgttcgagaagctaggctcctcaaccaagcgaccccttgtcctcgtcatcatcctcgtcagaccagcttccccgatgacatcagcatcgcgggctaccttttgctccagggggtggatgcagggcattcacgcccgaactctgagatgtacggtggcccgagaaattccgactgggagcaatagagaaatacgatggaagtacacacctagaagaatttctgcaagtctactctacgattctctatgccactggtgcagatgatgttaacgaccaaatttggtaatttcagtatcggagatgaaaataaaaccgaagcggaatccaagaggtagatcgttccggaaacagagcaagattcggctgaagtccaaatctgctacgaccaaagtcggcagagttcgagtcggacaaggtagtcgattcagctgaatccgacaatgtgactcagtatacgtcatcgggctgagttaatgtgcttcatatggattgccacacacggattcggtcctgaaacgacaattgtatctattaattaggatattctatgtaatttcctaagagataagtttgggcaaaagtctgccgcaaagacttatggtatcttagagtttgttagagataagagtcgtgtccaacatagacatattttgtaatctcaggtataaatagaccccgagccccatgtaatcaattaacgcacgttcaatacaatctaggcgcatcgccaccttttacttttgttttgttttcaacgagttcttgctttcgggttgagctgcattgggtttcgatcttcaactagaggtaaaacttgttatggcggcttgcgttctcgagattagtgcttccatctttatgacactctaatctggtttatgtaagttgtcgagttatcatatatcttatataatctttggcaatatcgttatttaaccttctatcggctagcatctagtcctagaagacagccgaataggttaaataccgatattgacttagattatataggatatttaccactatatgaagcttccaatggcttgattgtctagatattgtctttcttttcatacttatggctgcatcagttaagtttgacctcataagtcgtgcttagaactataatctctagcctgcgtcttggttgttgattagggtagtatcagggtttcagccgatcttacctgatttagctttatgttttatatgcttaattgtcatgctagatccgccctttacgttaagattctattgcatttaggtgtattaagcttcctgtttgatatattttacttgctttaatatcttaatatagagtggtatcggagtattagccggtacacgctagatctatctgatcagctatgctgtaaacgtctataatctcattgttaatatatattgcgatctaagtgatttatactgtctcgacatggtgaccgatctatcccaatcacttgatttaagtatatatcgacataaagattatatactgttaatatctacagccgatcgagcagatttagttttaatttacttattaacaactgccgatcgattaacatatgacattggctcaaatataaatgatatgtcatcggcgactggccgatcggctatcgtttatggatttaacggcggtttctttgtctattatttcttgttgattgtaggatcaaatcaactggcacgctcatgaacctaaaaggcaagattttggacctgcactggagttaagcagatctcccaggcctcgtgtttttagcatcaacagatgataacgcgctagcaaactacataccagctgcgttgaagggatctgctcgatcatggctagtccatctcctgccacgctcgatctcatcatgggaagtcttgtggcaacagttcgttgccaacttccagggaacctacaaatgccacacaatcgaggacgaccttcacgctctaactcagaacccaggcgaatcattgagggactatattcagcgcttcaacgtgcgcaggaatacaatccccgagatcaccgatgcttctattatccgtgcgttcaagtcaggtctccgagatcgatacaccacccaagagctggcaacacgacgagtcacctctgcttgaaaactgttcgagatcatcgacagatgcgcccatgcagatgatgcattaacaagcaaagacggaaaaagcaagacgggtgaggagaagagatcaagcaacaaggacgcaccagagtcaagcaaaaagagaagtcataaaagtgggaagcgcaaaccctcgggagaagtcctcgccgctgagcaaatggacccacctaggcgccccaatccccagaacgatgactcacacaagcaatggtgcccaatacacaagaccaacaaccacgccatggagaactgtctcatcttcaagaaggagctcgcgagacaactggcgattgagagagggaagcgagttcgtgttgttgagacagctgaggaagccgctaccctcaattccgactttgccttcccagaatatgacctccatgtctcccacatcttcggcggctctacatcgtacagcttgaaaagggagtacaaaaaggtggaacgtgaagtctgctccacttcgcaagcgactacctccaagatgaagtggtcccagcacaagattgagggcctgtttggttcgctgccgttggtatccagccaggttgtggcgctgccacagttctgtggcgaaggaaaagctcgccgcacttgtggcgaaaactatcacagaaatgaactgtaacgttgtgtggctggctcaacttacgtgggaaccaaacaatagcctgttttgcgtggctgccgcattcaaggtgtggcgaattctggcggggaaccaaacagcccctgagttctcggaggcagatcaccccaagatcgcgactacgcctggcagatatccgatcgtggctgaacccaccattcggaacatcaaggtggctagagtcctcatcgatggcgggagctcaatcaacctactttttgccagcactttagaggcgatagagatacgtcgaagcgagctgacacctacagatcagcccttccatggaattaccccagaatcgtcatctaaacctgtaggcaacatcacgctacccgtcacttttgggcaggccaataacttccgaacatagcaaatcacctttgatgtcgcggagtttgacaccgcatacaatgccatcattgggagaactggactcgctaagtttatggcagcatctcactacgcttatcaggtactcaaaatgccaggaccaaaagggacaatcaccatccagggcaacgctaagttggcagtacagtgtgacaagcggagcctcgacatcgagcatactctcaacccacccgccacaactgagcagcccaagaaagtgagcaagcccagcaaaaaggcaaagccagacggtgctatcaagataatcccgttgtctagctccaaccccgacaagacggtcaggataggggctacgctgatgacaaataggaactcgcgctcatcaccttcctctgcgacaatgcagacgtattcgcttggcaaccgtcagacatgccgagaaatcctagagaggtgattgagcacaaattgatggtgcgacccgatggcaagccagttaaacaaaaactacagagattcgcacccgagcgaaaacaagccatacgagaagaattcgacaaacttctcaaagctggcttcatcagggaagtcctccaccccgagtggctcgctaacccagtaatggtacgcaggtgtcacgaccggaaataacccaacgggtgttcctgacgtgcgtgcattaatccttgtcccaggaggcaaggtacaccaaaagttgatacaattcagagtttaacaagcggaagcgtaaatagaattattacatgggcaacgaaggcccagcacactcaaagacaacgaaaaacagcggaagactagggcgacgaccacaggcgcttgacggcaggcacgagctagacaccaaagccttcatcttccaggaactcctcatctgggcttgggaaaatttagcaagactgagtacaaccaccgtactcaacaagacacacccacaaatgcagaataaatgcaagggagtacaaaggaattataacatagaggggttagggttgcagtaaacagcatttaaagacatttagttgctcagggctagttgtaaacacgatcctagaactaaacaatgttattaatcaaggccgtgaacccgcacgaacctgccttaacccaaggcctatgatgattcagaccgaactggcaacccgaccctgggtcccagctcgtcctaagccaacccaggccaaccattccatattttagttgttaagcaggttttaagaattaaaacactaacttgggtacattgctcggcttgcccataaccgagggctcggctattcgaatagattatactctgatcagaggtgtacatctttacccacaagacacatcttcctcacgtgtaaccacgtgccacataccaccacggtatacggacggaagacgtgacatagtttccaacccatcctagccttagacaagagtaccgacccaatcccgcctacggccggaacccccgggacaggcaggcaagactgagcccctagcagtagggcaccaaccctctgccatatgacatctcgactaccgggccgcagctcgtgtagccttcatttgccctggagaatgtccatcgacccccgacttcatccatctccaatccgtgtacttttgtttatgactagactgagccacaaactaagccttacccactagacatgtggaagtacggtagtgctttgcaacagaggcccgaagaccggtccttaaacggccgaggtgctactatcaaaaccatgcaccccgagcccagcctaaaaccattttaggggattttgaatagagggggcggtgtgaagccaattccacaataaaccaacaattccatagtgtccaggtgatatgaatatttcccaaggtctatagttgtaaaaccacctaatgttacctaattaaagcaaagcatctacctaaaatcatactagtgataccacgagtagagtgtccactagttggggttttgtttgatctagggtgaacaaggtaataatagcaataacaataataataaggtcataacaaaggtaaataggcatggctaaataaaacagtgataacgcgggaatttaaataaagcgataatgcaataatttaaatcaacataattttataaactgggattcaatatgatcaagatgatgtgtcttgccttgctcgttttcccaatcgacggcttcgacttccacgaagagcggatcttccgaagctgcagcgtctacacgaccaacggaaaagaaaaaggctttaacactaaataactccacataacagcagaagcaaagcacaaaaatgggttctttacatcttaaggaaaaattagagacttgaacggtccaattccgagttcaaatggccaagatatggccatttgaagtttatatgctctttaaatggatatttgcgaatttcttcatttaattttcaattaaaaaaaactatttattgcgtcagccgagggagccgggcgcgcggaccgggtccacgggaagtggggcccacgcgtcagccgctcggtccacggtggacc

SEQ ID NO: 27232 - DNA, 3872 bp, Oryza sativa
ggcgcgcccgcgccccgatggtcaccgccggcgaccaccggcgcggcggagcggcgcccgagagagaggagggaagggggaagcgaaagggcggtcctcggctcaccccgggacgacgacgacgacgagaacggcggccggagcggaggaagacggcggcgcgggtcgggatgacgatgacgacggtgctccggcggtcggcgggcgaagcggagcggcggacggggtcggcaaccactcggcgaagccgatggaggtgtcgccgagtaaggaggaagtccggagcggcggcggcggcggaacggagctcggcggcgatggcggagagagcggagcacggcgcgagcacgaatccgacggcgagagcgagcggcgagcggcggaaacggaagagcggagctcgggcaacgattttatagcgtcggaagggagagaaggcggccggggaggaaggaaaccggccgcggagatttcggccgccatagatgcgccggcgacgaatgcgggattaaaatcggacgaatccgagggagagagagaggggaaaacgggggaaacgggagagggaatcgcggggaatgattcccccctcattaaggcgcgcggggacggcgggatgcggcgcaatccgcggcggcgacggcgctagggcacgggctcggcggcgggcgcggcggaagaaagccgatgacaggtgggccccacccgtcagcgagagtggcgggcgggcccgcctgtcagcggcgcgcacgcgcgcggggagccgatgggccgcgggggaggagagagagagagggagggagaagtgggccgagccggcccaagagggaagggggggggggaaaaagaacttcttttagggttttctttttataaaacctttttactttgtttatttcttttctattattatttgtgctctgaaaattccactaaaatttatttaagcattttaggcttttaggaaacatacaaaaatcctccaagcctcatttgacttttatctttgcacattttaattgttggaggctttctcatgaattttaattattctttgcacaattttgaggatgaattttagagtcgatttgggacgcgacagcagggtcaatgggaagtggaggatgtgcgttgacttcaccgatctcaacaaggcgtgccccaaggaccatttccctctccctcgaaaagaccaattggtggattaaacgacaggatgcgagttgttaagctttcttgacgcttacttcggctaccaccagatcagcatggcaaaagaggacgaggagaaaacaacgttcatcacgcccttcggtgtattctgctatatcaagatgccattcggattgataagcgcagggaacacatatcagcgtggaatccaaggggcacttggcaatcagcttggacaaaatatcaaagcctacgcagatgacatcgtcgtcaaaacaaagatgggcgattcactaatcgacgacctaatggaaacgttcgacaacctccgcagatatcgaatgaagcttaacccggagaagtgcacgttcagagtaccatcaggaaagctactcggcatccttgtctcaggatgagggatggaggccaaccctgagaagatcaaggcaatcgagaacatgaagtcgcccacaagattcaaggaggttcagctgtgttaacgaccaaatttggtaagatatgaaccaggttcgacattggaatcaaggcagattcggcaaagagatagatccgaagaacagagtatgcatcggctgcgaaggcatcggctggaatgtgcatcggctgagacggatcggtcagaggatggctgataccgccgatagagccggtatagccgattccgatggaaatagctccgaggctgtttctagaatcgattgacgtgcttcacaaggattgccacgatggagataaagctctcagaaaggcaattgtatctattaattaggatattttatgtaatttccttagagatatgtttgggtaaaagtctgccgcaaagacttatggtatcttagagtttgttagagataagagtcgtgtccggcaaggacatgttttgtatctcgggtataaatatgacccgaacccaatgtaatcaacaacaacgttcaacaacactttcggcgcatcgccaccctttttactttcgttctttttcaacgagttcttgcttttgagttgagctgcatcgattcgatcttcaactagaggtaaacttgtcatggcggtttgcgttctcgggattagtgcttctatctttataacactctaatcttgtttatgtgatccgtcgagttatcatatacgctttgtaatctctactaattgctctatataactcgtcatcggttgattcttattgttagaaagtagtcgatagagttatgttttgttattaatttagattatatggtgtatctaccatctcttagagattttcatcatcttgcctagatcttatacttatctttatgcttaatgctgcatcggttgagttcgatctattaagtaatatctataattatgatatctggcttgttttatgatcatcgaaagagatagcatcggggtttcagccgatcttacctgatttagctattttatatctcatatgcttaattgatatgctagatccgccctttatattaagatcttattgctttaaagtatattaggcttcttgtttaatatattttgcctgttttaatatcttagtataaagtagtatcagaggattagccgatacacgctagatctatctgatcggctatgctataaacgtttatataaccatcgctttaatgtatatttcaacttaaatgatttaatactatctcggcatgatgaccgatctatcccaatcacttagtttaaatatacatcgaagaaaggattatatgtcactaatatctacagccgatcgagtagatttagttttatcttatttattcatggctgtcgatcgatcccaatatgacatcggttggatgataaatgatatgtcatcagcaactagccgatcggctatcatttatggatttaatcgtggttttctgatctttatttcttgttgattgcaggatcaaatcaactagcacactcacgaacctaaaggcaagattttggacctgcactgaagttaagcagatcttccgggccagtttgtgttttcgcatcaaaaagcagttgacaggatgcatggcttcgctaagccgcttcgtcgtaaggatgggagaacgaggacaagctttctttgccctgctcaagaagcaggacaaattcgagtggacccaagaggtagagaacgcgttcatcgcgctcaaacgctacttatcaaacccccctatactcgttgttcctcaaattaatgaagaattattcctatatattgctgctacgccttattctgtgagtacggttatcatcgtagagagggaaaaagtacaacaccctgtgtactatgtcagcgaggccctccatgacgcaaaaactagatatctacagatacagaaactgctctacgccgtggtcatgacatcaagaaagctacgccactacttccaagctgtcgcgaccgggaaaattgccttttcccgaacgctagtgtattaatccccgtcccaggaaaagccggggtacaccacacaaacatgatataaaagacacatctttattatatcgacaatatttacattattacaaaggcgcttcaggcctgacaatcaaaaataaacagcagcggactagcgggcctacggctccatcttcacaggcgctcaactggggtataagccaggactccacctaagacatcttctccaaagcttctcttactgaagaggggaaggattgag

SEQ ID NO: 27233 - DNA, 6965 bp, Oryza sativa
atacacatgatcacatatccgcatctttcaaacgaatcctcatggaacttgtctgtattacacatttctcccttattacatgaatgcaaggccttgccttaaacaaaaagggaaggtgcttaacatcagtacattgcatcctcaacatgaatcttccataaacataacaaactcattgtttataatcatgaatgtatttatttattacatgattgctgcaaactcccgattacacaatgataagtagcgaactgaaaaccacaaacgtggctgctcattttgattctggagagatatagctggcattgttctagtgactgcatcatccttgattggttctgtgatgatgtgttaggactgcatattgctataattcacaggagaagcttccttctgattgctatttgaagcagagaacgatcttctgcttggtatcgccctcctgagattgattgcccttcgcttgacctggagtaggtcggggagagaaacaacttcttccatcgacgacaattcattgctgaggctgtcggtgccgagaatggttggtgctgaaggtattatcgctatgatttactgcagaatcaggtgcagcaagaggagcattggtgttgtggatgatatcgtcgatgttgctgttggagctgactagctgatgagacaatcgtagagttgttcgttggatttctgcggtcttggtcaacaacacactgagttggcaatccttgggcacatggtttgtaccttcgcacagaaaacatatgaccttgcgggtgggacactcccctggtggatggtcttcttcgcaataagcgcagagtgtgagacacatgctagcaatgtgtccaatttctccacaacgggtgcatgcctttgattccatctcttcctcgccgagatgtcggggagactcatcttcatcatccgaggagacttgatctgacccttcactatcagatactctgccaccatggcttagaaggtgctgggtcaactgtcgtgcacctcggaaagtatttcctttctgacgtctaggaatagttatccctgctggaggccattcggtgctggtaatagtcatcttacgtacttcttcttcagttcgcatcggtgcttttctcttctgattcttactcttcttgcctttggcttgcttagtatgcgaccccacgtggtacgagaggctagggggaaagcatttcccgggattcaatgggttctctccgttgagctctctactttgcacactaggctgcaagcttgacttggtgtgaggaggctggtttagcgatgcctgccctgttaaaccaaaggaaggggcttctttggcatatacccatggacaattcagggcatagtgtccttgctctctacaatcatgacaaaaggggacatcctctcctggcattggaagctcattgacctgggtggcaaatgctcgatcaaacacatactgattttggtcttgacttccaaccaatggtagctgtgaactaagcagcgtgcttggaatggaccaagggtgtgcccttgttaactctcttgaggccagtggtggattgagttgaaaacttgagttacttggggcatacccgctgacattctttcctttttctctgttaaacatctgttacagggattgaggtgagagaggaaacaagccaggaaagaatagaccagaactagggacaggaccttaaaggaactaactcttcttgctgatgtgttgtttgtttcacttattctgcaagttgattaagcaaacaacctagcatggttacatcaccacccaccgatgcaaaccacgcgctacacacacaagcaaggaaacacacgacaaacgaaacactagagggtggcttaggttctgcgacgggttctccaagatcttcgctcctgcttcacagctggcttcactgcttccttcgcttcgctagcggatcctgcagtcttccggagcttcggcaaacaactgacgatgtcttcttcttcgcaaagctgaccatctagtactagttgaaaatccgaagaaggaagaacggagtaaaccttttgcaaatagcattaggggaaggagaaaaaggaactttcgcaaataattttattcataaaatatgtccttaggttttatccacttggcttatcctacagtcgagatggctctgataccagcttgtcgcgaccgggaaaattgccttttcccgaacgctagtgtattaatccccgtcccaggaaaagccggggtacaccacacaaacatgatataaaagacacatctttattatatcgacaatatttacattattacaaaggcgcttcaggcctggcaatcaaaaataaacagcagcggactagcgggcctacggctccatcttcacaggcgctcaactggggtataagccaggactccacctaagacatcttctccaaagcttctcttactgaagaggggaaggattgagcaagaatgagtacaaccacagtactcagcaagacacacccacaaatgcagaataaatgcaagggagtacaagggaataataatatagggattaagttttgcagtaaacagcatttaaaagtcacttagttgcccaaagctattttgtaaagacgatcctagagctatacaatattattaatcaaggccgtgaaccctcacgaacctgccttaacccaaggcctacgatgattcggaccgaactggcaacctgacctgggttccagctcgtcccaagccaacccaggccaaccattccatattttagttgttgagcaaattttaagaattaaaacactgacttgggtacattgctaggcttgcccatatccgagggctcggctattcgaatagattatactctgatcagaggtgtacatctttacccacaagacacatcttcctcacgtgttgccacgtgccacataccaccacggtatacggacggaagacgtgacatagtttccaacccatcctagccttagacaagagtaccgacccaatcctacctacggccgggatacccgggacaggcaggcagaactgagcccctagcattgggcaccaaccctctgccgtatgacatctcgactaccgggccgcagctcgtgtagccttcatttgccctggagaatgtccatcgacgcccgacttcatccatctccaatccgtgtacttttgtttatgactagactgagccacaaactaagccttacccattagacatgtggaagtacggtagtgctttgcaacagaggcccgagcttaatccttatagtggccggggtgctacttcccacaactggcatgcacccaaaccccaccgaaaacaggttttaggggttttgaaagaggaagagaggtgtgtgtccaattccaacataagccaaccattccaaagtgtccaaatgatatgagaattcccaaagtctaaagttataaaaccacctaatgttgtcctatttaatcagcgaagcatctacctaaattcatactagtggaaccaggaatagagtacccactagttggggttttgtttattctagggtgaacaaggaaataataacaataacaataataataaggtcataacaaaggtaaataggtatggctagataaaacagtgataacgcgggaatttaaataaagcgataatgcattaatttaaatcaaaataattttataaactgggattcaatatgctcaaggatgatgtgacttgccttgctcgctttcccaaacgccggcttcaacttccacgaagagcggatcttccgaagctgcagcgtctacacgaccaacggaaaagaaaaggcttttactctaataaactccaaacaacaagcaggaacaaagcacaaaaatgggttctttacttcttaaggaaaaattagagacttgaacggtccaattccgagttcaaatggccaagatatggccatttgaagtttatatgctctttaaatggatatttacgaatttcttcatttaaattttaattaaaaaaacctatttattgcgtcagccgagggagcgggcgcgcggaccgggtccacgggaagtggggcccacgcgtcagccccacggtccacggtggaccgggcgcacgcggctggcggcggtcggcgccgtgggtcccgcgcgtcagccgcacccgcgggcgcgggcggctgacggccgggcccacttggcagccgcgagggcgcacccgagggcggcctcgccggcgcggccgacgggagtggcgcgcacccgcgccccgatggtcgccgccggcgaccaccggcgcggcggagcggcgcccgagagagaggagggaagggggaaacgaaggggacggtccacggctcaccccgggacaacgacgacgacgaaaacggcggccggagcggaggaagacggcggcgcggttcgggatgacgatgacgacggtgctccggcggtcggcgggcgaagcggaggcgcggacggagtcggcaaccactcggcgaagcggacggaggggtcgccgagtcggaaggaggaccggagcgacgtcggcggcgaaccgaaggtcgacggcgacggcggagagagaggagcacggcgcgagcacgaaaccgacggcgagagcgagcggcgagcggcggaaacggaagagcgaagcacggggatcgaatatatagcaacgggagggggagagcgcggccggggagagaggaaaccgcgcgcggagatctcgggcgccattgaagacgccggcgaacttcgcgggatgaatccggacgaatccgagggagagagagagggaaaagagggggaatcgggagagggaaacgcggggagtaattcccccctcattaaggcgcgcggggaaggcgggatgcggcggattcagcggcggcggcggcgctagggcacgggcgggcggcgggagcggcgggaggaaggcgatgacaggtgggccccacccgtcagcgagagtggcgggcgggcccgcctgtcagcggcgcgcgcgcgcgcggggagccgatgggccgcgggagaggagagagagagagggagagggagaagtgggccgagccggcccaagagggaagggggggaaaaagaacttcttttaagattttctttttataaacctttttaactttgtttatttcttctcaattattatttgtgctctgaaaattccactaaaatttgagggctccttttagaccaaggagaatttaacaaaaattctccgggccacatttgaatttttcttgtacgtattttagggtttgccaattcttttcgaattttaattaattctattattccttttagaagatgatttttattttgggatgaatttatcaggacgtgacaaatccaccccccttacaagaatctcgtccccgagattcgaggaggctagcaagaagatgggttgggcggtcttctcttcttgtctgacttcttccgttgcgtcttgacgaacttccagcaaaactttaccactcggaactgcttggcttgacctcctgttgcggatggaatcttctcttcacctgacttggaccaggatgcaccttttggctgactcagactaggttgcggtagttcagtgatgcttccgttccagaacttctcatgattcatatcttcggagtcaacctcggacaagttatcaacttcatgtcatgcgtcgtaacctgcttgtcattactaggataccatgcttgttatttgcttctaactcgccaccaactgcctcatattagcttccctggtctccgggtgatagctacttctgctatttgatgcaagggtcgataactttacctttgaattatgcttcccaagagagccaacttatcctacttgttatactttgacgtcttcccaaatggctttactgctggatttgttattgtctaatcattaccctgtcaaatctgaggcttcgttgtgagaggtgattttaatctgacctctatagactatcttcgaacgtatcactggttctataactgggaatggctctcacgaacaagcagctcggattcactttctttacattcagtttacttcccattattatcttcaggttatcctcagttagcattcaacgtattcctttacacttttaaccttgatgtgttctttcccattggatcatctcccaagacttggcattacctggtaaccggtgcttgcacttttcacttcgtgtagcatctgataccgagttgaagatttcactccttgccttcatagaaacacttttacctaggtcatcttgcttacttaatgacaaggtgactgttgcggggcaattacaatcaggggtcttccttgagcgatgcagagcatgtttctgtttatcaatcacctttcggcctacttcttttatgctagagaacatctttgccaatttcttttatcaatcatctttcggcttatctctaacaggtggtattctttaatgtggattgcggacgcttctggggatgatgaggtcctttggcttgctgcctttcagtggaaccttgatgtggttcgtcaaaagctgtactgactgccttcagggaaatacattgcttgctatctgtatccatgccactagggtttgattgccgatgatcatctttagtgcttcctcgagatggggagcatccaaattgttcttctgccacatcacctttgacatttttctgataccaaataaactaattaccaaccatcgactattatgttctcaaatattgatatctcctggatctccttaactgttggcaggtatacccggtcttatcaatgtagaggcatggcgggtacccttaggggtttcctccaacaatccttatcttgatctgtaaaaggcgtatccaaactcctatcctcaactactgtctcgttggcttttttaacccaacacagtttaattgtttttcttttccatccccaggttggttattaactcgaggttagaatatag

SEQ ID NO: 27234 - DNA, 10615 bp, Oryza sativa
ccgacccggcccaagaggaaagggggggaaaaagaccttcttttaagattttctttttataaacctttttaactttgtttatttcttctcaattattatttgtgctctgaaaattccactaaaatttgagggctccttttagaccaaggagaatttaacaaaaattctccgggccacatttgaatttttcttgtacgtattttagggtttgccaattcttttcgaattttaattaattctattattccttttagaagatgatttttattttgggatgaatttatcaggacgtgacacaagctcataaggttacgtcgtctcttccttccctttgggggaggttgtcagaaacaaagacgtcgtcggccgaatcactaaatggtagtcgagctaagccagttagatgtacacttcgtaccaaggatagccatcaaatctcaagtcctagccgatttcgtagccgactggactatcccagaggatagaccggccagccaactagacaacgaaacttggaccatggcgttcgacagcgcgctcaacagccaaggagcaggagcaggagcagggttcatcttgacatccccttccggagatcaattcaagcatgcaatccacctcaatttcaggcaacaaaaaacacggccgagtacgaaggcctactcgaggagataagagcagcagctgcactcggtgctaagcgactaatcgtgaaaggagatttcgaactagttgcaaaccaagtacatagactacaagtgctctaaccccgagttagcaaaatacctcgccgaagtttgaaagctggaacgtagatttgacgggatcgaggtctgacacgtctaccgaaaagacaatgtcgagccagacctcgcacgccgtgcttctagatgagaaccactcgagcccggaacatttctggacatcttgatgaagccctccgtcaaagacacgcacgacaaaagcatcatagccaacaccgacattccgtcgggggttgcagaagttgcatacgtcgttgcaaacattgagataacagacgactggcgtattccgctaataaaagtcctggaatcagacgagctaccggacgacgacacggaggcagagaagctatcccgtcaggccaagatatattgcatgatcggcagagatctatataagaaggccccgaacggtatcctcctcaagtgcgtctcatccgatgacggaaaagctctcctcgtcgacatccatgaaggcatttgcggatcacaagccggcggacgtaccttggtcggcaaagcttttagacaaggctttttctggccaacagtcttaaaagacacctgtgacattgtgcaacgatgtgaagcttgccagttctttagcaaacacaccaagttgccagcacaggtgctccagattatccctttgacatggccgttctcgtgttgggggctcgatatactagggccattcccacgaggacaagggggctacagattccagttcgcggcaatcgacaaattcgctaagtggattgaagcagagccaacacgagaaatcaaagtcgacaacgccataaaattcatcaaggggatattctgcagatatggattgcctcaccgcatcctcacagacaatggctcccagttcactagcggccagattactgcattgagctaggagtcaagatctgcttcgcctcagtatcccatcctcaaagcaacggacaagtcgagcgtgccaacggaatagtactccaagggatcaaaacctgcgtgtacgataggctcatggcctacgacacaaaatgggtagaagaactcccgtcagtccaatgagccgtacgaaccacgccgacaacatccaacaaggaaaaacctttcttcctcgtgtacggatcagaagccatgctctccacggaggtacggcatcagagcacacgagtacataaatattccgatgaggaacaagatgaaagacgaagtgacgatgtgaatctactgaacaacatcgtgaaccaacaagccctacgccgatatcatgagaggcgcatcagagctcgcacacttgccatcggcgactacatcctccgacgagttcaaaaccaggaaggtcggaataaactctcgttcaaatgggaaggaccgtacacggtggtgcgagtcttacgaccaggtgcgttcaagaatgcagatggtgagcaccttgagttatccaactcttggaacattgatcaactacgtaaattctatgtatagaatcaatgtatctcagtaatatcaagtaaatttcccaaaggtattttttgaatacttcatgagatagttttctacccagagatcccttaccacgacaatacctactattgaaatcgaacctaatgtccctttatgccagtccgacaagcctccgagaaacctatgggaatttcggctggggacgcccagagcagataaggccttgtcggaccctaagagccaaacgaccatgtcaaacctagtcatgtaagagtgctcaatgatggcgcattaaccaagccgtgtaatcggaaattgacttttccaacctcacggctaggggctaggtaatcgcgttttcaaataggcaagtttcgggtcatcgagcgttctcctcggataacagatttctccgaggagaaggctgggggctagggagagtacccgactcaacaataggcaaaaatagcctgaataacgagtagtactcgcacatttcatacaccattcaaacacttagtaaatagatttctgttctatttacaaaaacttaacatttatattacagacactcctctagatattttttttctacagggaatgacgtctaccaagagggccattgccaaaccatcgacaaaaagaccttctcggcaaggggagcaagagaacgagccagatggtcaacttcactcgccgacagtcgagaacgggcaaatccctcacgcaagaacccgagattcatatgcggacgtggatctcggatgcaggcgagtacgtgacccccggcataacggctagcgcggcggcactcctcctttaggcagttgtcgatccgccgtctgacatcctctagctgggcacacgcacccctcatccaggatagatacccaactgtcgtctcctcgggctctgcacgatcaatcttgagctgccggtagatctccaacatggagatacaacagctcttcaggtacgagttcaaccagaccttgcgccctcagagcgtttcaatagcctgatccttcttcacgaccacgacggatcgttcgagctctgccaccttaaacttcgtcctccagtagagaacttgtcgatctcgctcgccaagcgtgttcctgagatctacaaagggcaagggttcagggagttttgccccgtaacaagtaaagcttcaggagcaaaaatcctaagatatcccacctgagatctctcggaggagcgaggccacgtcgagatctgacaagccagatgcggcatttacatccacagacgcgccgatgaccccaccaatgtccgacgaaggcattccactcaatgaaaattggttcgtcgcatcgacatcaggatgtccgccttgctggacgtcctcaggatcaacatttctatgagaaggaaaacatgctacaaataaacgaatcaagaacatcaagaaaaggaaattgttccaccaaagacaacacaaaagaatctacacagaaggagcacaaagcagagaattactcctcgaaaagtgggaggacggtctccccaagatccgccacaacggacatcacgtcctcacgcgtggcatcgtcagcccccttagacaagatccccttaagatcggcgttagggagagcgagcttcacgcaagcgaggacatgacaggcccccgtgtggatcccgttggagatctcctccgagaccttggcggcatgcttagacgggatgacctccatcttcgtcgccagctctcctagcgccgatgtcagggaggtctcgttggggtgcgcagggatagaagacttcacgctgcactccagggctagctggtgtaggctggtgaagctcttccgaagctagtcgccaatggagaagatatgatctagcagatcgctcatcctcttctccaagccaagacgttgcatctcgttgccggccacgatctccatcttctgaaggtcgtcatgggcgacttcgagttctgtctccagctgtgccaccctcccgtccgatgacatagcatgggccgtcaagcggtccatctgagcccctacctcccgagaagtgttctcaaagaggcggcggcactcggacatcatgtcagaccagtcctatggccctgaagacggcaccacagtcgtagtcacgacagcaggctcggcggactcggcagcagcaggtgcagacttcgcacgaggagaggtgacaacgggagtcccgctagtcaccacctcatcgccgctctgcgcggaggtcgttgaagctttcctgcaagtacaagaaaacatccctgataagctcacagacgcgataatgaagaaggtcaagagattcacttacttatcggcggccctcttcactaacctcctcttcagaggaggggggaggccaccagtatcctgagtaaaacagcagatcacggctttacttcatcatccaacgaaagagaaaaagacaacggaccgagaacgatgggccttaccttagatccgcggacttctgtcgagatccggcggaggcgcttgaccgagcccacggcttcctcttggtcccactcccccatgcggtgacagggacagagggagcagcggcgacctcctccacaaccttctccttgagggaagcggaggcctagtgatcgacaaggggaccgatgacgtccatcaatggcaggacctgcaggagttgaggtcaactcgatccttcgttgaacaaagaagcaagaggcgttcgttctcactcacattgatggcggcgaccttctccacttccggccggtcgcagataggagtcgggatctcctcggccttggaggcggaggtaatcaccacattccccactcgctgcaccacggcgtcgtcggagagcgctgcggaaagggcaagtgattcaagttaggtcagaataccaagataatatttatgcgagggtgagcaacgatgacacaagaacgagtaccccgtgacgagatccgcgtcacgtcttccgtccccgtgtagccgaaaatgggatgagcgcgagcttgcagcagctggatccgacggctgacaaagtcttgagtgacctcatagccggtcagcccatgctctcaaaggtcgctcacgatgacaacaaaggctaggagggaaggagttagaaggggtttggaggtctagctatcagaacggtcaggttgattctcgggcacaacaagaactggatcaagttccttacgcttgatgtaaaaccacttggaccgccattggccccgagatgagtggttctggaaaggaatatatctcgccttcatgccgtcacgaaggcggaacccacaacatccagacactcgggtgccctccatccaacggagttcgtaaaagaagcgaaaaaggtagatgaaaggcactaccccaatgtaggcctcacaaaggtgagcgaagatgcttaggaaggcgatggagttggggttgagatgcaagagagaaagaccatagaagttcaatatcaacaaaagaaattccgaagggggaggtaaaaaaccacaacggacgaaatcctctaccactaccatgcggcctagaccaggagagggttcagtacctccttgttctctcgccatggtttgcttgggagggatagccccgtctatatagagcttcttcagggaagccgtatcggaggaagacttgctgaggtccgccatcggatgaggatcaccaggggaggacgaaggaacctagggaattttggggaagacgaaaggtttgagactattggagaattggaagattttttggcaaacggacttgaaatggatcccaaaaatccctttaataagcgcactacctggcggtcagaattttaaggagagagattgccgctgaaaaatcctgaggcctgttaagggcagttgttcagacttcaattcaaattcatgtttaagctgtcggacttccatatgtgttgtcggtagcttctaaccttcccggctccgcaccgagaacgaccaagtgagcacgacaagccactaacaagagaagtcatggatgacaacatgaattcatttgagttgaagtcaggggctactgtcagggttacggataaggcatacctcctatcctacgacttatggaatataccgataaggtataccttcacgtatacgggttgtttctgtatatgttgcgtggaaaccatttcaaattataagaaatatctctacgagtcaagtgatttccaaagtcctactcggaaggtatagagtttatgttataccgtactaggtccgatatcctcaaaccttccttggggatcaggatgatcgacagtataaaagggaccccctgggagaggttctagggatcgaattccatcgccaacacacccaccaaagttatgaagccagagtacgtggagccaactcgccgggagatcacgtcgaatccctcgactacgatctcgtctgtaccatctgttttgactactgtctttgtaatttgttctcgtcagcatcaatcccatataaactggactagggctattatctgataaggggactgaaccagtataatccttgccttttatctacttgatgtcgtactacgtaaaccctcgttccaacataccccaatcctctacttatccggtccacgagtatcactcgtcgacaaatacatgcacaaatttatttgcgaagtggctgatttctatataggtttgcatattgctttttgatatttgatcagtatacctgaatgaaatggttcactgtgcccaaaaatgtgttcattggtgctgacatggttaataagttcttatatcccctgtagatagacttgtgaatatgaatgtatcagaatagctatgacactgacaggtcacttcgatcgtcctgtttacagtacttttctttaccatggctgtgtttagttccatgccaaaattggaagtttgaagaaattggaacgatgtgacggaaaagttggaaatttatgtgtgtaggaaagttcaatgtgatggaaaagttgaaagtttgaagaaaaaagttggaatctaaacagggcccatgtatgagtagcaatatctatgaactgagggaagatcaaatataatggcaaatcaaatgagtcacaaggacacagataagataaaaaaacaccaagtcaccaactagagctgctctcaactaggtgtgaaaatgtatgttttgaatttagtcttgatcaattcaggtaattctagattataagccccaagaaaatatgaattttaaattactctaatttttttcacacacactatttttcatataaaagtcaagttatttttctccacttccctccctctgctaatttttcacttcgtatattgatcattagcagaagaaaatattcagctgtcgggtcccgaaactaatgatttgaaaaccgacttatttaactgtatcaagccctgtatcgttagattgatacaggttcaacgatctggatcttcatcgcgtatatttggtcaaggctccaaaagagatgttattacataaaataatagggtatttataaggttgtggctaactactacagcagaagctatagaatgatttaactctaatgtttggctataaacttaaaccatctatctaatctctacttgagaattaagttagaataaaactaacttatgtgattgaactcccagcttcgacaaaaactccaaatagactctgaaaaagaggggttgaagcaagggtgagtacaacatactcagcaagctattatatcaaatatgaatgcatgaaatagtagtatttgagtagggctatgaatacttgcagaaagcagaaaatgtagaagtacaaagcctgtaatgattttaatgcaacagtatctaataaaatcttgaattatatttctaaccaagatgccattgcgagtcccgatgctcaatattcgtgagcatagctattcgaatagtttcaagaatattcatactgcagtagatgtacgctttacccgcaatccatgacatgccaatattcattagcttagtcatggcaaaacttttcggttactaacatcagtggcacctgttccataaactataatccccatgcgctctgaacgtaacgttatcagtagcgagaggagttctggcgttcccggggtttttagacagaactggttgagagacccccggcatctcaaccaggttttcacaattatatataaatataaataaatatatatatatatatatatatatatatatatatatatatatatatatatatatatatatatatatatatatatatatatatatataaagcgctgtgcgccacgaaactaaatggcgcaacagacatggctgtggagtaatggccgcggggccattcccaccatctcaagtggaaccgtaagtaatattttagagcaattctatggtccttgaggacgtaccatgaggtaccactttttctattgtaaatttagtatctcttgatactttggtaccatgaggtaccaaattttacactaaatttttggtacctcatggtacctcctcaaggaccgtaaaattgctcaatattttaactaatttgagaggtgtgcacgattaattaactcaatccatgtggtagatgaagcatgggtgggcacggagggatgttacatagttaaaatttgactcgaaacgacgtgttgatgatctcggatgacacgtgacacgcctgtaggctaaaattgatgtgtacggagtaaaattttgactcataaagtggtgtaggtagtggcggattggattgactcccgtgataaatgaagttaaaaaatagagcatttttactgtccttgaggctgtgcagtaccaaatcgtgaccgttgatcaggcctcatcggacggtcaaaaatcatctgtacctcatggtaccgcacctctgccttgaagcggtaccgtgggtgggagggtagttatgtactttcgcgtctattccgcatcacgcacgcagcatcccttccttctctgtttccttctctgtttggcgagagaacagaagccgcgtattcgacgggctagagcagcgagagaaagaaaccctagaatgcatggcagcgatagatggcggcgggagcaggttggactggcgacccgatggtggcctagatcgggtagccccggcgaatcgtcaacggcggcgggcgcggcagtctggatgcgacggctgcgctgcattggcggcggcggcgattcgtcggcgacggcgggtatggctgtctggatgcgacggctgtgctgcatcggtggcggtggcgattcgtcagggtcggagggcaacggcctcgatgcgacggcggcgctgcatcggcgggaggccggcgatggttggatgccgatgaaactgatgaaattcaaggataagcgagcaaccctcacaactggatggaatgctttggttggagccaatcttttcgagcaagctgatgtttgtgtgtttctgttcactgaagttccgatgtaatatgtctatcagtcaattctagtggtatggtttgcataattgatgcccctgtttgtgtgcattttgtatggatgcttcttgcgagatttattactggtgcatgcttgctgattatttgttactggtggatgctgtctgcggaacttaagttggtgttgctgagatgaaatacacatatatgctgctgaattgactgtgtcacaattgcagtttgcctgaacttattgctcctcttgctggaattactgctacaaatttaaatttgctgcttggtactgctttttgatgctgaaaactgaaaattgctggcactgctgcttcttgaacagagatcaaacttagaccaacaagattcaagtacttactttatgaaagttgtacaagatacaaacaacaatggttgaaacaaattatgcacacggcatacaacgtaaattcagctcaaacttagacaaacaacaacatcatacagcatatttgttctgctaccaacaccttccactgtacacggcacagtgaacctgccaaataatttaccaccttcatcacttcttcaaccataaaatgtatcaacaaataacaaatccagatgaagcacatttcaaatttagttcttattacgacagagtccacaccagatggtggaaaagatgccggagtcttcggggtggctacgacggtggatgggacggggtggaggcggcgatgttgatgcgcctgcgacggcggatgcggcgggtggagacggcgacgtctatgcggcggcgttgaagccacggcggccgtggcgtggtcgatgcgacggctgctcggcggcctcgatgcgacggcggctgcggcggcctcgatatgacagcggcagacgcgtgtgcgacgcatagccgcggcggcctcgatgcgacggaggctg

SEQ ID NO: 27235 - DNA, 543 bp, Oryza sativa
gggttcctccaaatatccctctcacggtacagccccttcttattagggtcatgggaagatcaagctgggtcttcaaatgggctactctgtctgcggcttttgggccgtgaacagcttccccaccttgtactatgtcacaattccttctctttgcttcctcaatggcatctccctctttcctgaggtaagtttccatatgctttaacgtttgttcagacatttgtacgcacttggcttaaagtttaacacaagatttacatctgcaattaactcagaaaactagcccctggttcataccctttgcgtacgttatggtggccgcatactcctgcagcttagcagagtcactgcaatgtggtgacagtgcagtggagtggtggaatgcacagaggatgtggctcattagaaggatcacctcatacctcctggcaaccatcgacacattccgcagaatattgggcatctctgagtctggattcaacctgacagtgaaggtcactgacttgcaggccttggagaggtacaagaaggggatgatggaat

SEQ ID NO: 27236 - DNA, 2801 bp, Oryza sativa
aagcaacttcttgcggctagctaatgaaaccttatccataatgcttcatcgcgaaatatcttttcgccccgctcaattcataaagatatacactgccaatatcaccacagcctatcttcttgaacaacctgaaatggctcaacccaatgatcccatctctcaccctgatcgtctggatcgcctcccaccgtgaatcattggacttatgaggcttcgtggtgctgctcatgctgctacacgaactctcatcactgatatcactgctagtgcttggcctgcatctgctactactacccctttcaccggtctcggatcgatccgtcatcctagcacttccacttgcttttcctggaccactcccttcgcatgtgtgaaatgaggtgaggttcccattcacactctcatactccccacccttcttttttgacctgccataccttttgaaaccatttttttgctcatttctgtcggacacttggccgatgaaacatcaacagactctttcaggtggtggtttggcttttgttcctttggctccaatttatgattcaacttgccgcggtctgattcttgtagcaatttaggtactgaagaacgagaattgtttgatttggggatgtctggagcagtcttagtatactgctgtggttctggggtggttgggatttctgggagggtttgaggaattatctttgaagccgttgtcgccatgactggttatttatcaggcaagatggccaaatactgccacaagctatagttaatcaaaatagcaaccttggaatagtgatgaaacttccattcacatctgcaaaggagaaaaaaaaatctgataaattcaaaggtgcattcatgaaaccaactatcattccatgattggactaggaggtaaagattcaccaaacaaacaaaagagatgtagtggccaacaacaaactaattacctgattaagatatttaaaagtaggcaagtcaatcaatggtttggtttcagtcaagaaaactaaacatcaagaaatggcctccacagtccacacccttctccatcaacctcccctcaaatggacacttaacactattgtgtgccacacacaggaatttgtctgcttaactacgaaagctaaagccatggagagctccttcctatggcattaaaaccatcaatcctgcctaaccctccactaaggccaataatcatgcaacacactacagatctagcgttccctttcacaataaacaagtgtttgatcagatgagagcacatgaaaggggccaccaaaaaaaagagagaaatggcaaatggagccttttctttcttctaaattaaacagcatcactctagttgagcaaaagctgtgcctgttgatgtattccttccgagaggttgcataaacaaagtggtagcacatatcaatcggcctacctcgttccagtaaaatgtcaacatgtcatttgtgagcgcagaaaggtgaggaaagcaagaatcaagaacacgcccaaaggaaagcccttttctcgtctctctgcaaaatgcagcagactgaaatcttacattctttgcaagaaagataaaaacagagaggaaaaggtttactacgatcaacccaaggcagatctacagggccaaagcaaaggattctctgaagaaccgaattgggcaccaaaagaagagaaaaaggcaggagaagagaaatctcaccagactgaactgagcccggaaggctgaacccaactgctcacgaatcaaacaagaaggaagatgccgagcggtagcggttttctactcaggagaggcgttggatttagcccggtttttccacgagttctcgtgactgtgtacttgagctgttcgtggtggggttcagcaatgtgctgcaaaaatggatgcgaggaggagggcaggaaactggtggctcgactgtattaaaggttggcctcctcatcaccttccctgattttatttttctattgcttttgttaatcccaaatgcaatgatcttgtctatagttttgggtccctgaatatgatttttctttttaagaaaaacaaaagaatgccttgttgatgttgttgctctctgtctcaattattagccgaccagaatcaccaagtttaccatttttggagcttgacgatgtcaatttctacgtagccacgttagattagatattccttgggctaggaatttgaatctaacttgaaagttgaaacatctggaactgtacattattttcaacacgttcctgaaacagcccagggcctaattgtacattattttcacatgaataaattccttgggctaggaattattgttatcagcattaattaagaaaaaaaaacattccaacaaattcccaccctgggctaggatagaaaaaaaaattgtaagccgtaaccaaaatctaaattctgctagacctttttttatcgttttgtttttttaaaatcatgatttttaagtcctatcctgacattatttttctttgcctcatttgtttttctaaggcttcaaattaaagccaaataatcaataagacatgacaaaatgcattccggcctcctttctcaagtcacttcattattttattttatttttatagatggagtcacttcatttttactgcaactcccaacagaactttttcttgcctctaggagtagtactctagagacggaatcagcgccaaaaaaaaaatgaagaggaaaaaaaaagaactagtacttgtgccaatcaccagctcatgatcgatcgatctgcttcgaagtccgggcggaaagtaaaaaaccgcgcggtgaacgg

SEQ ID NO: 27237 - DNA, 7156 bp, Oryza sativa
ctgaactctcaagaagtggggaaagaagctaacatgtgaaagtagtgtcgaccacgaacaacaaaagattatatttgttttttttcgccgggcaagattatatttgtcggagcaaacgttttcaaatccaccagaccagaccaccacaacattagtaagaaatactccacttcaacaattttagcagatacggcgtactccttacatcttgaaccagcgccatctgaaagcaccacctcaggggcaatgcacgccgtgactccaacctcaaaaaccaatgctagctgaataaaattgcggaagagcgcttacttacgttcatcgttgggaaggggggggggggggttgggacgcgctgacggcggagagagccccgccggcaggtgtcgccgcctcgccggagccggcgactggaaccgccattggacgggggaatccgaatccctaggtgaggccctaattgatttgaggcccaagaacatgggaggaattccgttcgaggccttacattcacatacggcccatgaggaagcttcacactgggccactttctaatgggcctctgagtagcacggcccaatactccctttgttctaatgcgacgctgtcagactgaaactacgctgaagaaatctcaatctctcggtcgatttttaccacccgatgttatcccttcaaccgaatgaatggattacggatctaactcatctgtacttgccacacacacacaggatgaactgaataactatgaatgctccggatattgctgttagctgccaggcaagccattcatcaccaaaatgatgggaacaattcatgctctctctgtccctctctctcccggtctgcagcggcagccagccagggtttcattacgacagaaacctgaaaaagaagaaaaacgtcagcacttgagagagcatggggttgggtgacactgccacgtgaatgcggttgcatttgggccggaattacctgtgcttgggttttgcctgccatgtgacccgcctcgtttcgtttcacccttgctcggcccgatcgatttgcagctctgcacatgctcttgtccggccaccatggtagtaagctatgctatgttagtataggaacccttttggagctgttccaacgcagatggtgccactccagttttgggccaaaataatggagcctgacattggttctaaatgaaactatggtatgtttgagagagcttttggcagctgcaacctctttcaaaatcaaaagctctccaaacaatacaacttttcattaagattttgtgaatgatttttcttgagtaaaatacaccaacagtccttaaacttgtcgggaggtttcacctaggtccacgaacttacaaagcacatatcgagatccctaaatttggtttattgtatcatccaggtccaaagccacttttgaccgtggtcttacctacgtgacacgctacgtggacgatgacatgattttttttatttttttctctcttatcccttcttttttctctttctatgaaaagacgatgacatggacgatgatgtgtacgaggcattttcgtcttttcgacaaggaagaaagagaaaaaaaaggaagaagggagaaaaaacaaaaaaaaaatccatgtcatcgtccacgtggcgtgccacgtaggtaagaccacggtcaaacgcagctttggaccgggatgatacaataaatcaagtttagggacctcgatgtgcgctttacaagttcgtggacctaagtgaaatcttctgacaagtttaagaaccgctggtgcattttactcatttttcttcttagcagctgcaacctccctcagaatcataaactctccaaatagtacatcttatcatttagattctgtgttaatggttttccttacggcttatcgaaatatatttgaatgaaattttcggcagatgaagacattcctatgcttgcatcatcaatgcaactggaccaaaaaaactaaaaagagggagaatgacgtcaaaattggaccccggaagaaaaaaaactcacagaaatgtagaatgtgacacattacgacatattctgtcacgacccattttctggccgcataggacagtcatgcacaacgcaaacggcgacacgtaagttttgcaggcgcgacgcgcatctggcaaagccaatttcgcccttaaaaaccaagggcgcgcaacggctcgtcgcgtggagagcaacgctcgctgcgacctgcgacgccgccccgcgccaacttctctccctcccacctccaccacctcctcctcctcctcctcctctcctacagcgccacaatgccgcgcgcccgcgtcgtccacgtcatgctcctcctcttcgtcgcgctcggcgcgtgccgtgccacccacaacatcaccgccatcctcgccgaccaccgcgacctcgccgagttcggccgccagctcacggccacgggcctcgcggacgacatcgacgggcgcaacaccatcacggtgctcgccgtcgacgacgcccacatggcgcagctcagggcgcgcgggctcccgcgcgaggcgctgcgccacgtgctctcgctgcacgtcctcgtcgactactacgacgacgccaagctgcaccgcctccccggcggctccgcggtcgtgtccacgctgttccaggcgtcgggcgacgcgcccgggagcgaggggatggtgaagatcgccgtgcgccgcggcggccgcgtcgcgttcgtgccccaggacgtcgacgacgcccgggccaacgtgttctacgtcaagtccgtgcacgaggcgccctacaacatctccgtgctgcaggtcagcgccgtgatcacgtccccggccgccgaggcgccgtcgtcggcgacggagtcgaagcccaactctacggacgcctcgtccaagcacgggccgccgaatgctggtgcacacgctgcaccgtcgccggtggggcaaggttcgtcgtccgacgacggcgccgacgaggggaagaaatccggcgacggaggagatggtggcaagaagaacggcgccagcgtcggcgcggcaccgcgtgggctacccttcgctctggcgtttctcatggctgccagtgccatcctcgtggtgaattggtgatcgtgtgaaactgtgaagttgatcaccaacgttgtcttgtgaaattcattttgggtgaatttgcacgtttctgtgccacttttgttggggatttcgtgagtttttccactgttaggtaccttaggttcatggtgcattggtgcttggaaatgtgttgaattgtggtttgcaagttagtagtaccattttgtgtcgtcaacttaatttgcacgcgaacgtatgatcattcatcagctgtattctgagtccaaaactccaagtcgaattatgtaatgatctgatcaaactgaaatgcatctgttcttcagatatgcatatacgtgaacgggaaaatgactctgcatgcagctgtagacatgtaaaatgcagtcttaccaaattgtctttctgctgcacgcgtcttctgcgcaagattacaacgtgagaggtgaaacaaaaagaagattactgttaaatcaagcttgctactgaacagatatgcatcaaaagaacaaatcaaattccaaactgaatgcgcctatgcgtttctgaaacaagatgcctgacacccacaagaacactactgtcagtatagcaccaagcagtgcaactcaagtactcaaccgtagcttttgcccagatcaggctcagcaacctttgctgctagccaatagccactgcccactggtcacttcacttgtatcagtagcatcttcctgtacagcgaagcacatgcttgccttccatgcacggacgagccaaagctgcccatgcatggacgagtgcatcagttcgggaagcagaattcaaagatcatgacaaagcgtagctaggcctagctaagacggtcttttccttcttcctttcgatcctttccttgcgtttttttccccttcttcctttcgatctttttcctcacgctgttcgtcgaaagtatctagatctgaggcgaggtacgaatgttattactacagctgggctgcagaaactgaaggggaaactgatcaccgactcctagttatctttcctttcctttgcagccagattgagcaaatcagcaaggctgcaactgcaagcctgcaaagaacgcatctccggtcttaatttgcttgcctggtacgttttggatcttgctaaaagggcactgcaagagctgggagagtagtagtatacacaatagtcagcagtaaacagagtaacagagagcatgcgatctttgcttaaagaagtgcaagtaggagtgtggtaaagagatcaaagcgaagcaaagtggttcctgcaaaccgagctggactgtgcatggatcggattaggattatacggaaagatgaacacgttagaacgtagtagaagatgtgagcaccggctttagctgccttcctactctcccttttttgatacggtgtactaggtagacatatggtttactttctccggggatgtaagtaccgcaacacagagatcatgaaaacattggacatgcataaacttgttatgcataaacttggagtagtagtctattatacattcaaaaatggacagttttcgttttgaactcttgattcagttttacaagtaaagctcgagcctcaattctcaaaaacagacatgacagtgcgctagtactcccttcgtttcatattataaaatgttttgacttttcctttctaatcaaacttatttaaatttagtcaagattatagaaaaatatagtaacatttttttacccaaaacatactattaacatatattcaatcaatgtcaaatttaataaaactaatttgatgctatagatgtttggtaattttttctataatttaattgaaattaaataaggttaattaggaaaaagtaaaaaacatattataatatgtaacggtgagagctatggtttccccccacgttcatattgtcccaggtagataccaaaacgacgatctccccccaaaacccaacttttgagttttgatcctatttcaacgtatgtgggtcaaaataatggtcaaactaggtagaggcatgaagcctatctagatttgagaatcctaacttactataaaattataatccactaattttaaaaattcataccacttcatcatccactagcaataatttcatgccaaaccctatgccaagcgtaattctaataatccattgaattttaggaatcacctccattcttctcctcacaatatttttcccaaaattttttaacatgtatatatccatcattttcatagtcctctctctctctctatatatatagagtaagactattcaataccccctcacgatccccccccaccccacgcgcctcctcgagattcctcctccccccacctctcccttttttttttttcccgatcccacctccacccctccccttttttgagagagaaaaaaataaaagaaaaatttgccttcaatgggaatagaactcaagacctttaattcaaattaccatatggcactaaccagtaggctatttctcaattgtgagagagttttcttagtaaaaatttatcttctcatacgtgctaaatccttgtagtatttggcacagaacatgtagtaacgatacgcgtccggttactacaaaatatatatgttgttattatagtcaagtgactggtattactgggttaaagcctcacatactaactatatacttgttattgcacaaaagtagaagtgttactacatgataggtgcatgttaccacttccaagtagctatgttactgcatgataatgtagttttactatgtcatgtttaagagataaggatcgaataggtgggttataggtaaagtctgttgatggctttgagcgaggtctgattgatgtaggagtgttttgaacaattttatacatttggtaaaaccatgttactgcatatataggcccttgttactgcaagttacacattctgttatggtatgtggaggattaaagttcaaaatgccagtttttgaaaagcaatatctcacaagatatgtattattttttaaaaccgttttcacaatgatactgtagtgcatgtggaggtttaaacttcaaaatgcatctacatattctcctccttaagaaatcgctcttcctccttcttcttaagaaaactggtctcctccctccaatatagtgttactgcatgcatgtatatgacgttactgcacttttgacagtaatattgatgtgaattacactaaaccagaaattgaaataaaaatatatgggttcaaattcttagattctaaccatatacttgttactgcacaaaagcaaaagtgttactgaacggcatatacacgttaccacctgacaattacacattaccgcatgtttacgtagtaacactatccaataactacagtaaaacactttgttactgtagaacatatataacgttactgcacctttggcagtaacatcatggtgaaattatagtaaaccagaaatcaaaagaaaaatatgggttaaaagtctcacatgctaaatatacatgttaccgtacaaagtggaagtgttactacatggcaggtacacgttaccacatgtttatacagtaacactattcataaattgcagtaagacgcattgttactacaaaacttatggtttttactacacacttacagtaacgtcgcgatgggattgtagtaacgcataacagatagtactaacaagtagtaatgctatagtattgctacttgtggagagttaagatcaaaaaacccaagcttcgaataacaatatctctcatgtgatgtatgattttttaaaaccgtttgcaccatgatgttagaaaaaaatgcttatcaaaaatagatccgtcatgactatatttcaactaaatttgaatgttgttactgcacgtaagacacagtgttactgcacgatggctgtcgctttactgcactgtttcgcaagacgagagctgagaagaggtgggtggtgggggagttggaggcagtttgaccgggttttgaccgacgtcgggggtgctcttgactgacctttgactgaggtgggaggtgggtttggcccttgggagggagggggggatat

SEQ ID NO: 27238 - DNA, 9614 bp, Oryza sativa
cttttagctcgattattacttaggaatttccgcagcaaagtgcggggaatcacctagttaattaaagaattgagtcctcataaaataccttttcaatatggcctgaatcattgtttggttttttggccttctgttctatttggtccaaaaggccatctttctaagttggactgggcccatggtttcgttatgggccaaaaacaacaatagcattttgttttattctccccttttgaaaacagtatgcaggggtgatgcttgttcattataagaggcaaagggtagcatatgatatataagtttataatttattatagatgacaacctcaaaggtaactatcgttgacatatgtaaattatgctacattacaaaagaaataatgtgaacattgacattggtacatacgtggacattatctataattatagactgacatctacattccctatggttatcaatcggaatgtcggctcttgtagccttgtgaacatacgtactctctcgcactatatgtgcattgatgtgaatcctccaatttgctataggaatgtcgtaggtttgagtagcctatgtattcattgtcagcaaatgcgcaccgtgaactctttacgtcagaggatctacgtcagtccgctagtacgctcatgacatattccccctgtttttgaagatgcggttagttactccttctgtacactccataaaatgtgctatcctacaatacattccccgcttcaatgtatgagatatttttccccattttgttagaaaatacttaagcaatatgttccaaatataatgttatattgggttgatgttgtgttaaaatggagtggttaagcatgagccttcatttccctcataactgtttttttagaactcctcgcaactgttgcactcaacaatttcattttccttcctgttattcaattaaggttctccttaaaaataagtctttcatgaataatttagtattttgaaggtactattgaaagaattatttggagatgtctaatgcttgaatgataagtaatttggaaggcatctactcctacaaagttgaatcttctaaatactccttcgcttttaaatatacggcattgttaacttttgaatatgacaatatttaacaatttatcttgtacaaagatttagtgcaaatatgcacaatgcgtaaagtacctttaatgtaaaacaagccacaacaaaacaaatgatacttagagcattttttaataagccgattggtcgcatcatgtttaaaagtcaaccatgtcatatataaaaaaagggagatagtttcatacatagctctaatatattttgaaggtactaaattttaaaaattgttgttgcagattgtaagtcttgcatataatttattgtttcttttacttagcttattagctctaattaatcacaccctatctctcctatatttatataataaaaacatcccgacacaccaacgtacattttctcatctatttctaaggtatggatggtattgtcatgtcaacttatcttctttctagttatgcaccctccttaattattgtaccaacttaaaataagccatatattttgaaattatcataccaactcacaatatgccatatattttaaaattattatgtcaactcacaatatgctatatattttgatattatcgtgccaactcacaatataccatatattttgaaatgaaggtcatatttaagatgtagagtaaatgtatgaaatcctcccatccatatcctcattattaattgcttccacctaccccaagcatttatagttaaagtaaaacagttgtgctcttgcaccaaaggatgacatgtaggagccatgcctacgtcccctggccacccaagccccgttgataaacatggtccctcaacagaaacatccatttttgatggggtgcttccttcttggcgaccttactggtaggggacatgcttaccaaaactggacaatcattccagggaggggcccggcaaaaatgaagtcccttctaccttgattggaacccttatctattggttaaccgctttggcggaatttggcaaccacttcttcttcttttggggccacaactgcacctttgacgtggcttgctgcttgcatttgtccaagccggggcagccctgatgtaagtcctttggtataaatactgcccaagcatagagcgagagagagccatcacaatccaatacaagttcacaacataagcatagtacaggtcattgagacttgagagagcatggcagggaacaaaaagcgtggtatagtagtatagtcagtactaggattagtacttgataactagcacaacaaaaagctactatcatttttgcattcaaagtggtaattaagaatcggatgatcattttgattgttcctcttcatttgttttggatgtcaggtggcaggaacatggatcaggtcaagaaggcggcagtgagatcggatggggtgggaggtagtgcgaccaacgccgagctgccgatggccaacctcgtacgcctgataaagaaggtgctcccagggaaagcgaagatcgggggagcagccaagggtctcacccatgattgcgcggtggagttcgtcgggttcgtcggcgacgaggcctccgagaaggccaaggcagagcaccgccgcaccgtagcgccggaagactacttgggctcattcggcgaccttggcttcgatcgctacgtcgaccccatggatgcctacatccatggttaccgtgagtttgagagggctggtgggaataggagggtggcgccgcctcctccggcggcagctacaccgctgacgcccggtggaccgacattcactgacgcagagctgcagtttctccggtcggtgatcccctccagaagtgatgatgaatatagcggctcatcaccagccataggcggctatggctatggatatggctatggaaaaaatatgtgaacaacttgatgcatgtgtgtgtgtacactgcatgcatgcgtggagggtcaaacagagtcaagactcttgtggtggtttcaataagtctctagtgacaatataagttgtgtatcgttgtttcctttgtaaaaaaaaacgtcatgtatcgttgtgtgtcctcatccggtaatcctttacgtgggtgggttatgcgagaaaaagaaaatgacgttgcatcaaataaaatgcttgatgtttgcgtatttactgtatccattgcatgtgtgttaaaatcatatcgcaaattcaactatcctgtgcgtttattctcactggtggagaaaacgtttgtagtcccagtttgtaacccccctttagtcttggttttcaaaccgggactaccaatctgggactaaagatcgctatctttagtcccgggtgaaataaccgggactaaatatcgatctttagtccctgttggtgtctaaagatcgagctgacattttgtttttttttgcatggccttgttgctgcatggtttatatatatatatatatatatatatatatatatatatatatatatatatatatatatatatatatatatatatattatttatatatgtttcaaacatatacatgcataatatatatgtatttatacatatatatgttatgcaaatgcatatatgtgtgtgtatgaccaaaatatatatttacattaaagaaaatgtgtacatgcatatagaaaaatagacatgtattaattacaatccattatgatgtcctagctagctacaatttcgacgtagtagtagtcgttatctcagaagctaaggacctatgaattgtatttccatcgtagtagaattcacccttgggatcaaggatttgttcgttgatgaatcccatgagttgttcttgaactgccgcgataaattccttgtgtgtgatcaggttatccctcatgcgaataaactatatgaatgtatgaaattaattagtaattaaacaacaaatcgatacgtacgcaatgaaattttgaatttatttgtacgtacatcgagctctcttgtggtgatgatttggtctgcaaggcagtggcaatactcgcacacgtagtagccgcacaagttagttccctgcttttgctttgcgcactataaataaatgacaaacggcgagagatctaattaatatacacttgtatgtatttgaattggagattgaatataaatgtagagcatgtgtactcacaggaaaattgaacttccgtctaagtctttctctccatttgccacggaccaaatggcggaacctataccaagccctacatagagtttaaagctatgattcgtagtagcaattaattataacaagattcttaattaacataggaacttatgacagtacctgtctataagttcaaaaaccttgtcaaacatagactcttttttatccattgagtcatatacgttgacggtgcaggcctccaggtcgaagagtaaaaggacccagtggaatctgcaatgtgcgtgggatgcattacatatgaaacacttagcatgttcgtacgggaatgaaatttgttatagcaagacagtaaaaactaactctgtgttgtacggcaatagtatgaatgtcttgtaatgctgcgccttcaggagatggacgagattgtcctctgtggcttgcggatactggtcgagtattgcgacgtttactttccgagggtcgatgaatctagtatcgaaaacccctcgctgtcgggccctttgaatctccattctacaacgataaaaggaagtatatattatatatagtctacttatatacaaggacctaattaattaaaggaaacgtaataagaaatctaactgaacgatacttacaaaatccagcaactcataatagagacgtcgagggcgtccagctggtatagttcgtagatacccttgaaattgatctagagaatgtcatctccttgcaagaagtccgtgtccctgatcctcgctccgatcatccctctaccggtggcgctcatctccatgtacagttgatggaacttgtacatttgtgtgggtagggactgcagctgctcaggcttgacaaacggtttaccgaattcgtacatgtatttcacttccgccttttcgattggtgcgcctcgtagcaattgatccgtattagaactatgctaactcaaacaatcttatatgctaagttttattacaaatctaataatcttatactatgctaagtctaagtgtcgtataaccctaggtaatcatatatgctaagtcgtctaagtgtcgtacattacaaacctagataatcatatatgctaagtctaagtgtcgtatattaaatctaatagtcttaattgcattaaaaatctaataatcatatatttacatcacttgcctgcgcgaattccttcgagggctatctaccactccggcttgagggacgatgacgacaacgtcttttctgcaacatacaaaaagatgtattaggataaacgcaaagtaacatatattgtatttcacgttcgcgttcttgttaagttcacatttcgttcacgatcattcacgttcgcgttctcgttaagttcatgtttcgttcacctacgttcgttcgttcacgtgcattcacgttaacgtacgttaagttcatgttcgcgttcttgttaacttcacttttcgttcacgcacgttcgttcgtttacgtacgttcacatacaacgttaagttcacgttcgttcacgttcacgttaggttcacattcgttcacgttcacgtacgttcattcgttcacgttctcattcacgtacgtttcgttcgttcacgttcgttcacgttcgttcgttcgtttacgttcgttcgttcgttcacgttcacgtacatatcgttcgttcacgatcgttcttcgtttcgttcacgtggcggcaatggagcggcggtgtggcaggcagctagagcggcggcagtgtcgggcgccggctacgggcttgagcgcgacggcgtgcgtggcgagcgcggcatcgcgcgtggcgcggcggcgacgaagcgcgcgacgtggcagtggcggcgtgcgcggcggcggcgtgacggtgcggcggtggcgtgccgcggcggcgtcgtggcgtcccggcgtcgtgccgccacggcggcccggcgtcgtggcgcggcttcgtcggcactgccggcgcgacgtcgtcgccggtgacggccgcatcgaggtcggggtcggcatcgtcggcgcggcggagtcatgttcggccgcgacgacgtcggcggcggcgtcggcaacgaggcgaccggcagtggtttggggagagagagagagatcgaggtcgaagagagagagagggaggcggcggcggcggctatcaccccagagatgcggcggcggcggaggcggcgacgacgacgcgcgcgagacgacggcgagatacgacggcggcggcggcgcggagatgccctaggcagtggcggcgaaggagaagccgagagagatcgatcggggaaaaaacttctaagtgttggtggagaatacgagggcgcgtatcgggaatatatatacccctagatcttctcaacaaccgggagtaaagatatctttacttccggttgttgagaacaacatatctttactcctggttgttctcatcaaccgggactaaagatattttcccgctatttccaaattctttttaaacccggttagggttaagaaccgagactactgataagcgcactgaatattaatttccattacatatgtgtttctaaaatagaaaataatgcattaaaattatttaaagtcgaaaaattaatgacaattacttcgaaacattattgttgtatgtagtaaattaagtggataaaacgtaataagcaaatatatgatttaaaattaataaaaattctaataatcatatatacttagcatatgaatgacattaaattgttaaaaattgtaattaacatatgtatatacatacgacatgcatgatttaaaattaataaaaattataataatcttatataattagcatatgaatgatattaaattgttaaaaattgtaattaacatatgtatatacatacgacatgcatgatttaaaattaataaaagttctaataatcatatataattagcatatgaatgatattaaattaattgttaaaaactataattaacatatgtaaatgccacatgcatgatttaaaacttttaaaaattctaattatcgcatataactagcatatgcatgatttaaaattgttaaaactctaagtatcatatgtaattgccacatgcatgatttaaaacttttaaaaattctaattatcgcatataactagcatatgcatgatttaaaattgttaaaaactctaagtatcatatgtaaatgccacatgcatgatttaaaacttttaaaaattctaattatcgcatatatctagcaattacatgatttaaaattgttaaaacctctaataatcgtacgtaattaacatatgcaatacaacaattgatttatatggataattaatacatctaaaatagtttacatcgtgtacacaataattacggtaatacattggcggtgacggttgaccgcacgtactttctcctcactattgttccctccttctgatcgctacgtgagtaaggggtgtcttcatttgataggaggatgctagggtcaatcgtcaccgtgaaagggggttgcccatccaactgataataatcctcatcagtcttgtcctcaactccgacgatttttcttttgcctgggagaaccacgtgacgcttcggctcgtcaggccctctgcccttctttcctttgctagacatgtccttcacgtaaaagacttgcgttacatcattggcaaggacaaaaggtttgtccgagtatccaacctagttaaggtcaaccgttgtcatcccactgtcatcaatcattacgcctccaccagtcaacctaacctattggcaccggaacagagggaccttgagaggaccatagtcaagttcccatatgtcctcgatggcaccgtaatacgtgccagttgttccatcgtgtcccatggcatcgatacgaacaacgctgttttggttcgtgctcttcatgtcttgggctcttgtgtagaatgtgtacccattgatctcatatccctggaatgttgcgatcgacccagatggtcccctcgccaggaaggccagttgttggttgatcgtctcgttacccatgagatgttgtcgtagccacgcggggaaagtatcaatgtgatgccgtgtaatccatgcatcggacttaccgatgtttttggcgcgaactagagccaagtgctcctcgatgtaaggagctaccaatgaagattattgcagaaccgtgaaatgggatttacggaataaattgttgtctaccgtcattattgctttccttccgagagttccctttccccgtagtctcccttcatggcgtgattcaggtaccccgattgggcgaaggtcttcaataaattctacgcaaaattcgatgacctcctctgttccataccccttggcgatgcttgcctctggacgagcacggttacgaacgtacttcttcagaacgcctatgtacatctcgaaaggaaacatgttgtgtaggtacacaggcccgagaatactgatctctttgacaaggtgacaaagcagatgcgtcattatattgaaaaatgaaggtggaaatatcaactcaaaactgacaagacattgcaccacatcattctgaagggcttctaatctatccggatcgatgaccttctgcgaaattgcgttcatgaaagcacatagctttgttattgttgctcggacattgtctggaaggataccccttattacaactggtagcagttgtgtcatcaacacgtgacagtcatgagactttaggtttgtgaactacttctccttcgtgcttattattcgcttgatattcgtggagtatccagacggtacctttatgctctccaagcattcaaacatactttccttctctgccttgctaagagtgtagctggctggactcaagtaatggcttcctttctcgtttggttccgggtgaaggtcgccgcgttgttccatatgcttcagatcattacgtgcttccagtgtatctttcgactttccatatacacctaggaagccaagaaggtttacgcaaaggttcttagtgaggtgcatcacgtcgattgtgtggcggacgtccaagaattcccaatagtgtaactcccaaaatatagagttccttttccacatcgccgcgtgaccatcttcgctctctataggctggcttccaagcccctttccgaacactactttaagatctttaaccatagcaaacactgttttcccgctgtgatgtttaggcttcgtacagtggtccgccttatgttcaaagtgcttgcctttcttccgtaccaggtggtttgcagcaaggaattgacgatgacccatgtacacaaccttcctacagtgcttaagatacgtactttctgtttcatccatacagtgagtgcaagccttgtaccccttgttggactgtccggaaaggttgctaagtgcaggccaatcattgatggttacgaacagcaacgctcgtaggttaaact

SEQ ID NO: 27239 - DNA, 2050 bp, Oryza sativa
tatggccgctgctcatctctccaaaaggattcatgccatccgtactcaaaccaaaccgtatgtttcgtgcgtcctttccaaattctttaaattttctgtcgatgtttcgccactgcgaccatcggcggggtgtctcagcatcccgtcctgttgacgctcttcagcgtgccatcgcaacattctagcattccccttgttcctgaacaaacgccttagccgtggtattatagggaaataccacatcaccttagcaggaattctcttctttgttagctgcccgtcaacttctcctggatcgtcccgtctaatcttgtatcgtagtgctttgcaaacagggcatgcttctaggttctcatactcctcaccgcgatataggatacaatcgttcggacatgcgtgaatcttatgaacttccagtcctaacgggcagactatcttcttagcctcgtacgttgtctcgggcaatttgtttccccccggaagaatgttcttgacgagtttcaataaatcgccaaatgccttgtcactaaccccattttttgccttccattgcaacaactccagagtggtatccaactttttgtgcccctgctcgcaacctgggtacaacgacgttctgtggtcctctaacatcttgtccaatttatgggcccccttttcactttcgcagtcctccttggcgtcctgcaacatctgatcaagatcatccgcaacgtcgttaccatcagcatccctttcctcctcgcccgtttgatttccttcaaatccagcgtactgaccaaagtccggaatattgtcgtcttccacttcatcttcttccatttcaaccccttgctctccgtggcaagtccaacagttatagcttggcatgaaccccgactcaaacaagtggaaatgaatagtcctggatgcagaataccccttctgattcttacacttattgcatggacaacaaataaaacccttatacctgttagcttcggccattctcaaaaaataatgcacgccatcaataaactctttggaccgccggtcagcgtacatccattgccgatccatctacatgagatgaaaaaaactcgtacacaaataattattcttacaataatgacagtcatacaataattataaaataattacaaactctttcaacagtcatacaataatgacatatcattattcatacaaaaattataaaatattacaccaaatagttcttatttagtatttctaaagttttaaactaatattaatgtgttgtacttcttttaattttcattttagtttgttttctattatttaagattaactttcactatattttccttctcaactattttataaaaccttctttagcaaataaactaaatttctatatattctttcttccccacacaaattttctctctcatcaacttacaactaaattttggagacaaaatagtatgcaaaacatagctgcaaatgtaatatgacaaaaaaaacattggaggatgaagttgctaacctttttagacacctccgatttgtatataatcaccaaaataaattcactagaaattttggcatgacctcccctcttttttgaagaaattttgaagcttgctcgggcagctggaggaggaagaagacatatatataggggtgggactttagtcccggttggtgttatgaaccggggctaaagatccccgtgatctttagtcccggttggtaacaccaaccaggactaaagttacgatctttagttccgggggggggggggggggagggttgacaggccctaatagcatttgagccggactaaagatcaaatatgcccgttaccctttttaaccggaactaaagatcatctttagccccgatttttattgcaaccgggactattgtggaattcggccgaccaacgaaagattgtttctccaccagtgtctgttgattctaaccaagaatatactatccgtaggcaatttgaacatgtaacggactggacaaaacaaacaaaaatggtcaaaacattaattgtagtagatatcaacaaaattgttca

SEQ ID NO: 27240 - DNA, 3387 bp, Oryza sativa
  unsure (1)..(3387): unsure at all n locations
aacaccagcctcagcaagggttccctgcttcaacaatgctggtatggactcaagtcgggaaatcgtcttcccggttaaaccacgacgccgatctccacggnnttttcccccccctcccaaatgaccggaaacgagaacgcagtggctacaaaccaaggcgactccatgtcgaaaaatccacccgtcgaaacggaaaacagatcatcgacgacatccaagctcgggaaggattctgatatggccaaaccttgtccttccgacatgaaccacgagccggcaaagatgacttccgaagccacaaggtcttggtgtcctatccaccacaccaagaaacacaccctgcaagattgttgggttttcctcaacgtccgtgctgaaattcgcgcctacaaagaacgtggaattcaacgtacttctccaactcgggatgtctattgtcctattcacaagacaaagaatcacgacctctcgagttgcaaagttttcctcggccccatgaaagctccgtttccttaagtcatacgtccccgtcagggataacggcaaggaataaggagcgactccagcctcagatcgattcgttggggtaatcgatatcgatcctcacgaaccatcggtcttacatcttctcgaagactatgggtcatcgacaacgagcgtgccgcgggaggtattggctatcgatgacgttggcacgtcaatgcaagccaacgcagaagcggcgaatcaatcgactactccagcccaacacatcagggccgttcaagctatactgagggaaactccttacgatcccgttctgaacgatgacctcgagcgttggacagaacgactacgggaatcggtgaccaacctcagtaacgcgtttgaagaagccgctaccgcagcgcaccaagatcagccgccaactggcgacgccaatggtgaagatccggaacggagggaatcacctcaacgagccactcctccacctcgcggcgctggcgatctccgagatcaaatcaacggccgccgagaagcacgacgcatacgagacaatgtaaatcactctcggcgtcatgtctcttcacggcgccatgataacggaaatcgaggagaccgctcaaacgaggaccaggatcacgacaaccaccacgatcgcaacgatcgcgaacgacgggggccagacaatgctggtcatggccgccgccgtaacgacgacgataatggagatcggtgccgagacaacagcgagagacaacgacaggattctcgagatccaggctgtcatcctcgtaatcatgcgtcggaaccaagcgacccatcgtcatcatcatcatctgcgtcctcctcatcgtcagacagacatccacgaaggacacacgaccgccgacaacccaccgcccccaacgctgggtgtagggctttcggtcgttccctacgtgatgtccgatggcctgagagattccgacccggagcaattgaaaagtatgatgggagcaccgacctagaagaattccttcaagtctactccacagtactctatgctgccggagcagacgacaacgcgctagcaaactatttaccaactgcgttgaagggttctgcacgttcatggctgatgcatcttcctccctactcaatctcttcgtgggcagacctgtggcaacaattcgtcgccaatttccaaggaacgtataagcgccacgcgatcgaagacgacctacacgcgttgacacagaactcaggtgaatcattgagggaatatgtttgacgcttcaacgaatgcagaaacacaatccctgaaatcaccgacgcttctgtaatccgcgccttcaaatccggtgtcagagatcgttatactacccaggaattggcgacaagacgcatcacaaccactcggaggttattcgagatcgttgagcgatgcgcccatatggacgatgcgctaagacgcaagaacgacaagccaaagaccgggggagagaagaaatcagccacagacgcatctgagtcaagcaagaagaaaaatcgcaaaaatgggaaaaggaaagctcaagcggaagcctcgcagcagaatgcgcgaaccctcccaagcgcctagacccacaaggcagcgacacaaagaaatcttggtgccccatacacaagacggacggacattctctagaagattgccttgttttcaaaaaatcgctcgagaaggcatggcatttgaaaaaggcaagcgagtacgcgttgtcgagaagaacgaagagacggctcctcatgaatcggattctgcgtattcagactccgacctccacgtctcacacattttcggcggctccacaacgtactccttcaagcgagaatacaagaaagtggaacgtgaagtctgttcgacatggcggggggctgcacccaagatgaagtggtccgagtagaaaatagagttctcggaagaaggccaccccaagaccgccgttatcccacgacgatatccgatcgtggtcgaacccactattcggaacatcaaggtagcgcgagttctcatcgatggtggcagctcgatcaatcttcttttcgccagtactctagacgcaatgggaattccgcaaagtgagttgacaccaactgatcaacccttccatggaattactccccaatcatcatccagacctttgggcaagattacgttgcatgtgactttcggccaggccaacaacttccgaacagagcagatcaccttcgatgtcgctgaattcgatacaacttacaacgccatcatcgggagaactgcacttacgaagttcatggctgcatctcactacgcatatcaagtgctcaagatgccgggaccgaagggaacaatcactattcagcggaacgcaaagctggcggtgcagtgcgacaagcggagcctcgacatagtcgagcaaacgcccagcccacccgccacgactgagccaccaaagaaagtgagcaagacaaataaaacgccgaaaccggacggcgccatcaagatcgttccactctccagtgccaatcccgacaagactgtcaagatcggggtgacactaaacgagaaataggaactcgcgcttatcaccttcctccgcgacaatgccgacgtgttcgcttggcagccgtccgacatgccgggggtccccagggaggtgattgagcacaaactaatggtgcgacccgatgccaagccagtaagcaaagaatgcggagatttgcaccagaccggaaacaagccatacgagaagagctcgacaaacttctcaaagctgggttcatcaaaaaagtactttatgcagagtggttagccaatcaagtcatggtgcggaaggcccacggaaaaatgaagaatgtgtgtggatttcacggacctcaacaaggcgtgtcccaaggatcactttc

SEQ ID NO: 27241 - DNA, 3538 bp, Oryza sativa
caatcgagaacatgaagtcgcccacgagactcaaggaggtacaaaagctaaccggatgcatggcagcactaagcagattcgtcgctaggatgggagaacgaggacaacctttcttcgctctattgaagaaacaagacaaatttatatggacactggaagccgaagaggcatttattgcactcaagcgctacctatcaaacccccctgtacttgctgctccccaacttaatgaagaattattcctctatattgccgccacgccatattccgttagcactgtcattgttgtcgagagagagaaagtacagcgaccagtttattacgtcagcgaagctctccatgacgcaaagacaagatacccacagatccaaaaactgctttacacagtcatcatgacatcaaggaagctgcgccactactttcaagctcacagagtcacagttgtatcctccttcccccttggagaagttgtgagaaacaaagacgttgtcggccgcattgcgaaatgggtagtgagctaagccaatttgatgtccactttgtgccgcggacagccatcaaatcccaggtactcgccgacttcgttgccgattggactatgccagacaacaaatcagacaaccaaggtgacaacgaaacatggacaatggcgttcgatggcgcactcaacagccaaggagcaggggcaggatttatcttgacgtctccctccggagatcaattcaagcacgcaatccacctcaacttcagggcgaccaataacactgcagaatacgaaggactactcgccgggatacgagctgtagccgcacttggggccaagcgactaatcgtcaaaggggactccgagctagtcgcgaaccagtgcacaaagactataaatgctctaacccccgagttatccaagtatctcgcagaagtcaggaagttagagaagagattcgatgggatcgaggtccgacacgtctatcgcaaggacaacgtcgagccagacgacctagcacgatgcccgtccagacgagaaccgctcgaacccagcacctttctcgatatcttgacgaagccatcggtgaaagaagttagcggcgaagttagcccgaacacccccgacatcagctcggaggtcaccgaggcagaacgcgccgttgctgatatcgaaaccacagacgactggcacatcccattaatcaaattcatcagcagtgaggagttgccagaggacgatacagaggccgagaaaataacccgtaaagcaaagatctactgtatggtcggtaacgatttatacaaaaaagctctaaacggggtacttctcaaatgcgtctctaccgacgacggcagacacctcctcctcgacatacatgaaggcatatatgggtcacacgccgccagtcggacattggtcggcaaatcttttcgacaaggctttttctggccaaccgcccttaaagatgcatgcgatatggtccagcgatgtgaagcctgtcaattccagagtaaacacacaaagctacccgcgcaagcgctccagactatccctctgacttggccgttctcgtgctgggggctagatatacttgggccattcccacgaggacagggtggctacagattcctatttgtggcgatcgacaaattcaccaaatggatagaagcagtgcccatgggggaaatcaaggccgacaacgccatcaaattcatcacagggatattctgcagatacggactaccgcaccgcatcataaccgacaacggctcccaattcatcagcgctgacttccaagattactgcatcgggttgggagtcaaaatatgtttcgcctcggtctctcaccctcaaagcaatggacaagtcgaaagagcaaacgacatagtactacaagggatgaaaaccagcgtctacgacaggctcatgtcacaagacaaaaagtgggttgaagaactcccatcagtactatgggccgtacgcaccacaccgacaacgtccaataaggaaacacccttcttcctcgtgtacggctccgaggccatgctccccggcgagctacgacatcagagtacacgagtacagaagtattccgacgagaaccaggaggaacaccgagacaacgatgtaaatcttctcgagaagcatcgtgagcgagttgtcgtccgagcagccagttatcaacagtccctccgccgttatcatgagaagcgcatccgagcacgcatactttcgatcggcgactatgtcctccgacgagttcaaacccaagcagggcgaaacaaactctcaccaaaatgggaaggaccttacacgatcacacaagtcttgcggtcaggggcattcaaaatcgcagacggcgacggtcgcgaattagcaaattcttagaacattgaccaactacgtaaattctatgtattagtcaataccactgtacctgtaagtacccttacagtatcaataaagcctatttctaggtcccatatcacaatcaaagtgttttcacccgatgatcccttactctgatgacacctagcgttgaaacctgtccttatgtccctttacgccgtctcgacaaggcctccgaggaacctaagggatcttcggctggggacgcccagagccgataaagccttgtcagatcctgtagagaaaaaagaccatgtaagatctggtcgtgtaagagttctcgccgtgcgtattaaccaaactgtgaaatcggaaatcaactttccaacctcatggctgggggctaggatcagagcttattcaaccaaggcaggtcaagggtccaagagccttatcctccgagaaaattcctccgacgacaaggctgggggctagagagagtgtacgactcaaacggctgaccaaagtcgttaactgagaacacactcttacacacgacatctagagtaagatacatttgtttaaggaatatttctttattcacaaaatgattcttacagtttttacataaattttccactacattacatctttccctgtcacgtcccaaaacgaccctaaaatatatcctctaaattatgcctagaataattaaaatccgtgtgaaagcctccaacaattaaaatgtgcaaagttaaaagtcaaataaggcttagaggatttttctatatttcctaaaagcctaaaatacgtaaataaattttagtggaattctcagagcacaaataataattattaagaaataaacaaagttaaaatgattttataaaaagaaaaaccctaaaattcctcctctctaatgggccgaattcggcccatctccctccccctctctctctctctcctctcccccgcggcctattcggcctccctccccgcgcgcgcgctactgacgggctggcccgcccgccaccctcgctgacgggtggggcccacccgtcatccccttcctcccgccgttcccgccgcctcccccgcgccctagcgctgccgccgccgcgaatcctgctgcctcccgccgtccccgcgtgcaataaagttggggaaatcactccccgtgatcccctttccctttccccccaa

SEQ ID NO: 27242 - DNA, 36251 bp, Oryza sativa
ggatttgagctcgcgacgtcgctctctctctccgccatcaccgttgagctccggtccaccgccgtcgtcgccccggaccgcctcccacctcggcgccgcctccttcggcttcgccgcatcctcgccgacctcgtccacctctccgtttcggtcgccgaccgccggagcgccgcagtccccgtcgacccgagccgcgccaccgcctccctccgctccggccgcctcctccgtcgccgccgtcgccccggggtgagccgtggaccatcgcctcctttcccccttccctcccctctctcggccgcagctccgccgcgccggtggtcgccggcggcgaccatcggggcgcgggcgcgccgcctcccgccgaccgcgccggcatgaccgccctcgggcgcgccgagtggctgccgcgtggggcccggccgtcagccgcccgcgccctcaggtgcggctgacgtgtggggcccacggcgtcggccggtgtgagcccgggtgcaaccggtccaccgtggaccgtgaggctgccgcgtgggccccactcccgtggacccggtccgcgcgccccctcccccctctcggctgacgcaataaacccatttttaaattaaaatttaaatgaagaaattcacaaatattcatttaaagagcatatgaacttcaaatggacataacttggccatttgaactcggaattggaccgttcaagtctctaatttttccttaagaagtcaagaacccatttttgtgctttgttcctgcttgttatatggagtttattagagtaaaagccttttcttttccgttggtcgtgtagacgctgcagcttcggaagatccgctcttcatggaggttgaagccgacgtttgggaaagcgagcaaggcaagacacatcatccttgagcatattgaatcccagtttataaaattattttgatttaaattattgcattatcgctttacttaaattcccgcgttatcactattttatctagccatgcctatttaactttgttatgaccttattattgttattgttattattaccttgttcaccctaggttaaacaaaaccccaactagtggacactctactcatggtaccactagtatgattttaggtagatgcttcgctggttaattaggcaacattaggtggttttacaactctagactttgggatatttatatcacctggacactatggaatggttggattattgtggaattggattcacacctccccctctattcaaaatcctcaaaatggttttaggctgggctcggggtgcatggttttgatagtagcacctcggccatataaggaccggtcttcgggcctctgttgcaaagcactaccgtacttccacatgtctagtgggtaaggcttagtttgtggctcagtctggttataaacaaaagtacatggatggagatggacgaagtcgggggttgatggacatctctaggacaaatgaaggctacacgagctgcggcccggtagtcgagatgtcatggcacagggccggtgtcctgctgctaggagctcagtcctgccaacctgtcccgggggttccggccgtaggtggggttggatcggtactcttgtctatggctaggatgggttggaaactatgtcacgtcttccgtccgtataccgtgggggtatgtggcacgtgattacacgtgaggaagatgtgtcttgtgggtaaagatgtacacctctaatcagagtataacctattcgaatagccgcgccctcggttatgggcaagccgagcaatgtacccaagttagtgttttaattcttaaaacctgctcaacaactaaaatgtggaatggttggcctgggttagcttgggacgagctgggacccagggtcgggttgccagttcggtctgaatcatcgtaggccttgggttaaggcaggttcgtgtgggttcacgaccttgattaataatattgtatagctctaggaccatgtttacaaaatagctttgagcaactaagtgtcttttaatgatgtttactgcaaaccctaactccctatattatggctcccttgtactcccttgcatttattctgcacttgtgggtgtgtcttgttgagtacggtggttgtactcagtcttgctcaattttttcccaaacctagaagaggagttcctggaagatgaaggctttggtgtctagctcgtgcctgccgtcaagcacctgtggtcgtcgccctagtcttccgctgtttttcgtttgtcttcttgtgtgctgggccttcgccacccatgtaataaattaattaattacgcttccgcttgttaaactctgaattgtatcaacttttggtgtaccttgcctcctgggacaaggaataatgcacgcacgtaaggaacgcccgttgggttatttccggtcgtgacattcactaagatatctgtgacagggcacgagtactatcaagaaggccaatgccagtccatagactggaagattttctcggccagcggcgacattgaccttgccagatggtctatctccgccggagttctccgagaacgagcaaaaccttcgcggagaaactcgaggtccaggcgcgggcggtgatctcgtaggcaagccagcacgtgccctccggcgtattgactcactcgacgacactcttacttcaaggcctcgtcgatatgcttgccgatgccatcgagttgggcataggccccgtttagccaagagatgtacccggccgtcgactcctcgggatcactgcggactactcgaagttccctgcatactctggccatggaggcacagcaactcttcaagtaagaattaaaccacacctcgcgacctcggagcgtctccacagcctgctctttcttcatggccagcatggttctctcatgttccgccacttcaaatttcgtcttccagtattggatacgacgatcttgatttgcaagggcaccctcgagatctgctaaacatgacgaccactaagacaagctggatacctcctttacaacataaataacctaatcaggaggtcactaagaggtgaaaaggctactcactttaggtggccgttgccatcccggcctccgcatcaagagtttgatccacattgtcagacgaaacatgtggttcaaaatcgagtgccagaatcatcgccagtgactcaggctgcccgcgctgctggacatcctcgtcatcaacatctctacaatggataaaactcccgagatcaacatacaaaattggacaagggtggtaatcgcacgcacgaaggcggccagagttcaagatttacacaatatgtaacaaatacaagaagtcctactcttcaaaaagggggagaacaaactcccccatatcaccgacttcttccatcacctctttacgcgtgtcgcttgccgccccctgatccaagatctcgcgcagatcgagttcaggacgcgacaatcttacacacgcgaggacgtgacacgcctcggtgtagatgtcgttcgacgtctcctccgcgatcctggccgcatgcttggaggggatttcccccatcgccgtcgctagttccgcaagagaggaagtcagcaaaaactcgtcgggattcaccgggatcgtggacttgacgccgcactcctcggcgagctgatggaagccagtgtaggtgacccgcaacgagtgacggatctcggagagattgttcccgagtttcgacattcggtcctcgagcccctttcgttgacgctcgttgccggccaccaactccctcatcttcgtgaggtcctcacgggcttcagctagctcgcgcaccaatctctcagcacgcgtgttcgccgtcgccgcttccgacctcgcctccgagatctcgcggccgatgccgcgagcaccagcttcgagaaggtgccccatctcgacttggagctcttcccaggtgagaacggccgctggcagaccacgacctgcagcgggatcgctgacggggccgctaggcgtcgcctcccggctcccggtcacgagcacgacatctgtcgaggccgtggcaggtgacgcgctggaagctcccccggacttggcccgtgcagccttcgcccgcgcctccctacggacaaccacgaatcaaacaccatttgaacgagaagcacgagaatccacgaatctgtttacttacttctcgccgatcgccacaatgcgctgtcgtcgtggaggtggaggggacgcgtctgaagcctgaaatacaatcaatacagagtaagaagaaaccctccttgctgcacgatctgacgacaagatgaaattaccgagggggtcgctgccttgcggcgatgtccgagtacagacgagaatttcctcgccttggtcgggacttcgctagtggtggccgcatcagatgtctccttgacaaccttctcctttagagatgtcgccacctgatggtccgcgagcggcccgatgatgtcagtcaaaggaagggcctacgcttaatcaggtcataaggtgatttcgaaaggagaatacgggatgcttatcaaatacacttacgttgatggcttcatcacgttccgccgcccccttttcacaaaggggcacgaggatgtcgctagccgtagtcggaccgctgatcatcatttgaccgacgcgccgctctacagcttcgctgctcagacctgttaaacgggaaccaacttttgataagtcaagaggaacgcgagtacaagcacgccaagatgaatacgagaaagataccccgaggagaaacccgggtcgcgtcattcggcccgaaatagttataggttggatgggcccgagcctggagcggctggatccgcctaccaacgaagtctgcagcgacttcatatcccgacaagccccgttctcggagatcatcgatgatgtcgataaacgactgaagagagggggtcaaagggggcttggcggtccaggccggaatcttgtccggttgatcctcgggaacaacgaagacagggttcgagtccttgatctcaaaatagaaccacctattctgccacttactgcgggaagaaggacactggaaggggatataacgtgacttcatgccatcactaagtcagaacccgacgcaaccagacaccctattggattccatccaacgcagttcatagtagaaacggaagagatcgagaaaaggctctaccccaatgtaggcctcacagagatgaacaaagatactaagaaaggcgatggaattaggattcaaatggagaagagaaagaccatagaaattttcaacaccaggagaagaaactccgaaggtggaggaagaaaaccgcagacaacgtaatcttcgatcgcaaccatgcgacccaagaggggctgaggatcagtacctcctacttctctctccatgtcttcatggccgggaagggcgccgtcctcctgaaggttcttcaacgtcgcgccggtggaagacgacttgccgagatccattgctgttccaagatcgccggaaaacgagcctgagttggcaaactaggttttcttgcggcggcggagaaggcaaggagcgctggcaggcggtatgtttcaacaagattggcagacttcaaaatgggctcccaaaattcctttaaataagcgcactaccgacggtgcgaattccaaggaacggagagagatccccgccggaaatctctgggcccgttacacgcggcaattttctggacttcagttcaaaattcactcgtgaccgttgggcttcaaacggcatgctcgactacgttctatctccgcggtcctcgcaccaggaatgacaacgttctcgacacccgaagtcgtaaatggttgcacgagttcatttaagcagaagtcgggggctactgtcagggttacaggtcaggcataccctctacccttcgatatacgttacatatcgacatggcatacccacgcgcacgcggatatttcctacgtatcctaaggaaaactttcacgaaatctacagatgggaagagtccttctcggacagaactgggtcgtcgacgtatcgtattgggtccgatatctccgagtcctacttggagacctccagatctgtgatataaaagggaccccacggggagggcataggggatcgaatctcagagccaacacaacccacacagcctacgaagtcgaagtctgcgaggagccaagtcatcgagagctagtcgaatccactcgactacgatctcgccggatccgacaagttccatctttccctttataatctgtgttttccaccatataatcccatatcaactggattaggtctattacctaccaaggggcctgaaccagtataattcttgtcttttgattgttcaatgtcgtactacgtagatccttgtaccaacgtaccccaataccctctatatccggtctacgggtatcacccgtcgacaatatatatattggaattttctaggctttcaactatttccacatgagatagttgttttagcaatgttactgtagcaacagcaacaaaaaaatatactatgaaaaatattttgtattgaaaatcaaatgaaatatcctgtcgatatacaattcgatcttatacatatatgttttacactgatgaacaaatcccaaaagagaaatttacacatgtagatccaagatgttatttgatttagtttactgcctaggatctctctctctccgtgtgtgtgtaatatctcactggagtaatatccagtgttggcaaaaggtgtgttacaccccaaactagcaataatgacatgtccatatatatacgtgaagaataaaaacaattgttccaacaatgaatgcatttatttttttagtgaagtgcatgagcggtttctaaacttgtatgtgtgtgttatctagatccttgaactatcaaaatgttgtatttttgaatctccaaacttgtcttagatgttatatatataggttcaaacgggctctcaacccgctccatacgctaaaatggcatgccacgatggtgcctatgtgttagtcagacccacatgttagttacatagaaaaaataaaattaaatatatatatatataaatttaagtttaccttttttttctctctacctaagaggagaaaatatggttttaaattttatttgttatacataactgacatgtggatcccactaacatgtagttgtcaccgtgtcatgccacgtcagcatatgggacaatttagaaccggtttagacctatatgctacccaagacaagttcaaggacttaaaaatgtattttggaagtttagatgacacaaatgcacaagtttagcgaccgcctatataattcactctttatttttctagatatgcggaggacataaatacatacaaacatcagtggaggcgtggagccaacatgttaggctattgtcacatggcatcaatgaatcttgatttaacctacgtagacattatgttcttcaatgaattacattagtatatgatttgccttttgacgccaccatgttccggcagagttagcccatccatttgcttagcccataaattgatttaaccatataagttagcccatgtgaccatgttaaaattatctactaaatccgttctaaaataagtgtactcttgtaattcaaatttgaactagaaagtgtactaggagtaggggattagacagggtcgtcccgaagggagtgccacaagtgcgactgggcccccattctccggggtagaaggaatttgttgaagtcgcataggccgaacgcagcacgtctattcattttcgctgcgtgcgttgattccctcccaaacacgatattaatccaagtaagtcttgacctcggtgactctgaattatggatccgccctgttaaagtattgtacaagagtacattaatttacaaatgatagtactccatccgtttcaggttataagatgttttaacttttattaaagttaaactgctcaagtttaataaagtttatagaaaaatatagtaatgtttacactatcaaattagttttattaaattaataattaaatatattttcataataaatttattttggtttaaaaatattactatttttttctataaacttgatcaaacttaaagtagtttgactttgaccaaaatcaaagaaattttttggtttttgtcataagaaattatggaacaagtatgtttgagttttggatcgtagacgtgctccattcatgcaggcacaacgaaaaaaaaatactaacacgcacgcatggctaccaacgcattgctaccgcaccaaagaggctcttgtatataagttagagtaattacacaataattatactccatttatcgaaaagtcttaagcatattttattttcggggttttcaaatgagatgatcatatttgtacctccatatatgtaagacttaaataaagagattgtatttctcgttttgccatattagaataaatcattaaccggaacccgagcaaccatcttaatattcgttagttacaagcacacgtataatttttttttgtctctgttatagatgagttagtttttttttcttgattttgttaacaaaataaacacgttttagttttttttatggagggatttggattaaacttgctctaaaccaaatcacccaatctttcgttccatccgtttcttcgcatgtgacagctcatccacaccgatggagcagtgacgaatttttttatttttaattttatttattaaaatatttacagaaataatttttaatttgaaaattttacaaaactagtcgcccatcgcccttgcccttccagaagacgttttttccgaagtagtagatggccgttggctctaccataacggcgggccatcgaggacgctcaaattttacaggcggcccccttgccaccctcccagagggcgatttttggctctagggggccacctacaaaagggttgggagggctacctagaatttttgcaggcatctcccttgccgccgcctaagagggctattttctactataggggagagggtggtatttttgcaggcggccccttttacccttttgggaggatgattttctacagtgcaggggggcctttcgtaggcggccccctgtaaagtaaaaaatcgccctcccaaaaggctacgagggggccgtctgtaaatttctcctccctcgatgccgattattatgggagggccaacggctgtctgccacattagcaaaatcgccctcctagaggacgatggacgactaatagttttgtaatttttttaaatagaaaattatttttaaatattttaataaataaaattaaaaaattcgagcagtgaccacagcgaagccggcgccacttgtcacgaacaggcgccgtgccacctcggcgcatgcctctctacggctagctactcccatttgtggtcaacacctcgtagcgtccctatttaacgtatccacacgcatcacaagatcgaccaccaccaagcgagcccagcaacagtttcacactttagctgctagctagtgctaccacccacaggaggcaaccctagctttcccacgcagccaatggaggccggctacccgggcacggcggcgaacggcgctgccgccgacgggaacggtggcgcgcagcaggcggcggccgcgccggctatacgtgagcaggaccggctgatgccgatcgcgaacgtgatccgcatcatgcgccgcgtgctcccggcgcacgccaagatctcggacgacgccaaggagacgatccaggagtgcgtgtcggagtacatcagcttcatcaccggggaggccaacgagcggtgccagcgcgagcagcgcaagaccatcaccgccgaggacgtgctctgggccatgagccgcctcggcttcgacgactacgtcgagcccctcggcgtctacctccaccgctaccgcgagttcgagggggagtcccgcggcgtcggcgtcggcgtcggcgccgcgcgcggcgaccaccaccatggtcacgtcggtgggatgctcaagtcccgcgtgcagggctccatggtgacgcaccacgacatgcagatgcacgccgccatgtacggtggcggcgcggtgccgccgccgccgcatcctcctccgcaccaccacgcgttccaccagctcatgccgccgcaccacggccagtacgcgccgccgtacgacatgtacggcggcgagcacgggatggcggcgtactacggcgggatgtacgcgcccggcagcggcggcgacgggagcggcagcagcggcagcggtggcgccggcacgccgcagaccgtcaacttcgagcaccagcatccgttcggatacaagtagtaacagcagcagaatggcgatcggtctgcacctgcatgcacacgtatcgcatgcagatcgagctagtagtgcaactggctaacttgaaccagttaaaaacttaagacttagtgatcgtgtgtggtttaattaatttgctacgttcaggtagtgatcgatgagattttaatttcctactgtcagtttaattcaccgttcatgtactcgatccagctagtactactcctagttacccttgttctaatcttaacgcaattgtgtcgatcggacgatcgcacgtttatcttcaagtggaatttgtcttataacactaattaagcgcctggaagcttatgtacacttactcaattgtgtattgatccctcaagagttgtcaattactattacaaggttcatataaaagcaaactcatacagtgagtaagtagccaaagtaacaaaactaaaagtaaaagcaaactaataaaaaccaaacaatataaagactaaccattactgaattctattggtgaatctccaccaaaagttggtagaatgctgcataatcgttgactcaagtttacgacacatatcttttattagcttgatatgatcaccgtacctttatagttgagcctatttctgaagtcagtatgtctctaaaaagaacctacaaataagattttgactgctcaaaataaagttaccaaaacaaagttacacttgcgcactcgcactgcataccaacccaacggagagagacggagagagatctagagagagagggagagagatacggcgccatatacgggtggagtactactggagtgtcgcgtgatttgccttccccggccggacggacgcacgcgtgtccggtcaaggactcacggtcggtcgcctgatcgacgttgcgtcgcgccctcgtcgtacgtactacgttccgagcccatcaccgggcaccggcgacacgcacgcacggcgcgtacgtacatacggatcgtgaatactaacatatctacccaacccgaatagattgctacgtatccaacccgagtgttcagtctgcatacatacgatacgggcatgtacagacacagctgttgctcgtcgggtccgtattatgatactctaagaaacttaagcacagtaattggaggacgcgatagagtcatatgcgaatcatattatctagtcatatgtatagcaggattctcagatcgtataattgggcacgcgcgcgcgctgccacaccagcggatgttaatttggatggcgcgtcacacgaactagcttgcttgcggagggtacgtcgtctcgctgccggcacacggacgtatacgcgtcgcggagggttgcccggttcttccgccgcggcccgcgggcgtacgttaatatatgctgctttcagccgcgtggatcagtatcaggggcttcgtttcgtttaccccctgcatcggtggccagtgcatgcccgtctcggctgcccgctttgggaaccgcaggccgcagcatcgcctagttttgtgagctctctccagcatcgatcgcagctagtagctccttccccatgtatgcatgcattgcctacgggggccctgtcgatcgatcgatcgatccatcgatgcatcctcctctgtatgtctctctcccctactgtacgcacgaccgggtgaggtcaggtcagatttttttttattagagcaggtacaatagtatgctataagccaactgtaatataatatattttaaagagataaaaaaagagagagaatatcagcgagctacatatatgtagctagctgtagtatggactccaatacataatatgtgtatgacagatgagttattaatagtataataaacaattattgcatgaatgggctattcccaactcaaaacactagacatagttttcataaactccacatcatcaagaaactagtattatacactactatttcaatgcaaacaccactattccatacttgactttaatgctacttatctcacatgatatcttggatgatgtgtagaaaccatgtctcatgcaagacatggtttccttctctttcctcatttattcacttgtcatattattttttattctaagtgacagcttatttaattctatagacaccatattagtcattgggttgagaatgaccttacattgtagagcagtggactataatattaaacttgctcttattattctctttctttcttgtggctgctgcacctgcactgcacccgcaacggcgctgaatgatgccatgcgtgcgtgacgaaacatctgcgtcccccccccccctgtgcggcgctgtagccatgcatgcaggtgtgcagcgccctgcattcgccatgcgggagagcagtgtactcctccccattttaccaccgactgtttactagctgcttccaggggcacgcgcgcgctgctagtggtacgtaccacgattcctggctccaacgtgcgcacgcatgctttagaacgaatttagctgtgcgctgccgctttcgggcccgtcaacaatttgtaccaaccgtagtatccttgtggctgtaccctcttctaggttctagtgatgacatgcatgacaactttcccagtgaacactgaattgcagctatcatacaggttcctaaactcaaaaactactcgagggatgtgatgtgtgtttctgaatttacggatgagaagaaagcactctgttcacatttgatgttttggattcccttgggtaaacatagttttaaatctctcgctatagctggcgctatctcccgctatagttgtttgaaaaagattctagctatttgatctcatgtacaatttagccgctatagctctatttagcctactataactgtttgagaagctaaccgctaaatgtcttagcccgctatttaaaatattggtaaacatcactggccaaacgcttgcaggcattgcaacgggttcagggctaccttgttatagtcatcaatgacaagagtaggctgtcaaacacgactgagatacacgaaaagagagcgctccaaacaatgtacgcccgagttaaaaccccgggttaaagaaaagcagttctacagaacagtgatcatacacctgcagtccagtcttcttcagtcatcggcaccattgctttctttactctgctcagcctgggggagagcgcctccggtgggtgtcgtcgtctctgctgctgcaccgggagagtgatcctcagctggcctggtggaggcatcctctgcctcaccattttcatgtctaatacactgctttttcttagccatatcggtgtcttcctcttgtagttcttcatcaacaacatcgtcatcatctacatcctcatcaaaaaccttggtaaggtcaccttgattctcagccccttcggcggcatcaacattgttcatgcttatatcgaccccatcatttccagcttcagcttctcctcttttcctctgtgggatcacatgaaagaacgaagtcttccagtcccttgtttccacaaactttagcattatctcgaacacttggttaactgtcagaacctgcataaattacataaaaggagagtcagcaatcttcaagtctttagcacaaattctccaacatccaaattccgggccatttttataaactagggttgttctaaataaccctctatttagactgatccatgataaatgattgccataatattaataataagagccaatcaaaacacataaaactcttactactgcactaacacgtttgaagcctttggagaagatcttaaaaaaaacgtttctttttctaaaagaattttcaggatcatttaacatgcggagagataatataacatatcactgtattatctgatagaagatgtcacaacatgtaggcatactggattattttgaacccttattggaagtatggatgaaacacaaaacaccatttgattgaaagaaatcaggcaagccaacattctgtactgggaaaaacatatccatatgatcacctgagaacttgacatctttaaataatttccaatagggagcttggcacattgaatcccctgatcaaccgcctttttcagtgtaatacctttccatctgttccggtccactaggccaccgatgatgtatatttttgacatgtctagatcatcaagcacagtttcagcatcggctgtaaggtacacaaggttttctttacgatcttcaaatgcttcaagataagacttggcctccttttcaatcatccacttatcatacccaggaatcctttgaagatgggttgccatttctccattgcaacctgtcaaccatagatgagcagggttcgtagacctcccattaactgcataacagtacatgatctgtaacttgcattagtacaagggtaacaattttgctcgaactagacattaatgaaggtagaatgctttttttttttagaaatttctaggtagaaggcattttggtacataaagacattttgatattaacttttgtcaatatcagaacatacttcagatagaataagagatcaatgctatagcattagcacatattgatatatatgattaaaaccagatagcacaagccaccaggttgtcgaaatagaaaaatcatatatgcaagattcatataactggtttctcttacaggtctacacttaacatccagttgacacatgaataaaagattcatacgtgaaactgctaacatccagtagaaattatggacaagtaataaaagtataaagatttatttatttttttggaaaaaaagaatcaggatatttttttggcacctttaacaagccatgccaatacaaatatgtgatctgccatatacatttcacaagtaatcaagttactggaatgtccttcggatatcatatatatcaatacacacatgattcgcatattagcattatttcaagcatgaagtttagtttcagcccaaaatgtacaaaagcgagaagggcaaagcaaatccacctgctgcgtgaggctgtgaatctcgttgggccgcatgagatctccgaactcgaggtccagcaccaccttctgcccggcgccctcggccgcgcggcggagccgctcggcgcgtgcgccgcgctcctccgcgcgccgccccacccgctcgcgccgcgtctgccgccgcgcctccaccatctcggcgcgggcctcctccgagggcgccgcggccagcgcctcctcccactcgcgccttcgcctctctatgtcggcgcgccggcgctccttctccgccgccttccgtgccgccttctgcgccgcctgcctctcctgcttcagcagcttcttcctcgcgcttttcgacatcgccggaggctgcccttcatccgcggccccggccgcggccacgtccgtggcttgctcactcgccgcgtcgtcagccatctcaactcgccgccgccgccgccgccgccggagcagtggctcggtttggagaggggtttttggtttctcggcaccacgtgaccgaattaccgaaataacctcaaacgtattacaaaagtacgcctcctagtgaagttagcgtacatcaaaattccgcctcaatccaggatgcaaacctatgggctacgcgaatcttatttgccacggcccaaatagccatgtagatgaagcccatcttggagcccataagcgaaatgtgtgtgctgtactgctgttccttcgagccattgaccggttgatccgttcggtagcttcagagcggttagactccccccaacgatctgcatggtgtggcatctcttaccaagtcaatcgccaatcacggctgtccatacggaagccagtaagagatcaacggctctcagtgaagcaacgtctcttctccaaacccaaccgcccggcgcgtacgcagtccactaccaccacttccgccggcgccactcgctttcgtgaagaaaacctctatataaactcccccggccagagacaccgccacggctcacgctcgcaacaacacaaaaccctagacttgcacagatcgagacgagagaggctagcagcaacattcttcgacaatggctagccttgcaatcttcgccgctgtagccttcgttctcctcgccgcctcggtgtcgtcgtcgtcggcggctttgtacaccgtcggcgatgcgagggggtgggcagtgccgcccacaggctcagagtcgtacaaccattggggtctaaagaatcgcttccgcgtaggcgacgtcgtgggtaagtacaagatcatcgccgatctgcgaacggcgatcattatcacagttcgcatcattttgcagagttcaagtacgtgaacgaatcggtggtggtggtgaaccacgagggctacaggaactgcagctcgctgagcccggtgatccggttcacggacggcgacaccaagtacctgctcgaccgcccggggctcgtcttcttcatcagcggcgtgcaggagcgctgcgagcgcggcctgcggatgaggctgcgcgtcaggcccgccgctccggggccggcgcaggcgccggcgccggggccaacgagggcggcgctgacgctgcgtcgtccacccatcggcgctcccaggccggccgccgtcaccgccgcgttcaccccgacatcgccgtccgcttcgcgcccgagcgccagaaccagcccgagtcccagccctgggccggcacaggcgccgagcggtgcatctggccgcgcgctcacgggcttctccatggcagcagcgcttctcgtcgtgtgtgtcgtctccgtgttcatcttggtttgaggttatttggagaggtttaattagctctctgtcggtcggtagtatcgtcggttttgataggaattaatgctataattctgagatccaagaagaagaagaagaagaacgtgtcatgtcatctcgcggtagatgacaggatcgagtccatttttgttaattagggtgttccaatgttttgtctagggtacttaattaaacccttatggccttatgtacgtaaacccattccctcaataaaatcccaccagttttattgtgaagatcgacttggcaatgccctcagatccactggagtgattgtttgatttgccatggaagttgaactgtgcagctccctatgtttaacggcggataataattttctacttaagtgtcatggcacctatcatttacatacaacaaaaaaattttaaaaaaaattcagtacaattgatgatacaaatttatacacaaacatatatgactatgggcctatttagttcgcgaaataaaaaaattttgggtatcaaatcagatgtttgaccggatgtcggaaggggttttcgaacacaaatgaaaaaactaatttcataactcgcttggaaaccgtgagacgaatttttaagtctaattaatccggcattagcatatgtgggttactgtagcacttattaggctcaaaagattcgtgatttccttcctaaccgtgcaattagtttttcttttaatctatatttaacgcttcatgcatgtgtccaaagattcaatgtagagaaacaaaaataataaatcttatatgtatgacgcagataaaaattgttatttattgtttcttcacatgtagattaattttagatttgcatgtttgtaatagtgtcttatattatcatagtttatcttatcaaattttataaaatttttatataactacttaaattacatgtacatgtgtagaaaatacattcatgttaaacggcccagtcgatctcactttgaacaggcgaaagaaaagtccggaacagttcagttccgcgcgcgcgattccaccggcgaaacgggagctccacgtccgcgttctgttgcgcctcgcacgcccggttccaccgctcgcgccgcgcgctcggctcccgtctcgtccacatcccccgcgaccacgtacgctgccacgcccgcgcccatgcccacgcccacgcctgcggccgccgggccaccggttggttgtccgcctctagtttccaggtcgtccagaacctgggaaaatcaaccgaaaaaaactcaaaacaggcgaagtaatcgtttgaaaacgaaacgattttaggcagcgtcgcatgcaaagcatgccacaagaaacagggcataagtaggcgcctccatgcagcgccccatgaaaagcattccgattcctctgctcctcttcctgttccccccccccccctctcttctctccccccggccggggaagaaattttgcccccaaaataattttctgcacggacgatcaaagaaagggcaaaatttttctgcgcctccggttgaaggaagccgtgatccatgtcggtgagtgctcgtcctctgcagggtttgttagaggcgttgcatctacgtacgtgcaatttgatttggattctcggttctttctttcttgaccatatgcattgattgatcgatcgatgctgccatttggtatatctttgcattataccgtttattcctttgaatcaattgagtacctgatggcaattggatgtgtggagaaacgttcaggggttttccgattagctatacaaggtggtgatagacgatctgggttcgaagcctcagccctcctaattatttgatattaagtcctctcctaatatccatgtctttttattggatgtgtgacgaggaacttctcgcaaattggatcgacaggagcaacctagagagattgattacaagaatgaaactaaatctatagaaacgtagattgggactttttccctctgttctctaatcgggacgaaacagggcaaacggtacaatatgccctcacgctattgtgacccttaatttgtattgtcttcaactcttcatttttcaaacttgaccattccgatttgtcttctaaatagcccaattgatatgcgtgatacagaagcaatctgcaatagcacgctagcttactcgtatcatgcataatcacactgatcttgtcatatacatgggttggtttttttttttctcatcaaggacgagactggccgcaccattccaaagttcggcgcatgggacgtcaacaacccggcctctgccgacggtttcacggtgatcttcagcaaagccagggatgagaagaagggccccgtcaacgtggacgccagcaccaggtcaaactctgacatgaaagactccaataacaataaggcaacagagaagatcaacccctaccaccgcaggacaaactccgcatcagtatatatatacttcctttcttccatttccttccttagcatcacattattgatctcaatgaaaatgaaaaaaaaaagagatcatcatcagatctttggcttgttacatgtaagttactattgtttattgatctgtttttgcagaagaagtggttttgctgtgtgtcgcccagccccacccaaccttgaggaagcaaaggaataccaaatataacatgatgctgctactgccgccttgttaatgcatatagtaatgattatacacacccagttgaaaatggcccggtgttattctgtgatggttgctctgttgttgtgaggaggctggtcttgagctcctcaagcctgtctgtcagtgacaacagcgccatgtatgatttgttttccgccgggccaaccatgtacgagtgtatgactgttacatgagaaatttatgggtatatgatgattaaaaacgtcatgattttgtgtgtactcgttgacgtttgattgtaattatccattcgctcttgtcctttttcttatggttctgcagtgtgatccttcctcaacttcatcaactgtcaactagtaattctgaaactgtactgcccagtgcccaattcagacttctgatcctgctgtaacttcagtaaggttatacattggtacccacttttgttggaacctgcatgggaaaaaaatgtagggagaacctagaaactacctaaagagtaaaatgtataggtggtatcacaacttgtgaggtgggtgcagtttagtcactcaatcttacaaattgctcaaataagtcactcatcttacttcgatggtgcaaattttaccgaatatattgtcacatggattatttgtttttagattggaggtcgtattagttttaaaaaaacaattggaggttgtattgacctcacatcttacattttttttaggaaaaattggaaccatgccattataatttcgcaaaatttgagatatgccatcctgacccacgtgtcattcttttttttaagccatgtgggtagggcaagcattacaattacaaattagcactcatatttttcatgtatatactaatactcccgctttcaatgaacatggccatattatgcttgacaatcaataaaaaattcatctttaattggattttaatactggtagtattgtacgttggcttatttatggatcgtgtgaccatgtttacaaaacaaattaacatagcacataacttcattgcgaacatcccacacaacacatgttttgtatgatttgcatcctaaaacaagatgagtaacttgtttgagtattttacaagatgggtgactaaattgcacccatttcacaagttgaggtactagcggtgcattttactcctacctaaaatacacaaatacacgtctaagatttatccatgtcatcccggcaataaaaaatttactcgtggtgaattactcgggtgatgtgaataaatcttagatttctatttgtgtatcctaggtaattttcaggttttcattacacatggatacatattttcccggtctgcacagttttcagaatgtaacctcagaagagaacatctatgtgccacccctccacagtattgaagctcttttaagtttaatttcttcctgatatatagcattgtacatactgtacgtaatatcatttacatattgagagtatacagagtggcaacacaaagcaaatggaaactcgagcgacagaagctggcaagctgcccttgtccctgcggaggaagagcgcctcataaaccggagaattgatggctactatcagtacacacagaacagcctggagaaacaaagtttccaaaccccctgggctttcttgtaacaaaactctactaattcctaacaccatgcatgccaggttgagcagcgcaactgtcgtaaggattacaaacatcgccgagaaggatccgaattccatcatccccttcttgtacctctccaaggcctgcaagtcagtgaccttcactgtcaggttgaatccagactcagagatgcccaatattctgcggaatgtgtcgatggttgccaggaggtatgaggtgatccttctaatgagccacatcctctgtgcattccaccactccactgcactgtcaccacattgcagtgactctgctaagctgcaggagtatgcggccaccataacgtacgcaaagggtatgaaccaggggctagttttctgagttaattgcagatgtaaatcttgtgttaaactttaagccaagtgcgtacaaatgtctgaacaaacgttaaagcatatggaaacttacctcaggaaagagggagatgccattgaggaagcaaagagaaggaattgtgacatagtacaaggtggggaagctgttcacggcccagaagccgcagacagagtagcccatttgaagacccagcttgatcttcccatgacctaataagaaggggctgtaccgtgagagggatatttggaggaacccttctgtccatctcttgtacaggaccaggatctggcctagtgaggtgggtgtcatgcctaagaatccctttcttttggggttgtagtacactgatctccatccacggcattggatttgtaatcctgtagttacatcctccagtgggcacccatacctaacccccttctgcaattcagcaacttgaagtcagtagctgtaatcagtacaaaatgaacaaagttctgtaactatgcgaatgcccattgctggttgatggctatagaggataaaatccaacagtttacatgttcagggtatgaagtaagagactaacatacctcaattccccagatggtgttatgctcatatgtgcaagtcacaagtgacctgcccatttcttccaactcattagcatcttctgttctccctgctaccctagtccaatcttccttatattcttgactatagattcgtccacatagggcctctctccgatggaagcatccagtgccatagtaacacattccaccccaaccatccaagcaaggatgatccaactggtgatcaacggaatgaaatcacaaacaaagttaggtccaattgtgtaagtatgtccactgaaatttcaggagatgctatgctatcttactactgacctcgttgacaacattgattgggtggccatagatgtcattgtgcaccacattttcaaaattctgaggatactgtacaaaaccaatatcttggccttgctcttcatctaggaaaaaacacaatgcgtctctgatggactctgaattgtttgagtacatatcacaatcaacattcatgatgattggactgttgcttatcactgatgatacccttatctgcaaatattgaccataatttaaggaattctagaaacacgataaggttgactctaaattgttgcggtagaaaatcatggaccatagagtggctaaaagacccaccaaagcattcaaagatccagctttgaagtgatgctgtttctggggtttcttctcacgtgccatatatacaagtgttggcaatgcatttccatcaatatcaactgccttttgtttgttactatcgattaaaatctagccatggagaacactttgatcagcagaatccacaaatatgttgcagacaagaaaaacaaatttcatatcccattaaagtttcttgtgcatgtacattcttatatgttagcaattatgattagagccaacacaccagctttgttttaaaattttctaatcatctcattattctgaattttgaattcaattaaatgttcttcatctgttaacctggtcatcaccacataacttttacctgaactatagaagggtgatcactagaagtgaaattctcattccactgtgagaagcctctggaatggcatcgtggaacctcggggatcctacctgaatttactactgagttcacacgatctgtcatgtctttgtacagttcctgaaacacagaaaaaagaaagtaaaggtaataagtagacatgtaaatcactagtagtgcaccaaatggaagccagtaatagtgcacagactaaattgataacctgaaaacaacctctcgcgtcgctctcgcgcgggtggctcagggggcgaaaaaaccctagccgcccacgcctccactccctccccaccgcctcgccgccgccggagctcgccggcggcaaagccggcagcgagcagggaaggcggcggcgaggttcttcctcccggcgactccccccggcgtgacgtggacgggacgacgacgccggcgaagaccctccaccgcggccggaggtggcgatggcggcgcggtgtggggaggcagcagatccggcgcctccaaggccggatccgaccaccccacgcctggatctggcacaacggcggcgcgaggtggctgggggggcggcggcagcggcggcagggacggcgcggctggcccggtgcggcagcctgggcgcggtggcggtggctcgacggctgggatggcggctgcctagaggcggcggcggctgggagcggcggcggcagctcggcgcgcggccggtccgggcagcccgggctcgcgcggctcggcagtgcggcggcgagcccccatggcgcaggcaggcctcggcagccgggcagccagggtgacgccgcggtgccctcctcagccgggtgggctatgcggcgcggccagatggggtgcggcggccgggcgacgggggcgccggtgggttgcgccggagccggagcagcagaagcgtctctggcgtcggcgcaagcccagatggcagtgtaaagggagctggcggcggtgggtcgtcttctccgttgccggtcggcaccctcgcccttcctggagctcctccccttctctgtggggagtttctatgttggattgaggcggcagctcgtcaagcgggggaaactcaggctgccaaagcaatgccatccagtcccggttctccttttgtccaaagctggcgaggaggccggcgggtggtggaacggaggggtcctgggccagctctcaggggcggtggttgatgtcggctgacggaggggcgtcagtgcggtgtggttcgatgaagtcggtcgatggaggggcgtcagtgcggtgtggtggaagctacgtgttgccatttgtctgtgtagtggttctgagttggtggacggcgatctacagtcaaggttgtagggtcccaggcaaaagcctagtccggtaattcactgggccggcagcggctatgtcttcgggcgtcgtaacctccttggggcgttgtcaagggttaccctcttcctttctcgataagcttctctgggtgaaaaccacatcttttttagatgggcgatggcggcatcctggatgtcgtgaccaccgtggtggcttcgttttcggagtcttgtctctgtggtgttgccgtaggcctagcggcgttcggccattcttagcgggggtcatttggtgctaggcttcaccctcagcggtttgtgcttgggtggtagtgcgtgctgtgaggtcatgcaccttggtgcattgtgatgttttttttttcttgtaacttttactccttcttaatatatttggatggcctccttcggccttcccggcgaaaaaaaagtaatagtgcacaacagcaatttagttgaagatgaactacattacatcacaacagtttcaactctaccttcatggtaaaccactctttaggtccacacccatcaggaggggaagctactttagcaaagtaagcagctggtgatctgggttccaccttgtacttcttgcaaaatggaatccaatgctttgcaaactcggatgcctcgcatagaacgtagaatgttaaaaccgaaccagcatcatcagataagtagatgttcagcttctcaggcaggtagtcataagccatgacagacaaaacagtggagatgacaagcatcggtggctctgctgttggatccgctgtacagacaaaaatgtccacactgggaagctcgtcttcactgtagctgtttgcaatcaaaattctagcatcatagcatgtctttcaacaacaattctacatatcctttttgagcaaacgtaatcaatactacatatcttttttgagcaaaggataatcagtacatatccaatgaaagaacaaaccaagcaaggagaaggaattgcgacacagattaaccttgatagcagttgctggtactatcgagagccgggaggtacctttgagcgaggcggtctttgaaggtgcggcggtagacggggcaccaccgcacggacagcgtcaggacccagtagaagccgaaccagagctccgccgcgagcatcccgagccacgcccaccgccgcacgccgtcgccgccaccgggaggcaggtgagtggctctgtacagccatatcagaagaactcccgcgaagaccgtggccgcggacacccggtacgccgccatcgccatccgccccggtttctccgtcgcgaacagcgggggcccgcgctggcggccgccggagacgacgccgccgccgctccccgccatgctccctcctacctgcgaagtatggagcagatggcactgggacttcagaggagtgggtgagtgctactgctgactactgagtagcctagtagatggtcaacacaagcgaacgtccaaggcttgcacccacccgcggctgcgctgcaaagtttgacgtctagtagagcagcattactgttcatcaggagaagatgatgaaatggacgttgcaggcatggaagttggggtgaaaacagcagaaatagaagggatattatgctatagatatcgaggggaaacccctgaaacaaaatatacacgagatgactccactggtacattgttgcatggtgctatagtagatttaaaccaagatatggactgttcaatcgcaagttacaactagtgtcttctattgagctgtgaccacttctagtcttctagcatcagttgcttgtcggctgagattgtaatctgatttgtcaatttccttttcttcaacagtctgagcttcatcagcaacaaagacaacctgaaaggaagaagctgcagaatatagtgcccagtcagtaatatggtatccaacagctgaaagtggcttaacatgagatatattgagaattaccaagatactagagattaaacattgtcctcgaaatcttcagctaacattgaaaaacaaatccatccttttatttgaagagctttctgagcccattgaacaatgacagagctttaagttcaccacctctcatgtccctcagtctcctacgcaatatctgtaagaaaaaagagggttgtaacttgtaagaagttaagaataaccacatgatgaacacagagaagtaacaatatagcatgcattattgacttacatattgtgtacgatacaggattctccgttcactaatgcaaagatctcttgctagttgttttagcagtaacgtccggttggcttgctttgaattggttgaaagttgcagagacccactgctaccctgaaacattattgattggcgtacattagtttgttagcactcacaaaagtatccataggatcatcagagaactagtttgcataatgtactgtttaaatatcacgataaattaactagaagttctgcaagatcttccatggaaaggatctcacctctaggaactttgtgtattttgctatgttagactcacaacagtccaagataaactgaagagcttgttcctccagttcaggataattaagtccaggcttggatggacttttatttgatgcagcgacagccatctgaaaggataagctttgggagatcactcatatagaataagtgtaagctcaatttatcttcaacaaacccctagttttacctcagtcaacaagatcccgaaatatcggtgcaaaacagaaatgacaaacctcttcaaaacgttggctcatctcgggagggctgaccacaagaaaggcataagccatcaactcaactggccatcctgtgacgcgtaaagggaaactttcaaacctgtaagtaatgaatcagtgatcagatccacttatattgatagcaaaagtacgatttgatagtgacagagatgtgcactgtaagataatcgcaggggagttgaaacaacactgcatattctaatatttatgaaattttactcatttttttttcttctgcagaccacaccagttacacaactaaatactgttttcagacttcgttcttgatggcatgttcaaatggcgataagagagcaaacatgccacaaaatactccagcctaaggtctaatggatgttcattttagcaagatgatataaaggcacaacaacgcgacagttaagagaacattttctttcactcactatgagttgttagcacgcaaggatatgatcgcttactctgacaatccatttctttttagtgcttgtagcttctctttgtagcacttatcagacttattaagagacaccagcaattcaactgaatcatttgggtttgttccctcttttggaacaaaaccatatgaaagcaatagctcgccactggatttcttgccataggatataaacacctgaagaggatattttagaaacggataagtttaagagttaactgcatgaaataactacacctagacataacccacagaaaaatctcattaactccattttaaagaaaaggatggctgacagatccaaatgttccatgaatcacacttaagtacagtatgctatgtttgcacaaaacaaaatttataaaatggatgaactccagatgttttgggaacgcatcctaaaactagtgtcaagattcaagatgatttgcttactactccctctggtcacaaataagtaacgttttggaatgcgtccagtcaacatgttctctttaaatatttctttaatcgtcaccatcaatttctttaaatatcttgattcaacttttgaaagtgatatggttagattcatcttcaaaaaatagtttccaaatattataactttgatatatattttatgagttttatactagtaatttgtataaaacaactgtaatggtgactgtgttgctgtctagaatgacacttatttgtgaccggaggtagtaataggcagagataccaatctattggtagaaaacaaggatcctagtaagttgaattttttttgacgtaataatttttttttgacgtaaagtaagttgaatgaaacagtaaaaaaaattgctatcatattcacaaggttaagttaaaaatccccaatcttgaaacagcaatatagggctaaagcataaatgaaaagcgttacctgctcacctggttgatatgaacgatcggtagtgaaaactattccccctgaggatttatcataatccaagaatgtttccacctgaaaatttattttgcaaaaaacttatgaagtaatctctaacaataagaatgtcatgaagacctatgaaattgtacaagtaatgaaaactatgggagacagagtgcttaaggaattctgtgcactattcataatgattctttgttactaacatacaaatcgaacctcaggactatggttaagcatatctgcccaaggaactagtgcaacccttccatccattgatggcaatcgaacctgcaaatcattccaatgaacattcttgtttagcagaatgacatcaacagcaagcaatgcaaaagccttcaattttgtaacaaaacaggtaactggagaatacatggtggaagtaaaaaaaatgtttttactgcatttggtaagttcatagtactttagcttaccaggcgtgagaagaggatgccgaaggaccatctaaacgtctctaagttgtaaacctaaaatagtaaagttaagttatattagataaaccaaccaggttacactaaaaacacatgatattttagaagtaatatgtgatatctctcatgtgagtgaaccagtacatttcttagtgcgtagtatgtagaccactttcacatctttgtgttagtactgaaagctaaagaatgatataatccttagccttgttatatattttaacttgctgagacttaaaaagtagaatctaggtcggaaaggcctcttgtgtcattagtctcaacaaagaacatactaacttttgtgaaacatacctcctcagggaacaaatctgaatgcttagaaaatattctgtcacggagatcattgtatctgccaaaaccaacagagtaagattttacaattaaggctaaatgaccatcaggactacagcagaaagaaagaaaaaacatacgttccgaccacatcagtgatcctctgaattgcgcgttccctgatcggcgaagccaccaagtatgcatcaagctcaggcctagtcctgcaacaacaaataaaggctgtacaagattgagaatgcaatctccaagccccaccgaacttcccccatcaacaataatcgtcaggctataccagtacaacagagagtaaggctgccttggcaacgccgctatgtagctgctccacctcgacgaactctctaaactagcttcgcttataaggtaggtagcaataagcggccaatccggcacagaatttctcttcaacacattccccacctcagggcagccccattcctatacaagaagcacaacaaaaatcaccaaattgacagtaaattcatcacatgaagcacctgaaatccaccattaaagctatcaacgagcgggggtagtgactagtgagagggaggctagggctttcttactgagtcagctgtaatgacgagggagggaggcacgaagagcagcttctcccccttgcggatgttcttcagcgcgacgaggccgcgctcaccgacgtccacccgctgtatccccaacctctgctcggggagccccgaatcggtgagccacctctccagcgacacggcgctctccagggactcgatctcgcagccccacgggactcccgcggcggcggcctcccgctgcgccggcgccgacgccgacgccgacgcagccgaggcgcggacgggggatcggatgaggactcctgagggtaaggctagatgctgccggagacggcgaggcgagcgcggcggccggaactgcgtgtggagcgcgagcgccgcggcggtggccatggcggaaccgcgaaatggcggtgcggttgtgtgcgggcgcggggggcttatccgctttgccagtcgcgggcttggcttttttatgcgacacttttgtgggctggctgcaattattgggcctttttgtttattaggccgtgaggtagtactacacggaatgaaataagttcaatattactcccatagctagtggtggaatctgattcgtatcccaaaccataatatcgatatatcgacccccaactattaaaaccggtgcacatttgacttcctcgatgattttggaggatggtttcgctgatgtggcgactacgtggtggtgttgacttagtcttcgtcctacgtgatgccaccgctatgttgaccaagtctcggccagcttcacatctcccccgtctctccctactacaagctctcccggcgacggtagccggcggcggtgccatgtaggataaagaccaggtcaaacaccgtctcgtagttaccacgttagtgaaactgccatccaaaatcgttgagggagtcaaattacactgattttaatagttgagggtcgagatatccagtattgttcttcaaggatacgaattagatttggccaatagttaagggagtcaaagtgaacttattcgtccacggaatcttactgacaggtgtggcccactggactgacagtgtgacacgcgctcctagttgacatcaatcgccctcctcttgtgggccccgctctcgccaaaaagaaagcaacagaattcaaacgcaaaacgtcactgacaagtgggaccctatacgtgggatcactctttcccctctcgcaagaacatctcgagcaataaaaaccccgagagaaaaaaaaaagaatgctcgccattttccccaagctcccgaagcgatttccatttcaactgctcttcctcccttcgcagcacgcacgtcgccgtagccacatggccgacccttccagatcctcccccaccgcggccgccgccggcgacgccctcctggcggcggcggcggcgcccggtgacgcgccggacgcgaccgccctcgccgtggcggccgatgcggacgcggagttcgggttccagcgcgcggagctcgggacggagaagctggccggcacggtgcagttccacgagcgccacgtcttcctctgctacaaggggcccgaggtgtggccgtcccacgtcgaggccgcggagtctgaccgcctcccccgcctcctcgccgccgccatcaagacccacaagtcggacttgaagaagaaagtgagtgtttcttcaccccctcccccttttttgggggctgagataagctgattcggtgctttcatgtcgtattcttgattgtggtaggtgtttttttttacttagatcggtgtgtagtgggaactgcttggtggttttggcccaaccctaggattgtgctcgccaatagagttcgattagcttgaactatcatgtggagtagtgtgattttgcttgtcaggtggcagcatatgatgaggtgatatttcgtgtacgaggttttagcccttgctaacaaattggtcgatttgatgggtgttttgccagatggtttaattgttacctgcctgtgattgtaaattgagaagtagagcttgttgacgttgcagtgatccaaggtgcagtgctgttcataagctgatgtttcatgtcagtttatgctatatggtcctcgtgtcacttgttaccatttctattattgtgttttggttaacgatgtggttatcggtattctcctttaaggttagggctatttcagttggacatgtgaattgtgttttgggagtttggacattttcaggattttacttattctgtttgtgtatattgtggctgtgcttactaaaataaacggtgattcagtggtatcatatagtattgcagttacagagttaccgaaagtgcagcaaaatgcttttggctgttgttttgtcctaagagagtattcgcccctgtgttgccaggttatagaggaggcagtatttattgtttgttagaattgggggtatggcattactcagtattatcaaccaacctacagttgcttattacctggccttatgctagcttcattctcattagttatgaagaaaattctaggattggaagtatttctaattggtatttttcttgctaatgagtggtgtattcattcctcagaccaaattgaccatttgtgaaggagaagatggcactgagtcatccaatggagacgtgttgatctttccagatatgatcagatacaggtaagttctaatccccaaacaaaataaacatacaatctttcttcttgtgttagatattctgataaataagccagttgattatctctattcaatttgtcatgtaatgtttgcagagggctgacccactttgatgttgacaactttgttcaagaagtgcttgtgaaagatactgaatggcttcctggatctcctgaggctataaaaggttcctatgtttttgtttgctgccatgcaagcagggataagaggtgtggtgtctgtggacctgctttgattaagaggttcaaggaagagataggtgtacaaggccttgctgatcaggtgtcagtcagtgcatgctcacatgtgggaggccataagtatgcaggaaatgtcattgttttcagtgcagatgccaagggagaagtgactggtcattggtaagaacgaaagtgtaattaaatttgtatgcaccattgaacttaatgctctaatgtagctcctcattttaattatatgcactataactcagtgcttgcttacctaaattgcatttgtaggtatggttatgtttctcctgatgatgtgcctgtcttgctacataaacatattggacaaggagagatcgtggaccatctatggaggtaccctcttgtacttaaatcacaggctgatgtcaacaaggttgatattagttctaccaatcatttgtatcttgtgctgtgtggtgccatttaggactgtcaacatttcaatttacatctttctcttgctgttgttatcagcatgcatgtcacatgatatgcttatgcaaacgcacatcacagcatgtcagcatctatgactaatagtctaaacactgtacaaaatctgctttgttgttctagtttgatactttggttgtacgtcttgcagcatttatttttttatcttatataaaaaaatggttaacttcaagtgcccctcacaatcttcaaaattattattattttattatttaagggagatacgataccgtatcagaagtctccatttgaaattttcttgagcattataataaagtaggccaaaaccatgtgctacaagcatgtgtggagatgaactctgatgtagagttgactttgacttcatccagctgaattgttattcattcaggaatgcttatttttgtttgattccatcgccaaattattgtttattctgccttctagtttgttcaaattacccccttgttgatgtgagtttttttttctcaaatgagtatggttgaagcatcggtgcctatattatgtgtttgtcggctcacatcttgtctataaatatacgcaaggataaggatattttgctatatttgttgcatttacaaatctccctgtagatttaattgtggcaacctctgaaataaggaaataacttttatgtggttattcttttccgcctcaaagaatcacaattctcattctaatcattaacaaaaacttgtaatcttgctttccatatattatgcaaaacccaatatgtcaagtatgttcaagtgatccttctctttgtggttcttatatgtatcatcctattttgcaggggtcagatgggtttgtctgaagaagagcagaggaaagccctggagtctaaacacgtgacaaatggtgtgaccgaggatggtgcccatgaatcccctgaagaaactaccaacggttctgcttgcaaccctgtcgctgcaggtggttgctgccagggcaatggaggctttacctgctgccagagtgatctgccaaaggaggataagagcatcacagctgagcagaaccagaagagctccgagaagggggctgacaaagagtgtgctgctggcagcaagaagaggcacatgaagatgtgttccatgccaacctggtttgagacatgggaaacggctgacacctatgctgctcttggtattgttgcagctgctgcatcggtgttcgtcgctttcaggatctacaagaacctcaattgagaatcctcagaacagggctaggttttgtgcactaaggacagtctactgctgtaaaacagtctgctgtgagaataatatactacgtgtgcatagtaatgcaagattagaactttaaagtagctaatctgaagaaagtgaccaaagttgttttgggtaatgtcgtcctcatgtgaaactctgcttaatctccaagttttcccacgccttgcctatttgtttaccttcgcaaggcagtgaccctgctgttcgacatgacgatgttatctttattttgaactggaggtgttcttcagcatgtggatgcatgctattcagaaaatggtcagcttgtatttttgtcgctggttgctgctcctgttgttgaatgttttgagcactccatttatatggtaataaatatttcattttcaatttgccgtggaccccgtggtggctctgatcacaatattaagaggatctcaagtattctctacatggcaattctgttcttagccccctttgttctcgcagaaaggcaccggaggtggctgcggcgtctggagagtggagtggagactgacgctccggcaacacagcgtttcaggtccaaacataaccgcttcgtcaccactcaccagcacgcccgatgcaactacttcactgctgcttcttcctggtacgcctctacagcgcttgattttactggcaagatactgtgctaaataaggggattgggatcggagaaatattaggtccataaaagtaagaaaaaaatattaggacaaatctaagctggtgaagaagcagtgaagaaaaaaatacagtacattatttatcacaggctcatactataaagcatcaccgttccgatctcagaaatctcctctgtacagcaaatagctgtggacaacagaaaactagactgcacgtctgcacaggtagagatgagagagcacatgcccaatgcagtacatcgtttgctgaaatagtgaaatggatacgtgatcgattggtatctgtggtccgtccaagctaggatgtgtgtaagcagaaatggaggcggcaagcaattgctgctgcagatattgcagtcgcagatacatgtgctgaactgccagccattcttaaatgatggtggcaaacattcagagatatggtgtgcccacgatttaactttccatttgtgttgaagtgtgatcctcagcttaaatgttttggttacatatagtgcaagccgttgtaattctggcatgtggccatcaaggcatcaaatagttacagtagaatggccactggcctggttagcaatcacatggcatcatgaaccccctgcattggactgaactgggataataatggctcacatgcaactttggcatactgcttggccagaagattagggctgcaggaat

SEQ ID NO: 27243 - DNA, 742 bp, Oryza sativa
atcaaatctcttgctgagaagctgacaattgggtactccgggaagcgcaatggctgaccaatgacattgaacagtgttgccctgttgccagagcccttgaatggtgtctttccaaacagaagttcatacaagaatatcccgaaggtccaccaatcgacagcgctaccatggccctcgcctttgatgatctctggggccaagtactcatgtgttccaacaaatgacattgaacgagcatcgctgggctccgctatgagctccggccaagggctgatctgggtcgcaatttcaggcttcggtttgcgatctttcttggatttggagaagaatcgagggccaaagcaggttgtaggggctgcacatgatggctgaatcacgcaggatggctcgacgcatgctggctggacacagtaaccttggctgttcttcctgagtgcttcagcgtccgggttggatgattttattagtgttggactcaccgcgcaacggagtgagaggtcaaagtcagatagcatgatgtgcccatcctcccgaacgaggacgttttctggcttgagatcacggtatatgatgccgagcatgtgcaggtactctaatgccaagaggatttctgctacatagaatctgtaatatgacagcaatgcagcattttattagtaaggctcctaagacagtagaaggcaaaaggtcataaattatagtaagctagacttgccatttgtcactactgatttcacatgaa

SEQ ID NO: 27244 - DNA, 5337 bp, Oryza sativa
  unsure (1)..(5337): unsure at all n locations
taattataagtagctgataattccacattcaaggtctctcaggttgttatgatgctcaaatgtactctctctggtttttaatgtttgacgctattgacttttaaacacatgtttgatattttttcttgttcaaaagaaatatagaattatcatttattttgttgttatttgttacctcataactatggcttttttgtatatatgtatagtttttaaaataagacaagtggtaaaggtatgtttaaatgccaacaatgtcagccattaaaaactgaagggagaaacgtcctggggttttccggctagcttcacaaggtggtgggttagacgacctgngttcgaagcctcacccctcctaattatttgatattaggtccttccctaatacttgtgtttttcattaaaaaactgaatgagtaacanttttcagcttgggtggagacagaggattagcacaccacatcatgtcaactatcaagaagtcctatttatcatgtaccatactattggttcctgaaaacagttggcccatcttcacttttcagtcatggctggcacaatcactccatttctgcaataaaatgcagcttggagatcacttctaactaacttgctcttgatcgttgcagcgcaacatcagctctgtcacacgttgtgctggggcaattcaagaccatagtcataatgctctcaggttacctgatcttcagctcggatcctggaatcaccagcatctgcggagccatcgtcgctctcggtggcatgtccgtctacacctatctgggtctgaaagagtcgacgacaaccgggaagaaaccgcctttagcacagaagcccaaagctgctggggatggtgagaagcctggtttggagcatgaggattctgtatgagctgacgaggattattcatcctggttggtcgattgtactataagcatacttaggtgattctccaagagttgtacgccattgctgagtccattgtacatagaaacacttcatgattttacccttttacagttcttaaaaagttcaaaaacattgcctcacaattctcttcgtttcttttttcttgctgataagttccacagttgatgtcacgtaagatgaagaacatgtcagcatgtcacataggataggaaccacgtaggaggaaaccacgctctaaaccattcgggaaggtaaattggtccggttttaataattgacggagcatctatacccggttttgtagttcatgaacatgaattggactcggcctgcagattgagggagaatatatgaaccttttgccatattgtttttctaagttgaaacgggggacgcgtgcgaaactggcccattatttctttggatcaatatactcaagttttgggccggcctggcccatctagcaagcgaggtagttatagctctctcgccgagggcccgaggcccagcattaaaacgagcggctctttcccctctccgccctctctctctctctctctctctctctcccatggcgaagaagggcgcgccgcgcaggcagccgccgccgccgccgcctcggcaactggccgcggggaagaaggggaaggcctccccgaaggcggcgaagagggcggcgcccaagaagcagaggctgctcgagtcgtcctccgacgactccgagctggagcagcagcaggggcagcttcaggaggtggagtccgggtcagacctcgacgtcccctctgattccggcgccgaggagctctccgactcggacgacgcctcctttgagggaggagacagcggcgacgaggaggaggaggaagacgatgaggatggcgacgacgaccccctcgctgacgacttcctcgccggcagtgacgacgaaagtggtaatgcacggattactattgaatcgaattagctttaacaacgtgcttttcagccttttccccatcaagtcattcgattgtagcattcacgcgagctagtattgtaataatcgataatgggaatgcaatgctgtattgtacatctaggggaatatctattgatgattgtattgtgttttgtagacggaggagacgactctggtgtggactcagatgagtctgatgacttagaggcgaagtcgcgagcgattgatgaagagaaagagaaggcagaagaagaggctgaggaggagctcaagctcaatattagatcagaatctgatgagttccgattgcccacaaaggaggttgatttttccaccttcttttatgtcttcagttttacgtgccgctgaaggtccgcaagtgatgtgcacatatatcatagtttgtatgctctgcaggagttggaggaagaggcacttcgaccaccaaacctgccgaatcttaaaaggaggatatcagaaagtgtgttcatatatatattttgcattaccaagtttatgaattttttagatgaatcagagaaaactcaattgagatttggcataatattagtgagctaacaagatgtagctgttctcttgtgtaaactccaaggcacttcgaccaccaaacctgccgaatcttaaaaggaggatatcagaaagtgtgttcatatatatattttgcattatcaagtttatgaattttttagatgaatcagagaaaactcaattgagatttggcataatattagtgagctaacaagatgtagctgttctcttgtgtaaactccaagggcaaatttaagctttataactatggtcattttgcattgtgatagaagcattgaatatttccctttctgacttttctttctgcccattggtcttcccctctagttgtccgggtactctcaaactttagtaagctgaggcaaaaagatgtgccgcgaaaggattatgtcaatcagctgaagacagatataatgtcatactatggatacaatgattttctcgttgaagcatttattgaggtgagcttggtgccgtttgtttctttccattgagctgtgcgtttccccaactgcatcaggttataattagaaattattgtctgacatgcttattaaaatatgatcatggtttacctgctatgagttaacagtatacatatttttactgcgcagatgttcccagctgtggagcttgttgaactactggaatcttttgagaaaagaccgcctgaatgcttacgaacaaatacattgaaggtaactatttcagatctcctgatatgtatgtatgtggtgccatggaatacatgattctttatatgtgcttcagtcttttctttgcgttcttcatcgtccttacctgctttgttcatgatgttggcagacccggagaagggatcttgctgctgctcttataccaagaggatttaatctggatccgatagggaagtggtcaaaggtatgctttgttcgatcttctcctttactcaagtaatatatccaacatcccaaagcaactctcctggtataaatggcaggtaggccttgttgtatacgactccaccatttcagctggtgccactgttgaatatatggctgggcattacatggtaccttcttctccgatatcattgtgtgtagattatttcatttgctctccttccactaatgttggtattaaaaaatgtgactacagaaacaaggtgcaagttctttcttacctgtgatggctcttgctcctcaggagaaagagcgaattgttgatatggcgtaagatgttttcctttgtctcatacacttttggcaattgttcactatcatgacttctaagttattatgtgatccttttttttcaatgaacatgtaattgtaatatgccatgtatgtaatctagtcatgctgtcttgatataccactttgcttctgaatttgatgatacattcaactgaattaattaccttgaattcatggaattcatgtcctcgtttctgatcaggaactcattcttttcttgtttccagggctgccccaggtggcaagactacatatattggagctcttatgaagaatactggtcagtatgctgcctgtttttaaatacattttgttcctccattggagtaattttgttttgtgtggtttcttgccaattgaaatgcaaatatactgttttattcatttgtcatgcacaggaataatttatgcaaatgagttcaatgagaaaaggctgcatggacttttgggcaacatacatcgcatgggtgttaccaataccatagtttgtaattatgatggtaaagaggtgagcaaacagtacaaatattgttaacgtgctatctgatagccgaaacacaatcaactaattttatgcattaagaaagaatcttgatttgtggtatttgtcaagtacttagtataatgtaactacagtatattgttttgtacaaaacgataacagaatgaaaacacattataagtattgttacataatctctgaccaataatttttggtccattttaatcatggagaagataaatgtcaagtcctaataatttttggttgcttgaattgggtgcagcattttctcattgaaaacctattttgtgataacattctgtttatttcagctacctaaagttcttgggatgaattcggttgacagagttcttttggatgcaccctgcacaggcacaggggtaagcatcatatagttcgtataagctcctactcctgtcatattttctcatttatttaaacagatgcttactttttctgcagaccatttggaaggatccacaaattaaaacgtcgaagggcattgaggacatcagagactgtgcttttgtacaaaaggtgcatttcttgtatttctaggtcttgtttaaattgaacctacttaccatttggcatattcccacctaacaattctaaatgcaattcttcttatgttatcgaggaaaagaactgcattccactcacattattccaattttgattcttaaccaagtcacttgcttaaaacattattggttcgtcctcgtgttgagtttgttttttgggggtcatttctaagcaatttatattgtgcagttgtgctgattcttacatggaaataacatataaccccagaattgctatgttctgtttgctcatttttatggattatgtttacttaatctgtatttgctaagctatgtgattgtgttcaatcataatttggtcttttaagctacacaatttttgtttggtcagttttttctaaatcgagctgttattctatactggttgagtacctcaatcaccttgaaattggtatgtataccactatttactgtctaactgatgagttgttttacagcaattgctattagctgctattgatttggttgatgccaactccaaaactggaggttacattgttgggctgcaggaat

SEQ ID NO: 27245 - DNA, 12499 bp, Oryza sativa
ccgtttatcctacagattcatccggttccgagagcatcgattccatacttctttagataaaacaaggagattttatccccatgtaaacaacatggatggtttttttgttgcgaaggtaacaccaatgctaaacttcatggtgaaatatctaatctattaaataggttgtttgatcaggtgcttatttcattattaggatgtgctgaatgtattgaactctattatgaaaagtttaattttctttgcttagtttggacataccatctgattagggtacttcctttgacgcagcttaaaaaattgagcaatacgatcccagtggcatctgagtcatctaatgtgcctgaagaagcaattgagaaggctgatcctagcagtgacgatcctcaaaaacagcccattcagtcaaaaaaacataaagatgtgaagacgacgaatgaagagacaagcatccttgatggggtgactaaggacaaaaggcagacacatgagacactcaagaaccacaagaagggtaagaaacgcaatggccctgagagtactaaaataaagggagaccagaaagaaacacacaacgaagaagagcctacaagtgaaaaaaagcagcctgtgtctgttaaaataaaaaaatctgttcccaagagaatatcaggtaacaaaggaaagaagctggatacgggcaaaggagagaagaggaaaagaaactggatggtgaggcgagactggtgagatagtacaatgatgttgtgccttttcatgccttggaattgttgttttcgttgctttattctgatttggtgtaatgatcttctaacagggaagcttataagaagtcgaggagtaaacaagtatgaaaggcacggatgaaggagctctagccgtagacaaattgcagttaaatttgaaaacccacatacggggaagatgttagaaggagcgagaatacacaattttggcgttggttcaagttcgaggcgaaggaaaatttttgttgtacttaagtctagtgaagtgatcgtctgtagttttaccctttcttttccgtcttggtttaatgtaccaatactaaggcacttctcggacatgagttatgggagtatgtgattgacttcgtcatgttgcctggtaagtactatgctggccgatggaacagtatgatgttctgcttgctaagggcgacgtgtggttgtgctcagggttaggggcggaaatcgtgctggctccgctttttattgagctttctttgaaattaatttaccttcatatttaaatataagctattcctctgaaaaatatataatcctgtggtctttgtgtgtaactctgatattgtttttctattaaaatacaacgataatatctaacataattatactaatcgtatgaaaagtatttagaaagaaaaatctacccaaatcgttcaaaatcgaataatttttatcttataagaaaccaagccagttaaacgactaattaaacgagtgggtttatcgctgcttcatatagttatattccttatgtggtggatgcaaccatggctgaagcagcagctttaagagatggattattattggcacaacaaatcggtcgtagtcgtgtggaattccaatcggattgcatggaagtcgtcacaacaatgcaagagggaggtttttctgccacggcagcagttgcgatttatgatgaatgctcccagtattggaaagattttctttctatctccattagtcattgtattagagatagtaatgtcgtggctcatgagctagctaggcaagctttgataggcaaaaattcttttgtttggatagatgatccccctgatttcattcggcaacttcttcttaacgatgtaactattttctcgaatgtaaagctagctgtgagaatttaaaaaaaaaacgagtccaagcagattagcgttcgaatactcgaattgataggttcatgacgttgcgggggttcaggaaaatgaactccgaccagggatggatccagaaaaggctcagggcctggttagatcccactctaaaattttttactctgtcacattgaacgtttgaacatatgtataaagtattaaatataggctaaaaaataactaattgcatagattgcgactaatttacaagacgaatcttttaagcctaattgcttcatgattttacaatgtggtgctacagtaaacatttgctaatgacgaattaattaggtttaataaatatgtaattagttttttttattagtgtcgaacaccccatgcgacaccctatataatactccctctctacttttgataatcatatttctaaatctaaaaaaaatatttttataggtatatttcaatccaacaatctatcctcttgaaagattgactacatggacatcgagaaatgtaaatattaatgaatcgcttatttatgaggaatgattagtaacatgtttaaatggatgataagtagaattactaatccttggtctgtgtggcaatatgaaatatgactatcaaaagtagatggagggagtacccgatatgacacgctaaaactttacacccctcatctaaacacctcctctgttcgatgcccagctatagcccaattatttatttatttatttattgcggagagaaatattcaattttgatggatcattgcagtaatagccatgaaaccaagcattaaacatgggatctttagcggaagataacattaacacgaaaataccaaagaacaacctcacacaaaaccactatttattattccatttacgagaacttacatgactgtaactcagtaacactttgataactaatcacatccttaacctgctacttagggcaatatattcatcctaataaagtaactcctgatactaactaagacgaccgtggctgtggtgaagcatcagatataccaaggcgacacacctgccaaaacacaaaaataaaaaaaggtgttagatccggatcactttttttttaaaaaaaaacagattgttcaaaattcagagaattccaaacatgaatttacctgaagatctatggcgacacggaggggctagcaggcgctggagcggcaggagacctcggaggcaccaatggcggcaccgatggagctgtcaaacacaacaacaacagattagattaatcccttcatcaaacagacaatgcgcattaaaaataaataaacatgatttgtgctagggtttaatgaggtgtaattaatcgaattttaacttacaggagcacatgaacagcgtctgcagtggtggcatggcgccgcaggtgatcgggaggagcatcatcttcatcgggtcgacgggcgtggggaggaagctgttgagatcgccgttcatgccgtggcagaggcagatgggcgcggtgctcacgagcgacctgaagccgtcgcagcaggtggccggcggcgtcggcacggcggtgttcgtcaggtagtccgcgcacggcatcacggacatcagcggcgtcatgcactcctttggctgcggctgcgccggcgagctaggttgcgggagcgggaacggcagagggaacgggagacccgacccggacgacggaggagcgccagcggccggcgagccatgcgccgggagcgggagcggggacggcattgggaacgggaaacccgacgacccagacgacggcggagcgccagcggccggcgagccaggcgcagggagcgggagcgggaacggcaacgggaacgggaagccgccggacccagccgacggcggagcgccgccggcgccggccggcgagccagggatcgggaacatcaggaacgggaacagcgggaacggcaagccgggtagtaatcccggcaatgtcgtcggcggtcgctgcgctcctccgctcaccgacgttttctccacggcaatggccggctcgaacccttggaccctcgcttccgcggccggcgccagcgtcgccgccacgacggcgaaggcgaagaagagggcggcggcgagcttggacgacggcgccatctctctcgtcgggatcggtggctttgggtggaggtggagaggtggctgatttgctgtgaagagctacgtgggatcgctcgcaatatatagtgcattttcagttagagatttggggtttgaaactttgaatattcatgtaatgacattggactctggattaattttcgtacgtaattaagcaggtaaacatatatccagcgaactcacgagttcaaaatatgtttgatgcttttgtaaaaaaaataaaatctctgctctcgtttgcctgtagggctgtaagagatgatacagcgtacttgcacttgcaaattgcaatgcggatataatgtcaggtacgtgaaattcttcacatttttcagataaaagtagccagattttaaatgtttcccgttgtttttcatccctaagaggagaagactaccattgttaccttacatgcatggtgaagttggagctaatacttctgtttgtaataatgagaattcaggactttacactgaagaattaactagtccaactagtatgaggttctggctctggttttgctcttcctcgaagagataatacagcccctaaaaagttctgaattttctgacgatattgagagcatagaactcttcagttttcagataaatcgcagagtctagttagtggagtatgacgttttgtctctgatttcgcttgcgtcaaagagataacataactcgtaatagaaattatgaatctctgatgatattgagaacatataactcttcattttcagataaagtagagagtattatcaatttcttaattccataaggtagaagtacgccattgttgcgacacatacatgatagtcgagagttatgtaggagtactaatcagagctatgctgaagacatgacactctgcagtcctgaataaattcaaattgcgtcttgtcataatatccagtttcttactccctccgtcccaaagtaagcgcagccgtgggaatccgtgttcaacgtttaaccgtccgtcttatttgaaaattttatgagaaaattaaagtaagttagtcacacgtaaagtactatttatgttttatcatctaataacaataaaaatattaatcgtagaaaaatttcaaataaaacgaatggtcaaacgtgagacatgaacagtgcaaaactgcacttatttagggacgaaggtagtagatggggtctttgattcttactagtaatttctattttctggatcacaaattcaaaacgactagatacgggccattattgggccgtccctgcgtaacaggcctaagctgagcccaattccacggccttttcgggagtttcttgatagaacgggcaggaaggggcggagttttcttctccgaacccctccctctccacgcacacctcgccggagcagcacagccgccgcatccttgccattccctgcttcggtccaacaccatggcactcacgaacgacagagaaaagctatgtagagcgtcaacttggcaaagttctagggcgaagtagaaaaatgcctctgatcttgttagggaagatattttgttcttttcgaaaagagggtgctgccgtagaatttcatggtcccattgttttatgcagctagcacagagttatggtttcgagaattgcactcaataattcagatgtggctaatgttagttatttcagcactgtcttggttacattgacaatgtgatctgactgactacatgtttttagcggatacacagttaaaaacgttagctttggaaggccatcagagaccccaggagggtcggaattcggatctccgacccgtattttccttctccgctgccatggcagtccttgcttgctctccctttacagctttctttcctcatagtggactccggactccatgccaccgccatcgctgccgcctgccgcacgcaccaatatgcatgtgtgctgatgtgtgcaaggagaccgtgataattgtcggctcatctgatccgtatactccgaatcgaacggccaacggggtttggagttttaatcctcgaaccccctcgggcttagcacgactggagaaagtgtgtgattggttaaaaagagaaagtaggtgaaaaataagggttgtgattggttgagagtaggaggtagagaaatagcttcattttaggacaaggtgctgtactagaaatacctacattttataatggaggaagtagtagacagaccaggccacatcctcctcttctttcggtctttcatacctgcgtcagaaaactgaacagttggccctgaaagttcagttaggcccaggaggtaatccgcgaattctcttcagatttcagcgccggcgcccggcgggcgtggcgtgcacgacgaggagcggccgcgtccatgtctcagcctcgtcgacaccgcatgggtcggcggctcggcgccgccgcgcgagcgccacggcacggcacggcacgagtccgtaacacgacgcgatccgcgcgcggccgtccgctgccgtccgcattttgcagatggagagggacgtgtacgtccgatccacgcgcgcgcgctagcttaatttcaacaggtcggcgcgcgccgcgcaacggatcgacgccgcgtccccgtccgtctctcccttcccatctcctgctgcagcacgcctgcaccgcccgcacgccatcgtcgtctccgcgaaggcgattatcgttggaaaccgggaacagcgcaatggtgtgtttgtttttgttgtctatcgtctctcgtggagtcgtggtcgtgctatgcagaaggagcatctttctcccacgcatatgaccactagtggagaaaccctttgtagtcccggttcgtaacccccctttagttccggtttccaaaccgggagtaccaatctgggactaaagatcgctatctttagtcccgggtgaaataaccgggagtaaagatcgatctttagtcccggttggtaacaccaaccggttgagccatctttagtccgggttggtgttaccaaccgggactaaagatagagctgacctttttttttttgcatgcccctgttgctgcatggtttatatatatatatatatatatatatatatatatatatatatatatatatatatatatataaaccatgcatatatatgtttcaatacatatatatgcatacatatatatatgtatttatacatatatatgttatgcaaatgcatatgtatatagatatatatatatgaacaaaatatatttacattatagaaaatgtgtacacatgcatatagaaacatatgtagtcatgtattaattacaatccattatatatcctagctagctacgatttcgacgtagtagtactcgctgctagctcagaagctaaggaccggtgaattgtgtttccgtcgtagtagaattcacccttgggatcaaggatttcttcgttgatgaatcccatgagttgttcttgaaccgccgcgataaattccttgtgtgtggtcaggttatccctcatgcgaataaactatatgaatgtatgaaattgattagtaattaaacaagaaatcgctacgtaatgaaattttgaatttatttgtacgtacatcgagctctcttgtggtgatgatttggtctgcaaggcagtggcaatactcgcacacgtaatagccgcacaagttagttccctgcttttgctttgcgcactacaaataaatgacaaacaacgagagatctaattaatatacacttgtatgtatttgaatcggagaaatataaatgtagagcatgtgtactcacaggaaatttgaacttccgcctaagtctttctctccatttgccgcggaccaaatgacggaaccgataccaagccctacatggagtttaaagctatgattcgtagtagcaattaacataacaagattttcttaattaacaaaggaacttatgacggtacctgtctataagttcgaaaaccttgtcaaacgtagactcttttttatccattgagtcatatacgttgacggtgcaggcctccaggtcgatgagtaaaagcacccagtggaatctgcaatgtgcgtgggatgcattacatatgaaacacttagcaagttcgtacgggaatgaaatttggtatgtaggaagacagtaaaattaaactaactctgtgttgtatggcaacagtatgaacgtcttgtaatgctgcgccttcaggagatggacgagattgtcctctgtttcttgtggatattggtcgagcattgcgacgtttactttccgagggtcgatgaatccagtatcgaaaaccctccgccgtcgggccctttgaatctccattctacaacgataaaagggagtatattattttctatggtctacttatatacaaggacctaattaattaaaggagacgtatagtaagaaatctaactgaacgatatacttacaaaatccagcaactcataatagagacgtcgagggcgtccagctggtatagttcgtagattcccctgaaattgatccagagaatgtcatctccttgcaagaagtccgtgtccctgatcctcgctccgatcatctctctaccggtggcgctcatctccatgtacagctgatggaacttgtacatttgtgtgggtagggactgcagcagctttaccgagttcgtacatgtatttcacttccgccttttcgattggtgcgactcctagcaattgatccgtagttagaccggtgtcagtaataattgttctatcgtcatttctttaccggtcaccaacggctcgatctcctggtttggttgctctccaagctgagggactggtttggactttccagaagatgctttcttcagcgttcgctcatagtccgatagcttgatggcctccttgacagatgcaaacatacccctgaagaagttcctgacactggggtctataggaatcttcttttctggacttcgaggcttgaattgtctcttgacttctgatgcaacgtaagcgtcaagctcctcttgcgtgcaatcgtaccccgggtccttgttcttggcggcgtcaactttcgccttctttgttgcccttatgtgggcaagcggtggagctggggggcccttgactttgaaggtgccggaagaggagcttgcgggggagtaggtgtaggagcacgaggaggagtcggtgcaggatcctgaggagtcgatgctggagcctgaggtggagacggtgctggcggagcatgaggaggagacggtgcaggatcctgaggaggagatggcggagccggaggagatggtgcacgagacgccgcttgtcgcccagggaggatgatgtaccgcctgcgccatagaataatggcatggcatgtgtctcgtagatgcgtctcaccgtctcctccagggtaatccagctcgaggttctcgtacgcgccttcgaccaactcaacttcgaccttggagtatcctgctggaatcggcctgcagtggtaagtacctgaagggtccgttgggatggccatgcccgacgccaccttcatgttgtgagagattatttattagtaatcaacatatataagcagcaactagcggaatggctaaatcttacctttattgataagttcttcaaaggaatatgcaactcacatggtgtccgctgagtgatgtcatcaacgggacaggtcgattcgtcctgtgtttgcatggcgtccatgctctgtgatcctacctgccccgttgaggcgcagctgctacggtttcctgacgggctcaccattgcaggaggaatggtcggctggggatcatgggaccgatgtgcggccatgcgttcatcaaccttccttgccacctcctcttgcatgttgagttcgtagctcgatacccggaactctaggtctgcaatcttcgcctcggtatctctcttgctcctcatccgactcctgtacgtgtggatgtcctccttgaaaccaatcttccaaggaatcacccctttccctcgagttcgtcctggatgctctggagtctgcagggcgagtgtcagctcgtccctatctctgtctggtcggaacgtgccctgagaggaggcttccactgcatctgttagtcgtcgcgcagcctcttgtatctgatagccgaagaccagtgagccatcagctgggttgagcgttccaccgtgagcatagtaccagaacttcgatcgttccggccaattggctgttgccggttcaatacccctctcaatcaagctagcctccatctgctcccacttcggcatcgcgacgctatagcctcctgaccccaagtggtgatggtacttcttcttggcggcattttctttgtttctttccatcatcgccttcccttgttcacctgtcttatatgcaacgaactcgtcccagtgatcccttagctttgggaatgtgtcgaagttcggtgtctgccccttcagtatatacttctggtacagatctcccttgaagctctgaaactgttctgccattttcttcagagtccaccttttcactttgtcctctgtacccgcaggaagggtgaatgtctcgagcattgtggtccacagcatctctttctccgaatctgggacaaagctctcatgatctccgcgtgcccttgttcttcgccagtacaccgtactgacaggcacgttatcccgcacaacccaaccgctgtgacgtacatagttcttggcggcttcggccggggcactaggacgtccatcttcttccacttccgttatgatgtgccgaccctcaagcttcttcgctgcacctcgttgcccgcgtgccctcttctgtccaacggagggttgactaccactagcctcctcctcctggttcccctccacatccctttccacgtgcccctgctggttcccctccgcatccctctccacgttcccttcctcgttcaagtactggtttggatcctcgttcccctcttcttcattccagtactggctgcttccctccgcgattgtatcgtacaatatctgttcctcatcgcggtcagccatctgttgatacaagaaacatctgctaagtcacgagacatttatgttttaacaatctaagtcatgtatgctaagtgtaaatgtcgtacattagaaccctacacaaccttacgtgctaagtctaattacaaatcgtgatataagctaagtctaggtgacgtatattatacaaccctagctagtaaataattatatactaagtctaattacaaataaaataatcttatattaaaactcaaataatattacatgctaatactaaaatagtcatgtatatgctaagtgtttcgtgcgtatatgctaagtctaattaagactacaatagtcaattgctacttgtcgcaccaattccgtagtcaataattacataccaagtctaattacaaataaagtaatattatattaaaactcaaataatattacatgctaagactaaaatagtaatgtatgctaagtgtttcgtgcgtatatgctaagtctaattaagactacaatagtcaattcctaggagtcgcaccaattccgtagtcaataatgtcatactaagtctaatttgcaataaaataatcttatattaaaactcaaataatattagaacactacacaatcttatatgataagtctaattacaggtctaataatcttaattaattgcattacaaatataacaatcatttatattattacgtcacttgcctgctccaattccttctagggctagctcttccactcaggcttgacggacgactccgacaacacgtcttttctgcaagataaaaaaaatgtattaggataaatgcaaagtaacatatatatatatatatatatatatatatatatatatacatatatatatatatatatacatgtatatatatatacatgtatatatatatacatgtatatatatatacatgtatatatatatacatgtatatatatatacatgtatatatatacatgtatatatatatatatgtatatatatatatatatatattgcatttcacgttaacgttcgtcctcgttcgttcgctcgttcacgttccctagctcgttcacgttcgttcgatcgttctcgttctcgttcacgttgtcgcggcaacgtacgttgacgtgttcgttctcgctctcgttcgttcgatcgttctcgttctcgttcgttaatggcggtgtggcggcatcggggaggcggttggcgcggcggcgtggcgacggcggcggcgaaggcggcggcggcgtggcgttggcatgcggcggcggcgttgcgcggcgtcgaaggcggcggcgtcgaaggcgacggagagagatcaagatcggagagatcgagatgcatgaagggagatgcggcggctctcaccccagagatgcggcggcagcagaggaggcggaggcggcggcgaggacgacgagctcgagacgacggcgagatacggcggcgtcggcgcggggatttgccctaggcagtggcggcgaaggagagaggccgagagagatcgatcggcc

SEQ ID NO: 27246 - DNA, 1518 bp, Oryza sativa
ttcttctccccaaccgggagtaaatatcttttcccgctatttcgaaattctttttaaacccggttagggttaagaaccgggactaaagattatagcactgcatatgattttcgcttacatatgtgtttataaaatagaagttaatgcattaacattatttaaagtacaaagattgatgacaattacttcgaaaaattatttttgtctgtaataaattaagtggataaatcgtaataagcaaatatatgacttataattaataaaaattccaatatatatatattcttagcatatatatgaatgatattattatattggtaaaaactctaattaagatattaatgtacatactgcatgatttaaaattaataaaaattgtaatcatcatatgtacttagcgtaggaattatattaaattaaatgctaaaaactctaattaacatatgtaaatgccacatgcatgatttaaaccttttaaaaatttgaatagtcatatataagtagcatatgaaagatagtaaattaaattgtgaaaaactctaatatatgaatgatagttttaaaaatatattaaatttaatacttttaaaaattctccagtcaattataattagcatatgaatgatagtaaattaaatgttaaaaactctaattaacatatgaaattgccacttgcgtgatttaaaacttttaaaaatcctctagtcaattataattagcatatgaatgctagtaaattaaatgttaaaaactctaattaacatacatatgaaattgccacctgtgtgatttaaaacttttaaaaattgtaagtatcacatataactaacatatacatgatttaaacttgttgaaacctctaataatcgtgcgtaattaacatatgccatacatcaattgatttatatggataatcaatacatccaaaatagtttacatcgtgtacacaataattacggcattacatcagcggtgacggttgaccgcacgtactttctcctcactattgttccctccttgtgatcgctgcgtgagtaaggggtgtcttcatttgataggaggatgctagggtcaatcgtcaccgtgaaagggggttgcccatccaactgatcgtaatcctcgtcagtcttgtcctcaactccgacgatttttcttttgcctgggagaaccacttgacgcttaggctcatcaggccctctgcccttctttcctttgctagacatgtccttcacgaaaaagacttgcgttacatcattggcaaggacaaaaggttcgtccgagtatccaaccttgttaaggtcaacagttgtcatcccactgtcatcaatcattacgcctccaccagtcaacctaacccattggcaccggaacagaggaaccttgagaggaccatagtcaagttcccatatgtcctcgatggcaccgtaatacgtggcagttgttccatcgtgtcccatggcatcgacacgaacaacgctgttttggttcgtgctcttcatgtcttgggctctcgtgtag

SEQ ID NO: 27247 - DNA, 1036 bp, Oryza sativa
aaatcgtttgccgattcggggtgccgaaggagttcatcactgacaatggcaaggagtttgactctgaaaaattcaaagaaatgtgcgagggactaaaatttgcaaatcaagttcgcctcggtcgcgcacccacagtcgaatggggcggccgagcgagcaaatggaaaaatcctcgaggcactaaagaagagacttgagggggcggcaaagggtaaatggccagacgagatgttatccattctttgggcccttcaaatgacccccacaaggccaactaagttccgccctttcatgctcctttacggagatgaggcgatgacgccggcagaactaggggctaactcaccaagggtgatgttttccggcggcgaaaatggacgtgaagtgtcactcgaactcttggaagaggtgagggtcgaagcactagaacacatgcgcaagtacgcggaaggcacttcggcaacttataacaggaaggtttgaccgacagagctcagcccggccatctcgtactaaggaagaaggcaaaacctgtggcggtcgagaaactagaatctaagtttgaaggagcatatttgatcaaacacagatcttgaacaggttcttttcggctggcaacattggagggcgaagagttcgaccattcctggaacgctgcttcccttagacgattctaagtgtaatatgagtggaacccaatttgccaattgtaaatatgtatatattatataagccgttcggcacaaaaagcaaaaaaaagagaggaaaatgaaaaaagaaaaaaaaaactagacgtagggttattatccaccagtataaaatctgtgtcttccatttttctttttgtgaatgatgtcttcgtggaaaaaccccaaagcaaatgcctgatcagcgaatgcaccaggggggcgaaactaatcggtcgaagcatagctcaccgaacgtcgaaaccacgacagctcgaattttgaaaatgcaagtcaaaacactgttgtactcggcatacccaaaggccacgatgcttggtagcacgcct

SEQ ID NO: 27248 - DNA, 4446 bp, Oryza sativa
gctgtaagacttgatctaaactgtagctcaaaccttgctttacaactttgccattggtcactagctctaactctgcctggaactaattttaatctgaacccaaagttggaattccacctctgttccagacttagccaaaacctagatctcctctccttctctctcactagtcgctgccatgtgggccagggctgcatggtgggaccacattgtcagactcatattgctctccacacgggccactgccagaacacgcgcgccacgcgcgggagcacgcgtcgagcgcgggagagggcgagctcctcctctccatttccgccggtgaccgtacttaagccgaccgtccgaccatctttctctccctcttgcccttgtctcgtttcgcggaagaactgaggtaccccgcctcggattcaccgggaacggaggcgtcatctccggcgccggcgagagaagtcctcgactccgtcgcaatccggtgagccccattttcgttcaatgcgcgttctgtaatcccctctcaatgccgtctctaataccgccaagaacacctcatttggtgcagccaatttccgggaacgcgaccgcgtcaactcggaacaccgacgcgctctggacgccgctgcttcgcctttgctcgtcgcccggcttccacagttcgtgacaagctgagcctcttcaccacgagcttcatcaacccctgtagatcaagaatcccgaaggagtcgacacgaggtggaccacggtgggagatcgttttcttcttccccaactccggccaccgacgccattcctttccttctccttctctggtgagcttcggcgcaatatttttcgcctagagctaccttgtgctgatctaaaccgaagcatgcatcctctctatgcagtagaagcctgggggtacaccgtcgacgatgaccgtagcagccgcgccgtcgctgaaccagtacaccgtcgccaagactttgccgagccgcgtccgctgcttggtgagcctcctagtagtccctagagtccttaccatacgcatgcacgattagatcgagactaaaaacccacatgcatgtgcaagccgagcttagccactgcttctaacaccctaacagccgctatagagcaccaaagcttgcaagaaagacaccaataggttcgcacagttgttctctataccttttgttttgggagcttgagctgaatcgccgccaatcgccgccggtgatgctgtgaagctctcggctgtgctgctgctctgctctatccagagcaagggcatggcttttgaaatttaaagactcccaggaatgtattagcaactcgagcagtcacttacatatggggtcgtgcactaatctgtaaataacataaaacacaagtcccattttgaataaaatcctggaacacgtgctaggggttgtgggatctattttctgaaaacccaggggcttttgcgaaaaacgttagtcactgactggtagacccgagagaggaaaatgatttaagaaaattggagaaaatgcaaaactaatttcctatcaactgaaaaatgacagaactttagaaatttgtagaaaattcatcctgactctaaaaattgcaaaataaattttgttggaatcatattttcatgctctgcatcataaaaatgtttaatttaacagaatcataaagattcatgtcttaataatctgaaatgcatttaggaccataattaacatgtaaacactttaaaaatctgtaactttgaatgtaaactgttagattgaagtttctttcactgaatatcaaattaacacagagcacaccaatttcataagaagcattcattttagagcatgttggatttttatgtatgttttaattttgatttttgcatatgtatgtttagacgattcgcagccgagtctcgaggagacctactttgtagctgagcaaggagtggaagagcacggcaagccacctccccttttttatctcattgaacctatgttttggaggtttttgaaaagtttgcaaaatatgcatgtctattgtacactaatccattaaaatcttgtaaaatttgatagaacaactcctcaacttgcattatcacctaaactccacaaaagaccttaaccatcattccaaaccttaggtacaattcattgtgtcacgttaagaatgatgtttgaagtcacaattctatagaagtgcttagccatgcttagtgatgagtttacttaccatttgggctcaattacatgtataaaatgatttattttgtgatctggattaaaatgataaaatgtgatatttgttagataaaatgttagaaaatgtggattttaggtttgggcctcatgtggtacacatgtggtgtttagttgtgtgccgatagggggagagtgtgcccaaaccgacctaaggacttcactcagcgtcagttcacttcgtatacagtacaaccacatgtgctagtatgggatagcccaagcttagtaaattatttatgatttagccttatattctggtaggctggtgtgtatgagttcggataactcagaggaacttcctatttacccccgacgtggtagtataggtgactaatctatccaatacaacggtattgtgccacgtgggtgggttcccgttgtgtccgccaccacggcgttaagtttaaggcgtgggcccgccacttaacggttctaggtcatatatcgtgtatggcttaggatggagtgtcacgtatcgtgctagtgtaaggctaaatcatgaatcttggaagggctttgttgtgagtaataaatcgggtacttatgtatcgcgtgccatgcttttgcatgattattatttcgcatcatgtgggtaaggtgtacgtactctgcagagttaaaactaatcgattagtcgtgctcacggtcaagagcggtgtgtgaatatgtcatgagtatagacctgtgttttattctcctaaagctgaatttgaaattcaaaatgtgatgtgatttgtggattatatccttactgccatggaaggcaataaggggctatgttatatgtgtttaacatctattttgatgcccatttgctaagtgtatacttgctgaaatttaattgaaaataaatctgaatttgaaatgatctttgcaaactaaaaatttgctttatgctaaaattatcccatgttagctttactttgaatatgccatgcatgtagtgtactaggcttgcttggtgcttgccagtacaatttatttgtactgactcttgctcgtattgttgttttgttgcatgtttagagttggttgcaggtgagatcactcctaaggaggaggatttcgttggggatgtttctttcttccaggatggttcttactagggtctaccctagtcagttgcatgaaagatcttttgggtagtaaatgcttccgtgaacctaactattcggtcaatcgaccatatttatctaagcttatgttgtatgaacctaacttagaacttagaacttagaactccctatgttgagatatcatgtgcttggatgaaagtgaggaagggctgctgtgctctcgcccgtttcctcctctcgccgcccttcctcctcgccggatacgagctcgcgacgtcgctctctctctccgccgtcgccaccgatctccagtccgccgccgtcgtcgccccgggccgccttccacctcggcgccgcctccgtcggcttcgtcgcatcctcgccgacctcgtccacctctccgtttcggtcgccgaccgccggagcgccgtcgaccccgtcgacccgagccgcgcctccgccttcctccgctctggctgcctttttcgtcgtcgccgtcgacctagggtgagccgtggaccgccgcctcttttcccccttcccttcccctctctcggctgccgctccgccatgcctatggccgccgccggcgaccatagggtagcgggcgccgcctcccgccagccgcgccgagtggccgccttcgggcgcgccgagtggccgccctcgggtgcggctgacacgtggagccaacggcgccggccggtgcgagcccgggtgcacccggtccaccgtggaccgtgaggctgccgcgtgggccccactcccgtggacccggtccgcgcgcccccttcccctcggctgacgcaataaaccctttttaaattaaaatttaaatgaagaaattcgcaaatattcatttaaagagcatataaactcaaatggccaaaacttggccatttgaactcggaattggaccgttcaagtctctaatttttccttaagaagtcaagaacccatttttgtgctttgttcctgcttgatatatggagtttattagagtaaaagcccttttattttccgttggtcgtgtagacgttgcagcttcggaagatccgctcttcgtggaggttgaagccgacgtttgggaaagtgagcaaggcaagtcacatcat

SEQ ID NO: 27249 - DNA, 10960 bp, Oryza sativa
cgatgatattagagtagtatttggtagtttacacgtgatgatgtgaccattaagtatatgcatacatccaagcgcgagaaatataaacatggccaaagaatacatcgagtgaacgcaggatctacaagatattaaagtccaatgagttttggaacccaattcggcctccggagacagtactgacttcaaacggacctagcgccttcatgccaactccgatttggatgatcttggattacatggaaagcttatctcgctagctttcaaacgcatccagtctcatgtccaaattcatctcgagtcaacgggaatcgccaaaacaagacagtactattgctgaaaccgaacttgggctttgggccttgtaataggctaggcctatctcggaagtgtctccctccacctcaacgaattagcacataaccctagctttatttttctcaataaatagctttgtacatcctcaaaaacaattgggttttgtttagttgaatttttccaagcgccattcaccttgtctctagtccttgctcgattagtcggcgactaatgatttagatccctcaatagttggtgtgttgatttgccgggtcgattagatctaccacttcaatcgcaactatttctttgtgcttaatcacctattcgcaatatttagattgcatcttatcttgttcttgcagtgttctctcgtttgcattgcagggatcatcaaccgcgcgtcccagttggtacgacatcatttgtggtgtagcgattgcacggcgtcctggacttgttctggttgatagccacatcgcagacgtcgcactctatcaaaacgagagttatccctctcaccagaaaatcgggccacgagagagcgtcatcagttggtatcagagcttgcctggtgaggatttcagttgtatatatttttcctacccatcatctataaattgccataccacttttcccttcaccgaacatgagttctgagccttgcaattttcattcaattttgctttattgagttttagtccgctgtcgtgtcggagtgctggttctagctatagagtagtcttggtctgaatttgcaagtgtgtgtgttgcacgttgatctaggccgtagttttattctgcttagaagtcacagtttggctgccgcgaatatcaagtcgcactgttgtttgagtagcagatcggattgagagaaaatatggtttgctgatcgggattttgccatgagatcctgttagtttgcatgtgtgtcagataattagataattaggaaagtctgtttgcatgtgtgtcagataattaggaaagtctgttatcccttccgtcgtctgcttgagtaacagagacaccgaaacaataacaaatttgattgggtgagctttcctagtttgttacgcatgcatgcatcatttccttgtgtgagataaattccttgatttgcggcggcagcttctatagcgagttccatcttttaattcatacgttcagcccttgagttgtaattttttttatccaactattcacgtttgatagctgtgatctgtgaaaaaaaaagagaaaagtaaaaaaaaaaggcagaaaggtggggaaaaaaaagagccgcaccaaaaaaaatcagaaaaataaagaaagacaaaaaaatcagaaaaaaaaagagaaaaaaatcagaaaaagaaagtgtggagatttgttttgttggaatcttggagagagttgcttgagtgttgatcatttgcttgtttgagctagtaatgagtctaggctaggccagcaattttgcctattactttggactattattcaatttcgcaaatttgtttgatttttgctattccttgtgatatagttaagcctaccaagatccacatactactaacctttactaacctttacaggtctggctttgcaatcgctccactcatcaagcgtgtcattgtgccatgaaccaatcacggtgattgatctgtttttgcattatttgagaacattataagaacttggtatatgctatagtgctgagcgacttgcaaccccataagcaaaagattgttgttaacaagaagttacatgcatatgtttgtttttcttgtttgctactgacaatgacaggagtgtacagagagaacgggattgaacaaatgtcacgcccggaatttctatccaaaattccaaacgcttacatgtgtgtgaaccctcgtccaggaatcagccgaggcacacaataacaaattgataatagagtacaaatattactctaattaataagcgaatagaatgtcattacagaggtagatagttcctctcaatcaataaagttctaagcagcggaaaataaataaacggcgcagacggctccactccacaggcagcttgaccaaggctacacctaatcctccacaccatcagcctcattgtagaactcttcctctgatgaatgattgcaaggtgagtatatgacatactcagcaagccacgcagcaaatatgcaagtgctcaagataacaaaggatggcataataggttttcatttgcaaaagcagcatttagcaaacatttgagaatttaataaaaccgttgagtaataattaaacaatattaatccaacactatacaacgtaccctgttgtataggcccaaccattctgaacaaccaaacccagctgtacagatctatctccaaaccaggaatataccattccaaaccaggagctaatcaaattattaccagttatagcatcttctaatatgatgagaagggtgagactaatcacgaaagacattgttagacccgcccataaccgcgggcacggctattcgaatagttttactctgatcagaggtgtaccactgtacccacaagacacaaccccacatcatgtcaccatgtgcctcaataccaccacggtacctcggaaaagagttgtgacattacccctcgtacaacacaatccactgcagtgcaccactcccggatcataatcacccccttataaacaaggcatggactccccagcgacccccgtgggcttatctccgccacttctcagtctggtgccccgcaatgaaccatgctatacaaaagataaagccgttgcccatgctggcttgtggttggcacgataaatgtttcacaaccgaaactcgtgaaccggtccttaattgtcatgagcacgaccatcaaaaccatgtgctcacaacccaccattaccaggatttagttggcacattaattaattaactaatcacgattgaccatcgtgaactatcaataagccatcatgaaataatagtgagtcattagttatcccataaatgtactaatgtttctaagcagggctaagcaattatatctaatatctagttgaaccaatataaataaagctcaactagtcaaattgtaataacccaaggtatcaaggaataaggtaatcaatgtacaaaagggccataacaaagaataggtcaattccacccaatgacattcgaaaatagatgcaatagttgaatagaaacaatagctttaaataggatcaacatgctcaaagggttgtttgggatctgtgtgacttgccttgctggccttggaactcttcaaactcttcttccgcgaaaacggactctccgaaaacgacggaatctaagcagaaaagagcaaaatcaccaaaacagcacataaacaagcatgaacagtacatgtggatatttttaatgtgtagatctcaattttagaaaaatttagagacttgaaccaactaaatcggagctaagatgaattagttatgaatttttaaagattaaatcggattaaaacacttaaatcggtttaaattgaattatgacgcaataatgaattatttttgaaaaggaaaagaaggtttattgcgtcagcgggctagggtttggtggaccggcgcatgggcggcggttcacacgaacggacggccgagattgatccgatccaaatcggacggccgagatcgatcgggtccacggcggctcacgggagaggatcccgatgacgtcagcggtgacgtcaccgacggcggcggcggctcggcgggcggggacggctcgggcggcgcatgctcgccggcgaacggcgacgcgaggacgcacacggagggcaccaacgggtagcggacggcacggcgaacacaccggcgaccaaaacgacggcggagaggcaacggacgacgacggcgacgaggaaggggcggcggctaccttcgggttgtcgacggcgacgatgctccggcggtctccgacggcagcgaaggggcggacgaggacggcggcgacttggcgatgacgacggcggccttcccgagtgacggcgacggctggaacgacggcggcgcacggctggagcggcggcggcgaaggcaaagctagggcacatggcgctagggctactccggcgacgagaggcgaaggcgagggtggcggcggaaagagaagagcacggggatccttttaaaggggctcggaggcgacggcggaggcccacggcgacggcaacggcgaaggaaactcgcggcttggaaagagggaacccgatccgaatcgaacttgattccaacgctttccaaagcgatttagccgatgattccaaaggagaaaaggtagaggagatcccggagattgtttcccctcaaccaattcggccggagaaggaaagaggcggccggatttggaagggaaacggcggcggcgcgaactagggtttcggcagcggcggcggctcggcgaagacgaacctgacaggtggaccccacctgtcagcggcagcgggcgcgcgcgcggcagtggactgggccggctgggccgaggagagagagaagagaggttttgggccgactttcggcccaaagccaaaagaagactttttaaaacttttttcaattaaaattatttcttaaatgcaattccatttattaaaaatacttccttagctcaaataaatcccagaaaaatctaggaattatagaattaagcaaagtatttaatgaaattttatctggcccaattttatattggaatttattaattaaacttagattttcttttcaagacttttaaaattatttctaaaaattccatttaaacaacaatttatattatttgaattttcagggtgtgacaacaaataaaacattggctttcacatcaagaagagatacatgatgaggcttgtgaaaataatatatcgttgcctttatttgttggtaagttcaatcctacagattatattgattgggagttagtagtggatgaataacttgaatattatgaatggtctgaggaacaaaagattaaggcagccacaagttcttttacttcttttgcacctctttgtggagtgatatttgttttgttggtaataaacctggttcttggaatgacttaaaaacaatgatgagagctagatttgtacccgattattatattcgttacttacaaaagaaaatgcaaaatttgaaacaacggaatagaaccgtgagagagtaccaccgggaatttaaaatgtgtatgttgtgcggtggtatagaggagtctagaggagatacaattaaaagatttttacatgggcttgatttcaaaattcagcataggcttgaaaataaaacacatagccatctttttcacttactttttcttgctcgcaatattgaaaatcagattgagaaagaaacaaaaatgcctatgatacatgagaatattcctgtgccttctattgcatctaacatcgtgcaggaaggtaaaaacaattttgaagaaaggaagaatgaagaacctaaattaggtgaagagagcgttttaggtaatttaattgatggtcaactggatcaaggtgagaaagattgtgatatgctacaattgtccactaattatgctatgttagagcaacctctagtggaacagatttctaatttgcctctatcacaagctaaaagttcagattgtgttgatatttgtcacaccctaaaaatcctaaatatataaattgttgtttaattggaattattagaatttattttaaaaagcctagaagagaagatctaattttaattaataaattccaatataaaatggggccagataaaatttcattaaataatttacttaactctataattcctagatttttctgggatttatttgagctaaggaagtatttttaataaatggaattgcatttaatgaataatttaaattgaaaaaggtttttaaagttctcttttggctttgggccgaaagtcggcccaaaaccttctctctctcctggcccagtccgcccgcagccgagccgccggctcgcgagcacgcgtccgcccgctgacaggccgtagtcttcctcgcgccgtcgcccggccgaaccctagcagagccgcgccgccgtctccttccaaatccggccgcccctttctgtttccgatgaaattagtagaggggaaatgatcttcgggatcttctctacctttttccttttggaatcgatcgccaattcggtttggaaatccgtggattcgagttcgattcggatcgatctctctcgtccgaaccatagatttttccttcgcgtcgccggtcgccgtgggccttcgccgccgcctccttgcccctttaaaaggaccctcaagcccgccgctacctgccgccaccctcgccttcgcctctcgtcgccggtagagccctagcgccgtgtagcctagcgccgccgtcgccgccgttcgtccagccgtgcgccgccgccgctccggccgtcgtcgtcgctcgggaaggccgccgtcgtgatcgccaagtcatcgccgacctcgtccgcccctccttcgtcgccgtaggcagccggaagccgcttcttcctcgacgccgtcgccgtccgttgatcttccgccgttgatttggtcaccggtgaattcgccgcgtcgccctctacgtgttggtgtcctccgttcgcgtcgacgccccgtcgttcgccggcgagcttgcgcgcccgagccgccgccggtggtgacgtcaccgctgacatcatcgtcgtcgtttcccgtggcccagtcgtggaccgatggatcttggctatccgttttggatgaatcgatctcggccgttcgtttccgtgagccgccgccgtgcacccggttcaccgtgaaccctagccgttgatgcaataattcccttttccttttcaaaaataattcattattgcgtcataattcaattaaaatctatataagtgttttaaaccgatttaatctttgaaaattcataactaattcatcttagctcggatttagttggttcaagtctctaaatttttctaaaattgagacctacatgttaaaaatatccacatgtactgttcatgcttgtttatgtgctgttttggtgttttgctcctttctgtttagattccgacgtttccggagagtccgttttcgcaggagaagaatttgaagagttccaaggccagcaaggcaagtcacatagatcctaaacaaccctttgagcatgttgatcccgtttaaagctattgtttctattcaactattgcatttattttcgaatgtcattgggtggaattaacctattgtttgttatagcccttttgttcttgattactttattccttgataccttgggttattataacttgatctagttgagctttatatattggttcagctagatattacatgtgattgcttagccatgcttagaaacattagcacactattgggataacttatgactcactattatttcatgatggcttactgatagctcacgatggtcaatcgtgattggttaattaattaatgtgccaactaaaacctgataatggtgggttgtgagcacatggttttgatggtcgtgctcatgacaattaaggaccggttcacgagtttcggttgtgaatcatttaccgtgccaaccacaagccagcgtgggcaacggctttaccttttgtatagcatggttcattgcggagcaccagactgagaagtggcggagataagcccacgggggttcgctggggagtccataccttgtttataagggggtgattatgatccgggagtggtgcactgtggtggattgtgttgtacgagaggtaatgtcacaactcttttccgaggtaccgtggtggtattgaggcacatggtgacatgatgtggggttgtgtcttgtgggtacagtggtacacctctgatcagagtaaaactattcgaatagccgtgcccgcggttatgggcgggtctaacaatgtctttcgtgattagtctcacccttctcaccatattagaagatgctataactggtaataatttgattagctcctggtttggaatggtatattcctggtttggagatagatctgtccagccgggtatggttgttcaggatggttggcctgagcagcatgggtgtgctgtttagtgttgattacaattgatgattaattactctcctgttttataattctcaaatgtttgctaaatgctgcttttgcaaatgaacccctactatgccatcctttgttatcctgtgcacttgcatatttgctgcgtggcttgctgagtatgtcatatactcaccttgcaatcattcatcagaggaggagatctacagtgatgctgatggtgtggaggattaggtgtagccctggtcaagctgcctgtggagtggagtcgtctgcgccgtttatcttatttttccgctgcttagatctttattgattgagaggaactatctacctctgtaatgacattttattcgcttattaattagagtaataattgtactctattatcaatttgttattgtgtgcctcggctgattcctggacgagggttcacacacatgtaagcgtttggaattttggatagaaattccgggcatgacaagttggtatcagagccaggttgaccctaggttatgccaaatggttacctacaggagccctctaaaaatattggaaaagtagaactgttctcctccctttctcttttaattaaaccaaactaatggcacatggacttcataatctcttttaatggttctcattcaaaaatttattccagtgttattagtactgtacatctattactgtactaatggctcattttatcagtaaatgttttacaatattgttttatttaatcttgctgcaataaaataaatttagcctgttgattttataactttcttttattttatttcttttgaaacctgttgttcaaaagtgcaaaatttgtgatcttgtttccaactgtttcaacttatcttgcaagcttggtttactttatttacttaccttttactttgattttctaactttattcaaattaatccaaaaacttgcgctattaattggataaatgtcttaactccctcctttcacttgtctttagatgccgcgcttcaagcctgagtacttgtttggtgttgagggatttgtccaggagttgcgtacgatgtcctttgtcataagatttgggactgcccctttgtatgcccagattcctcatgatcgtcacgaagagaagtgccgagtcaaagtcaccttgaacagtaatagtgaagatatcccatcagtgatgttcgaagatggaggaggaaactacatccatgcatgtcaggaggtggcaaggatcgccataggagagctccgcgatcgctacagtgatcagttggccgacactgagtatcgctaccatcctcgccaacctcagggaagtgaccgtggcagctaccttgagactgaggggattgagaatgatgctactacaaggcatttggttgagatgctgtgggctatggatgaaacccgcgcggagattgtgctagcagctcaagatcgtgaagaccggaatcgtggtaagatttgcaagctagaggacaaggtggatcgtttggagaaggaactagccgcgttgaagggagaagcaccaccgcagaaggccaggattcgtcttaccgcaaggaagagagctctatttgtccctcgctaccaattagcgccaaaggtccgtgtggtggagaaagaagttaccccagccctagcggatcctccggtcgtcaatgtaagtgatgatgaaggagaagaatcgaagcgcacccattcaaaggtcgagtggggagctactcaagatgatggagacgagccgaacgagccttcaattaactccaatgcccggaagacctagagtgccttgtcaagccgttgtcttagatcgttgtgttagtttgtttgtttaagtttggttgtgtgtgtctcgcatgtgatttacatcagtggtgggatgtaagtgcatgcgtttgtttgcttttgagtgttaggaagttggtgagtttagtggtgtgagagtcttcagttctgtaataatgaaactcagttaagatcaataaaagttaagttagtaaaagaattaattctctgccctaagtagttttccccggtttctcttcttgtgatcctgcccatgccagatggtactcactcgtagcaacgggaatggtcccaacatcaacaataacaacaccaatggagagaatcccacacttgcccaagtcctggctcaacaggcacagcttctgaacatgatgatgcagcaactccagaaccagcagaactagggaaataaccatgcacctccccagaacaagttagcagaatttcttcgtgtgaggccgcccactttctctagcaccactaatcctgttgaagctggtgattggctgcacaccatagagaagaagttggatttgcttcagtgcactgatcaggagaaggtctcatttgcatcacaccagctgcatgcccctgcctttgagtggtgggatctcttccgccttaacagaactactgctgaacctatcacttggcttgaattcaccgctgctttccggaagacgcatataccatcgggagtgatgtctctcaagaagaaggaattca

SEQ ID NO: 27250 - DNA, 7007 bp, Oryza sativa
atgaatttatcaggacgtgacatgcgtccaggtccttcttgagctgcaggttctcctgacgcagctccaggatcttcaggttgttctcgaccatcccacggcgcaccatctgatggaagtcgatacgagccgcgtcgtacgcctccaccatgcgcgccaagtgcacaatggtagcgtcatcctccgagctagcatcccggaaggtggcgtggtcgcgggctcctccgcgacgagggtggtagcggtagggcgagtgctgcaactcgtccgggtagcgctggtgaagagtgccgatggcgaggagagcggcgctctggcaagcggcggggaaggagtctccacccgcggtgactgtcagcgaagtccgctcgggagagccagcgaggatcactgcagtgacctcccaagcagcgtggggctctgcatcgtcaccctcctgctccggaagcggcctgggtatggttgttcaggatggttgggcctgagcagcatgggtgtgctgtttagtgttgattaaaattgatgattaattactctacagttttataattctcaaatgtttgctaaatgctgcttttgcaaatgaaaccctactatgccatcctttgttatcctgtgcacttgcatatttgctgcgtggcttgctgagtatgtcatatactcaccttgcaatcattcatcagaggaggagatctacagtgatgctgatggtgtggaggattaggtgtagccctggtcaagctgcctgtggagtggagtcgtctgcgccgtttatcttatttttccgctggttagatctttattgattgagaggaactatctacctctgtaatgacattttattcgcttattaattagagtaataattgtactctattatcaatttgttattgtgtgcctcggctgattcctggacgagggttcacacacatgtaagcatttggaattttggatagaaattccgggcgtgacaatattgataatgcttgtaatgaggaagagttgtgcaatgcttcacttaaatacatgccacaactagtgaaagaacacgttacttctatttctgaatatttggtttccactcaaaataaacgtgtctttgttattgctgatgaccaagaagatctgcaattattgtcttctttgtgtactttgggttatatcgaatttgatgttctttgtgatctaaataacttagagaagaaaatttatgattttccatgttattcttggaacaattatcatgtcattggtaaatataataatagaggatgttatatggtacatcgtgtttatatatgtttagatatgaatcctcctttaaatatgaaaaaatatgagacaccaaatgaatcgtacaatgttgatgctattggaataaattcacctaacgttgttctaaatatcgatgacaatattcaaggctcgctatcattttaagacatattcattcagtaggttgagttggtttcctcgtgatgtaaattggatttataaggattgcttgtttgctattttttcagttgatctttcctatgacgacaattgcaataagaaaccgaggacggtttccaaacaagaaggggatgatgatatgaccatcaagtatatgcatacatccaagcatgagaaatataaaacatagccaaagaatacaacgagtgaatggaggatctacaagatattaaagtccaatgagttttggcatccaattctgcctccggagacatcactgacttcaaacggacctagcgccttcatgccaatccgatttgggtgatcttggacttcgtggaaagcttatctcgctacctttcaaatgcatccagtctcctgtccaaattcatctcgagtcaacgggaatcgccaaaataagacagtgctattgctgaaaccgaacttgggctttgggccttgtaataggctaggcctatcttggaagtgtctccctccacctccactaattagcacataaccctagctttgtttttctctataaatagctttgtacatcctcaaaagcaattgggttttgtttagttgaattttgccaagtgtcattcaccttgtctctagtcctcgctcgattagtcggcgactattgatttagagccctcaatagttggtgtgatgatttgccgggtcgattggatctaccacttcaatcgcaactattcctttgtgcttaatcacctattcgcaatatttagattgcatattatcttgttcttgcagtgttctctcctttgcattacagggatcatcaaccgcgcatcacggttggtacgacatcgtttgtggtgtagcgattgcatggcgtcccagacttgttctggttggtagccacgtcgcaaacgtcgcacttcgatcaaagcgagatttatccccctcaccagaagattggaccacgagagagagcgtcatctcgtgctgtctagattacgggatatcattatttggggttatatgctgcggatgagaggtgggccgctgatggtgacagctcagtacgggtattcctccacgcgtgtatataatcctatgttaattccctggggagggtattcctccgtatttaaccccggttgtatggtcatgacgggctgtcgtaaggaactcggcagttaggggtggcttctcgaagtaccaggagggcatcggatagagagtattagctagtatatcagttaactagaatgtatgtatactatgtatactagaagtataggaatagattttttttctcttttctttccacttagcttagataatttagtatgagaatgagtagcttaatgtttgtgtgtcaccctacccttggattatcttaacccctgcttaggatatgattattacaagtaatatataaattattagtcaagttctctctacatgatcttcccacgggataaaataaatacgatacccttggaatactctcgggtgaaatgctacaatggtatatccgtgcgcttgcggatgaactctgtaaccataatataccaggagtatttctgcgccattgcagggaattatatttctagtaatgtcattaagaaataccaacaccgcctcaaccctttcggtcctagaggtttgtgcctccaccgactcgattctcctggcgagggccacggcttgtgccgaagcacttccccctgtcggcgcttcggcatcgctagcaggcggtggcgaaaggtgcctccttcgggcacaatgcgccgcggcgcaggcgaagtgggtgtaccatcagaagaaccttcgctgtcggtaaagccaccgtgatttgcaccacccctccattcttctttctagcgatcgccttttgtttcgccgcgaagctggaaatcgccaaaagcgtgttcgcgccagcaacatcttgcgcatgtacgagcgaaacatgagagctcactccagctttcacccgaattgggctgggggtatagccgtgcgacccaccgttttcatcgaacgcggcctctttttcgtcctcgtcctcatcgtccgcgtcggtgtcggccgcgtccttggtggagcgacgggttcgcccctggccacacttcgcaatgggccgcttgcgcttcttcgtcatcggtgaccttgaaggtgatcgatcggctagccaactcgccgacataaacttggttcaccctcccatcggcttgatgttggagcaagcggccgaattcggcggtggtcagacttccgaccatcttcgtcgcctccgcctcagcatgttccaatatccggactggacaaaaagggagtaagtcgaaacatatctacacacccagaaaaacggtgtgggaaggtaaaagaactcacgttcggcgccagggggaagaatgaggtgggggaagcccaagaaccttttcatcctcactaacacacaccccccattcgagggcgagcggagagatccgaagtaggcaaaactcttcacaaaggtcgtgggtacttagccgtcatgcaaccttgcaaagaagaatgagccgggactcgagtgtgccatcgacctccatgttcggcttagcgatgatagagatagcaagacgccgaaacctaagccagttcaccttaccatcctcgatggagtaaggattgtcgatgtagaaccacttctgcaaccagttgcggtcccactttgccatcgacacaggcaccgggcatgcatccgagcgctccggcgaagcatgaagttgacgcagccgaaaaccgttttctttgtccaagctggtgtgttcaagtccttggttgtggcacacgtcgtaaacaagacagcgaacaattcggcggtagggtcgaaaccgcacgtacagcacatccatgcgaagacgaccagcttcgggaacgctgacggactgagctggggacgctttgcctcgtacatctccagtacagaggggaggaaatcatcgcacggaaggcgaagtccagcggtgaggaaggcggcgaaaataaccgttcgcctgtcgccgggcgaagggataatggcttcacccccacaagtcacctggccctctacaagagcgccggagaggacgaattcggccaagttagactccttgacaagggacttgccaaggtagcacgaccacccttcaccgaggttgcaggggtcttcaccggttgacccggccttagtgggtttgcgaggggccattgaatccgtggcgaaagaagagcctaagggcgaaagggagcgagaaagtcgaggaagcaagcgcaggagcgtagcggtggcaaaaagctagaacgcaagcaaaggcaaggtgcacggagcacaactgcagtgaaagtgaaaagcgggggggggggagaagcggtaacccgggggggttatataaccacatcgcgcgacggttcaactaccagccaatcaggacccgacacatgtccgggggtagacaaaacggtaaattcccaccgggccaaggccaaacagtaaaaggccgaacgcaagaacagcaaggcccatggagcccattactattcagagtagtttaaagagcagcctagccccttcgccactaattggtgaacgcaggaagaaattttttcctcaaggatttttttaacacgagaacaagttatttgctttgcaggcgcataacataggtttcggcaagaccatcggccgaaaggggcgcctcgtggtataccatacgttttgcatggtctcggccgaagctccctactcacccttgcctatgaggggcttgttggaggtacaccacggggacattcggtcggacctaccgaaacccacaacttaggcgacaggcttagaccggaggcaaacggcgcaggtcgagaaggcaaccatatgggcgaaagccatggctcggaaaatgctgacttcgccaagcgaagacctcgtcaaagggccgcacaggcgaagatggtgaggcgaaagccttagcatgaaggcacgggtttcgccaagtaccgaacctcgccgtcaggaggcccagcaggccgctacgccttcggggaatttcgacaaatagatgggccaagccatttaagcccaataggggcccatacatgtaaaaaacattgtgtgcccccaataatgtccctatcataagggtaaccatgtaaatttccctgtaaaacctaaaccctaaagggggagcctgtaataggattataaatagccccctaaggccatgtaatacgggatccaaaaaattttactaagtaatgcaattgtctttcttttccaaccactgttgagataaccacgcctttcgacgtgacgcagttgtccattcgacaacaataatcatagctaattctctattattttagttatatttatggtcaaaatttgtctataacgaccatcaacaattatctacccttgccaaatcatgaaaaagagagagtttaggtattcatctactttcaagaggaaggaggaaggaaaactgatttgcagtagtaccaagggaggcagaggggagcaagctgcgagacgaggtggagtgtaccgtgcgcgatgagccggcaccaccgagaagcgatcaacggtgaactgcgacctgcccatagggcgacgagatgacagtgggctcgctttccgttccctgattcctaatttgccgagctaatttgcgggattaacgcctgattcctaatttgccgagctaatttgcgggattaacgagaggatggtagtggatgttcgacgcctcaagtcctcaacacccgcgtggattcgatgcaaggaacaaaaactaggagagtggggtcctcttatctgttgaactgggggcccatatgtcatacaattagtgatatacctgccagtattttatgagtggggtctagggcccccacaccttgtatggtaaatccgtccctgctgatgtattcagtacatactataagagtaaaaactgatactaatagtattattaatctgtatcacaaaatggtcgtatgaatgaaaaaattacaggctcaatcacacacaagtgataaaaaatagtcacaggtgaatcaaactagaaaagaaaaaatgacttagccaaaaatccatcatgaaactaggatccggatggctttgctggatcttgctataaggatggagaggctggtccgtgtcttgtgacaggtagtgaagagggcaaccggatggcaagtggtagtcgacgatggaatcatggaagggtgtagcggcatggtatagagatgggcgcaatgttgtgcagtagcagacatccatcatctagcaagcacgaaaaaaatacaaaaacattctcgttcatgtcatagatatgacgagtaaaagaaaaatagcaaacaacctccatcaccggcggacttcaccctatcctctgcagccagccacatggagcacgatgtgcaaatataagacctttgcagcccatcaattcagatcaagtaatattggaagtaatattggagattgcacgttaatttgatttgcaaaaagaaattggggcttcatgcatgaaggtaaaggagagtatgcatat

SEQ ID NO: 27251 - DNA, 23591 bp, Oryza sativa
cataagatcacgtacttcctctcaacccagccccttaacaaatctttaattatatgggcatgacccgttataaagcacggccatattattatcaagtgtttggctgtagtcggatgttggggtatattattattaagttttccaaaacgtatttaaaaaaatgctgttgaatgactagttagttaatgggaggtgaaagaaagaacatgagagagagagggggggaatgctgctactctagtagtaggagtagctaacaaccaagaggatgccatgtccttgttgcagggacagtggtggtaaggtaagaaatgcagcagtataagcagtaagcactccactcactcaccaaaagcagaaaaagaaagaaagaaagaaagaaaagggacaaggagattaactaagacacaccccacctacacactcttcttcctcctcattcaacaggatttttttaaatacgttttggaaaacttggattctattttactcctgtataaaatggcagtatattcaataatgtggcaattcaaaacatacctgtacgttgccaattgagacaaaaaagattcaatatgcctactagttacagcttgggctctaattttaaattttcgaatttaatttagggttttttttcaccgatttcatgagcatatgcctttagcttatataaaaatgcctccagcaaatgaaacgcgtcattaaaatcaagttactaccctcgttcattaaggataactaatgaaagtggttatctcttctagtgtcggatcgtattcctggttaatgaaaggggtgttgaatctaaaacacaacatgttttggatgactaaattaattaggaaaaaagtccaaacacccccccccccctaaattcccatggaagtccatctagcacccccaactttaaaactggatatccaacctctgaactttggcataccatccatattacaccataaggtggttttgaatgatggttttgcatattttgaaagcttaaacgaacaattttgaataactaatataacatatttgcatatcatcagttataagtcatcaatttatcctgatatagtgatatcctgctattattatgttggtatttgtttgtaagtgagagctaataagaagtggaaagaatgatttaagtcaaaattttaatatatatgtccaaagtgtataacatatgatcaaactcatctaacttatatataaattagataaaatccactatgtaaaaccaccttaggaggttatataaacggtattgtaaagttcagcgagttaaatgtttggtttcagagttgagagtgttaaacggacttccatccaaaatttagagggttatttggactttttccaattaattaactactacaagttccccctttttccttctgctattgttaacgaattttcaaaaaatatagatctcatttcagatcttttgatggtgccatctgtttattcattttaaaatattttcttcaaagcatactagacgaatttggaagacatgtttggtgcattgcaactaaggcaatgaataactagaaattaataacaaaatatggtaaaggtagtgaataatgataagggacaaaaaaaataaattaaataatgtacatatttatatcaccatctataacaatgcaaaatatatatttttagctgacgtaaacaaatatggattaaatttgtagtacgaatatgaaatggtttttatggagtaattgttttgcagctcagtctgttactctgtcatgtgtatttatgcaaatgtagatcaggtattgtttaaacagtcacggttgcctgaagttgaatttttccagcaaaatacaccaaaaattatgtatgcatgcagttttatgtaccaaacaaataagaacagaaataattggttgcagaagtcatattgaaccacaagtgaattgaattaagttatatacaaccaactgtttcttttctgacactaaaattaagagggaggtagcttgggcctgataaataattaagctgtgcacaaaatagggcccattatcctaccgatcgagaagaatctatctgtcccaatttctttcatggagagagagagagagagaagatgaacctctctctgcaattgcaatactaatttcgatctctttttaacgtcatgtccgcgccgaccaatttggcaatcattagcaccattagcgtaatacaacacccacggcgcaatgtcctcgcgtctgatcgccgattaaaaacacaataaagtcaccacctcatggaaaacacatataataaagccaataaataaatattttgtgatcaagggagtcagttaattataaatgtgccctgaagaataacattaggtgaactgtctaagagggtgctatgatcgacatattctttggtatcttgtggttgatgtggtggttaacaggttatcagtactagctaattaattaacaattgttaactgcaccggccgttgttaattaggtctagcctcttttgaccattcaaaccgtcttactagtgtcaatgtacgagtatatagtagcaactaattaaacttacatttcttcaactgattttgtatatgtcgccactgtcccttttcacaaggaatacaataagaaaatgttgtagaatctaacgagatgttgttagtgatgaggttgaatataatatacattataagaagatgcagttaattataagataatgtgggactaataatggtttttcagtctcttaaagattcccggggatataggtttggaatggagcagatgggcccatcaaatgattaccaagttgagatcgaatctcgactttaggcgccttcctgaacaaatccattcaacaaccacaaataaaacaactatataacgaagtgacggctgatgttgatccaagcttaccgacgaagcatataaatgttttttaggcaaacctaattaatttattataagcgggataacaattcacatctgatctatataacgttctgcacatctcaaaatacaagcttgatatatagtgagcatgatccgtcccaagttatgcgcttgttgctataccttaccgtaaataataaaccctgcaaaaataatctctaaaattatagaaacacataaatttaagaaaagtattcaaaaaacaagtaggaccagtactgagacaaacttttattattaaaatttaataaatcctttacacataactatttacgagtgctgaatctgtaatattggaaacaacactacaccagattctcacacctgtgacggcatatatgtgacgggcatgagtgttggtcagtgatgagggtcacctttgacgggtcctatgggatgccgtcatcggtgagccatcatgcggcgactcgtcacaggtaagcagtcacctgagacgggtcaaaaatggaacccgtcaaaggtgaggtaaagtcacctatgacgggccaaataaaaatatttttgacccgtcataggtgactgcttatctgtacatatgaggttcacatgtgatgtgagtacccgtcaaagatgataaaaaaattcgctctcattaaccccccccccctctcctccctgctcatcacgatcttatcctcttctctctctctctcccctcaacccttcttctctgagcgggcgtgcgggccggagggggaggtggcaccagcaggtgcacgcgggcacgcgggtcggagggagaggcggcaccggcgtgcgcggcccggagggggaggcggcaccggcgggggcgcgggtcgaaggcgaaggcggcaccggcggcacctccccccgcctcccggccgccaacgccatagacgcctccctcacctccgtcaccgaccacgctagccacaggatccggcctccacgaggccgggggcacgcagatctgtacaccaagtaccgcctcctccatccccacccaccgtccacctcggtgaggtttcttcttctcgttgtttttttacttaaatcttcttcttgttgttgttgttcatttgaggtgtttggtttgaggatgtaggctctaatggttgtttcttgcagcagaggagtgcctcttcgagatcctccgtcggccagtgtgccccttctatgaatgagatgatattgttgtatgataagttcttgccatccccttttgtgaatgattgctatatgagatctatcagtttgaagttttttgatggtgatgaatgtgactgtgatgagatatatcagtttgaagtttttgtgatggtgacgactgtgactgcgatgagcaaaccaccatagcagtgtgctccaattttcttgctagggttttcatacctgtgacgggctgcaatctatttttctttttttttggctgggttatagacatcactgacggctcacaaataatgggctatttgagataatagttacctgtgacgggttctatacatggcccgtcacaggggctggtcaccactaacgggcattcacccgtcaaaggtgagcagagtcatcactgaccactaatctctgacgaggggccgaatccgtcagaggtgatggtttaggcccgtcacaggtagcgtgatctggcatagtgtaagtacttaagtcccctttcaacttgatttctattagggcacgcacaacggcaattaatactaggcttttagagttgttaacaatgtatatttgctaatatgagagagagcgaaaaagagagaaatatcgatgttacggttaacatagactcttagtgtttataaaagaaaacgttgttccatgccgatggatcggagaaaagaaaaaatataataaaaaatgttttagtgcattaatttttagtcttttatcgtctcaattgtattgtcattaatcaccaaaataaacttaagtgcatagattgattttcacttagaacatgtccttatctcaattattttcagcacatctaaaaaaaattatgcatcagcttgcctaattcttttaagatcttttattattacactttccagtttaatatgatgtataaggaaaaattttagagattagctaaaaaactgtcgagtgctttttaagggggaaactttcaaatctagctatagtatataatttcactacaactatactataataataataacttatatatatattaaaataatatatgcaactttatatctaatttatatagagataacaatgtagtatgtagttatagtgtagttacactatagttacaatgtaattacaatgtaactacaatgtaactacagtgtaactgcaatgcaacaagcatgttactagaatgtaacttagatgtaacttgaacagatctaccataaacatgtgatgatgggactagcttgtgaaaagaggatttagatccgatagcaaaatatctcagcacaaatcttagcgtgaaatcaacggcaaaaaaaaaatgacagtttttagtcctgaaaactgtcacagttagctagcaaaaccgaaaattttattgtactctcccaaactattatattcttccatatcctcataaactactattttttgcctcagttgtactttaagttgaattttctctttaggataaactttatcttgagatttttaatcatttttttcacatgctagaaggagacttatttaaatcaaggggagcgggggtttctaaaacaacaccaagctgccatgacaactttaaaaaatattgttctaatgtaggatatacttggtcatataggatctataaaatttcaacttaaaacatatcaaggagaaaaatatatgtcccagtttaggggtacttttaagtagtgttggaggtaaaatgagataaaaatatatattttaaaaagtcaaaacaatttttttgtctttaaataacttttggtatctcaaaacttatagcaagtactgtggacatctaattacatatccctacatgacacatagaattaaatggtgaggtgaagggtagcagagaggagtgggagaaatagagtcacctctcatgtaagaggcacgctctacacaaaatcaaaaactgaaaatgaatagagtagttcttgtgtattagataattaaataactattgtgtatgcaattgtattgggtacaaatgcataattaaaaaaaactatattgtgaattggagttgtatattatatgtagcggtagtgtattgtatatgttacagtagatgatatggataaaattagaggcaacaattatctctactataaataaaacttcttactgaggtagctcagtgtttcatttgtctcatggtgcaattttaataacactaggatcacttcatcacctgcattaattggaagtacaaggacagataggcatgatcgatgaactacatcaataacgataatatagaacactctccatctctaacgtgtaattagcagctgcgctctacctagctgcgacgtgcacaccaagatcacctagccacccaacacctaaagtatgggcacaagcaactggccggatccaacgagatatcgatccacttttccttataccaactactacgtcgacgttcaatattcatctcctacgtcacgaaaaggcgaaaacgtaaccccaccatacatgcatgtaatagctatggagatcccattagcggcgcctcaaaccggtacggacacgactaatagctttgaaacaaaactagctagaaactacttggccggtggcacttttgctccactttattgaccttgaaaagcatgttgctttcgctgcttttctttgcatgatgttagttcagcgcacaaggtagctatagctactcgtatagttatcgtttcttactttcttaatttgcatgcatgagatcaacatatagttatattttatgctctgtcccctgcatatgtgtaggacacttgattacttaaagcttaatttggtggttacattagttaatttccaaagtgaacgggaaaaggaaacgattctgatgcgtactataagagcggcgggaaagataatgaatttgtatgtatatgtacccaccaactttagtacttctcatccgtccgataacaaacaaatctaacaactacaggatatgaatctggattagttacattatgtatcatgtttattttttatatataagactaataattcgtcgtgcatgagttatagcctggcatctatctatggtaagagatgcctatatttctgaagtggttaatttatgttgtttgagctttctgacaaggaattccaaggatcccataaaacccattaattaaacgagattttagagttgctagaatgtgttgtttataggggattgactcaagcttgggccaaggtttcgaccaggccaccctatttggcccatattactattaccttgagggaaaattaatttcagcccattaatccttgggccctggtgtcccaatccatgcagcaattgaagcaaaaagtacaccgaaggtccctcaacttgtcatcgagttacaaaatcgtcccccaaccgcaaaaccagataaccggcgtcccttaactaatcaaaaccggttacaatagatccttcggtggttttgaccccggttttgtcctacgtggtggctgaatcagtgtgggacccacgtgggccccacatgtcaggatgccacgtcatctctctcctccctcttctcttcctcagttccacctatctctctccgatgccgataccagccgatagcaatagagtttaagcaatcggctatatatccaatgtagatgatgatataaaggcaatcggttgatgatgatgtaataaaataacaatataatccagtataaaccaatcggtaaatagtgatatgataaataagcatcgatccgaaggttaaagcacacatcggctgaaggtccaatgtcatgaaatccacaagattagattaaacagtgaaacatttgttgtcatcggctaaatccaacttatatgtatatgcaatcctcatgagccgatgcaacgtccagataactcaccggctgaaactccgatgaaacccttattggcaatcaagaagcaggctagagattatggttctaagcacgacttagtagatcaaacttaactgatgcagcactaagtatgaaaagaaacataatatctagacaatcaagccgttgactgagttttcagggtggtagatgtctaagctaatctaatctagcaacgcaatttagccgataccggcagaaaccctaaaatgagaagcagttgatagagctaaactgatatgctaagactagattaacagagacatatgataaatagttaggcaaatataggatccaaaccagagcaatcgaagaggtcgaatgtactgatgcagccttgaacaacgccgacgtaaacgatacaattgtctgggccggcggaacattggacttaccccttagccggagatcgaacaccgatgcagccccgcgtcaggtgccaagtcacgctggacgataaaataaagtaaaaaaggtaaaaggtggcgatgcgccgaattatattgatcgtgaagatagattacatagaccctgggtgtacatatttatacccatgggttgatacaagtccttatcagacaagaaagaaactttcctaaagataaaaggaaaagataaagtccttatcggacactaaacacactttcctaaagataaaaggaaactaacaaactattcctaattaatggataacttgccatgccgcattctctttgaactcggtctcttctggataagattcctttagtagatcaatttccttaaccgaatatagcaagaatccgacaactgacgacttgacaaatctcatcggctaatttcaggacttcaaagccgatgctgactctaagccgatgactactccgggcttaccaaatttcactgttaacagcgcgttagctgtccccctagatttctcctatcttataaaccgatttcagggtcagatcccaggcttctaattgggccacatggcatctcttgtggagctctcctcctgattcttggttgtagaaagtgccacgtatacgcacctatccacagccgttagatgacgtatcgatggtgaaaaaccgtcctgtggacctaaatgtaaattacaagttatgagaggggtttttgtacaaacgtgcgatctcatctagaaaagttcgaagtattggagaaaaaaatcccagaaaacaattgcaagaaaaaatagattaatatctccatctccctactcacagtgccgcaggctgccgccggcacggtgtcacctgttttgggcgatgaggagaaggagggggcgatggctgctcgatctacgcggccggatccacggacacactatacaggtacacaagaacatcaagaatgcattagcagcaccaaccagcacgtatcttcagcaacagaaggcaagcatcttcgggagtggatctgtggagggacaagagaatacagccgagtcgggagatgcacgggcgcagtcggcactcgtgcggggaagccggggatgcgccggcgacggtcacctcctcggtccaggtctccgtcgggggatcgagatgagggagcgccgtagcggtgctgcggtgggtgcgctagatgcatccgtgtatgccgctatggctgggagtgtggaagttgtcttcccaaacgagaggcgatgtagaaagcaatggtggtgagttggtgacttgggtagagaggataccaatagaaagagagtacgtaatgaaacgtggaatgcatgcaggatccatcgcactgagttagcactctttttttggaaaaaaaaatctggtgcaaaccagatgcaaacagcagtccgtgcagccccgatgcggatgcatgacgcgtggatgaggcgctcatccgacggccggcccacacaagcgagtccgcatcctgcacggctcgactcaggtcgttctccctcagctcgacttgcgcggctcaggattacattgggtagggcgtgattagaggcggacgattagagcaaaacagattcgctacatggcaggacgaggagtccagcagaagagcacaggcgccgccgggcttctggtgccgtcgtctgatctggtgcagcctttgcctgccgtagcgcacgacatggcaggacaatcttcacatgaacacgatgtaatcgttggggatcgtggagccgatggcaagcagagaacgcaggtacattgcctagctaattgactcatgctttttcatcagtacatgcatgcatgatcgtgagtgatcgtcttacatgccctcatcgcaaatactgatgtgtggcttatacgtaccgatgtgtgatcatatcgtgcatgatcatcttgcacagatctccgagtttatgaccatggaagaagatgttgccggcgctatcgatgccaacgctaatggtgatgacaacacactctgtcgcatagtacctgaagagatggcagataaagcaccaaatcaggtaacgataatttaatagcaaattcgatggaaaacagaatatctcatactgtggtaatataactcatttatcgtacaacaggccaatgataaagttgcacaaactttgatcttgcctcaagttggaatggcttttgattcaaagcagaaagcgtatgatatgtacaacacctatgccgggaagattgggttcagtattagaaagagccaagcaaagcaccgagtcgatggaactatatactagaaatatatagtttgtagtaaccaaggacaacgatagactaagtcatcactagacactactaggacgagttgtgatgcttgtgttcagtttagtacgagtccattggtatgtatgcacactttaaatcgcattataatttttttatacaaacatctgaaaaaatggcatccacatcttataggtatattgtgcaagcatgcccttagagtcttcaatatgaatgaagttttcactatgccatctcaatatctactcaacaggtggacaaaatatgcgaaaaaaggatttaatattgataaacaaggaagtgagaaggaaactttgaaaacacatgctgcacgtatctctcgaaaggcaacatccatcgctttgaaatgttcagtttcgaaagaacttcttgatgatttggagaaagccataaataatttggacttggaggcagatagttctctaagcaagatgaaagaaaaaacatgtgaggttcctctaaattcaaatgactgtgttatggacacattaaatggtgcaatatcaattagagttcctcgattggtcaaaggcccaaagagtagatgatcaaaagatgcagttgaaaagaagaaacggaagaaaacaaaaactgctaagaataaaggtgctgatcctacccattccggcatgtttattcccattgtatgcttgtataattaatttttttatactcagatattttgtatgtttgaactatataggagaagatctaaataatgcatcagaagatgaagatgaagatgttggtgatgtgtgtgggcaatcttcgaccatggatgcaaatgatgtgtgtgggcaatcctcgaccatggctgcatatgatgtgtatgggcaatcctcgacaatggctgcatatgatgggtttgggcaatcctcgaccatggatgctcctttaatccaaggcggatttacaagtcttttatttggagttcagcaagattcggccatggctgctagaaagttacatttcaattaatagcatttggctcaacctacaatgagtaggctttttttgaatagattttcattttgcatcgtgttacactaaactatcattgacgctgtcagttctatccatgaatttggtagctatgtatgagatatgaattatctacattgtttctgaaagaccagcttctagacatcacattctagatttgaacttcaggatttcagatcacacaatatttcattttatttttgaaaggaatcagatgaataatcaaaattttcaatgcatcaatcacattgcagatttcagaacatccaacatgccatatgtatttcaaataaaagaaatacattgtacagattacatagcgatctgagtttccttgcaatttgaccaaaaatgcggtccaaacttacagcatctggactacaatccttgcatactcctaagagtgtacagactacattgtatggattaacagcgaaggctacattcatcaaactacaatccttttagcaccatccacttctgcctgctgcatttacaatccttttaggcaatcaattttcctcttttgtattttgcacaaggttacaatagttctcaggataacttgacatctggcaaaactagttctcaggatacaaggtgttctgaatctttacaaactcctaatagtgtatatactacatagtaggaattacaaagaaaggctacattcattatcttgtcattgattgttctatgtcacttcttcagcatcctctcgttcatgctcttccaatcttcaattgccattcatgccgcaccccatatatctcacctgcaattctgcattggcctcaagttgccagctgccaagtgtgccaagaacaaatatctgatttttgcaactgattgtgctgccatgtagtgcatataaaagaaaaaagagagaaaccaaatgtggttcagttcagatttggctctgtcttgtagtgacagaaaaagagaagccaccaggtggttcagttcagatttgtcagggggaagccaaagccttatgtttctctagttgtttcaactattttcagtggaagtgtcacagctgaatatacaacatgcaacatatcttactcctccactatgcaatttattcagtgtgatactcaagtttcagatttttgcctgttttctggtgacctattcctagtcaattttgatgtgagcctactaccccactttgcaaaatgtccaacaattttactgatatgatgattggtcggccaggcaccgagcgagttgccaagacagaatgtatgttttgtttatgcaaaacaaaaaccgattgtctcaaactagtactaattaacactatcaagctgcaatgatagatgctaggcttactacctaatcacatgaaaaccaaaactgagcaatcaaaccagaatctagtgaccatgattaactaccgcaatgaaaaccaaaaccgagcaatcaaactatgaaactcccaatgcacgggagggtgccgcctggcccttccaccgtcgctaccctgctccaggcatgggagggcaccgccactgccctgctctaggcacgggagggcgccaccactgccctagctgtccgagggagccgccgccgcattccgtctccacgcgcccaacagcggatgagaaaggggcgacgggataagaaacaggcggaggggaacgatgactgcatctcggactagatcgacccgatcggagcgagcgcgagccgagttgtggtgtgttgagatcgctcttgagctgagctgagattgaggtgcgatgcggactcgcttgtgcgggccggccgtcggatgagcgccccatccacgcgtcatgcatccgcgtcggggctgcacggactgctgtttgcatccggtctgcaccagatttttttccctttttagccacttaacgatctgtttgttgctggaggttctatctagaacagtgtgcacagaaaacggagcgatctattagcacgtgattaattaaggtggtgttcttttctcatgaagatgaatattaagttttttacgtaaaacgaggtgatactagattgtgttttaattattacaaacttaaaaattagattaatatgatattttagagtatcttttatatagaaagtttttgcatgaaacgtatcatttagcaatttgaaaaccgtgccacgaaaatcttaatcttcatccaactcttgttggagaaaagaatgggacctagtattagctattatttttttcaaaaatagatcaatatgatttttttaagcaactctcgtatagaaactttttataaaaacacatcttttagcagtttagtaagcgtgcgagcaaaaaacgaggcgggggagctggagctagaacgaacacagtcgtcttgtcacgtccggaatttctatccaaaattccaaacacttacatgtgtgtaaaccctcgtccaggaatcagccgaggtacacaataacaaattgataatagagtacaatcattactctaattaataagcgaataaaatgtcattacagaggtagatagttcctctcaatcaataaagatctaagcagcggaaaaataagataaacggcgcagacgactccactccacaggcagcttgaccagggctacacctaatcctccacaccatcagcatcactgtagaactcctcctctgatgaatgattgcaaggtgagtatatgacatactcagcaagccacgcagcaaatatgcaagtgcacaggataacaaaggatggcatagtagggtttcatttgcataaacaacatttaataaacatttcagaatttaataaaatagttaagtagtaattaaacaatattaatccaacgctatacaacataccctgttgcataggcccaaccattctgaacaaccatcccggctgcacagttctatctccaaaccaggaatataccattccaaaccaggagctaatcaaattattaccagttatagcatcttttattatggtgagaagtgtgaaactaatcacgaaagacattgttagacccgttcataactgcgggcatggctattcgaatagttttactctggccagaggtataccactgtacccacaagatacagccccacaacatgtcaccatgcgcctcaataccaccacggtacctcagaaaggggctgtgacagtacccctcgcacaacacaatccaccacagtgcaccattcctggatcataatcacccccttataaacaaggcatgaactccccagcgacccccgtgggcttatcttcgccacttctcagtctggtgctccgcaatgaactatgctatacaaaaggtaaagccgttgcccacgctggcttgtggttggcacggttaatgtttcacaaccgaaactcgtgaaccagtccttaattgtcatgagcacgaccatcaaaaccatgtgctcacaacccaccattatcaagttttagttgacaaattaattaattaaccaatcacgattaactatcatgagctatcattaagccatcattaaacaatagtgagtcataagttatcccaatagtgtactaatgtttctaagcatggctaagcaatcgtatctaatatctagctgaaccaatatataaagcccaactagtcaagttataataacccaaggtatcaaggaataaagtaatcaagaacaaaagggctataacaaacaataggttaattccacccaatgacattcgaaaataaatgcaatagttgaatagaaacaatagctttaaacgggatcaacatgctcaaagggatgtttgggatctgtgtgacttgccttgctggccttggaactcttcaaattcttctcctgcaaaaacggactctccggaaacgtcggaatctaaacagaaaggatcaaaatcaccaaacagcacataaacaagcatgaacagtacatgtggatatttttaacatgtagatcccaattttagaaaaatttagagacttgaaccaactaaatccgagctaagatgaattagttatgaattttcaaagattaaatcggattaaatcacttatatgggttttaattgaattatgacgcaataatgaattatttttgaaaagggaaaaggggtttattgtgtcagcggctagggtttgcggtggaccgggtgcacggcggcggctcacagaaacgaacggccgagatccatccatccaaaactgacggccaagatccatcggtccacgaccgggccacgggggacgacgacgatgacgtcagcggtgacgtcaccaccggcggcggctcgggcgtgcaagctcaccggcgaacgacggcgcgacggcacgaacggagggcaccagcacgtagagagcgacgcggcgaactaccggtgaccaaaacggcggcggaagatcaacggacggcgacggcgtcgaggaagaagcggcggcaaccttcggcttgacgacgacggcggtgctccggcggtctacagcaacgatggaggggcggacgaggacggcgacgtgacggcgaccacgacggcggccttcccgagcgacggcgacgactggagcgacggcgacgcacggctggagcggcggcgacgacggcggcacgaggtcccacgggtctagggctctacgggcgaagagagacgaaggcgagggtggcgacgggtagcggaggacctgggggtgcttaaaaaggggctaggcacggcggcgaaggcccacggcgaccggcgacgcgaaggaaaagattagggttcgggagagagagacgaatccgattcgagatcgaatccgcgaatttccaaagcgatttagacgatgtttccaaaagggaaaaggtagagtggatcacagggatcctttcccctcaatcaatttcaccggaaatggaaaggggcggccggatttggaatggcggcggcggtgcggcgcggctagggtttcgtcgggaggaagacgatgaccctgacaggcgggcccctcctgtcagcggcgaacgcgcgcgcgggcgggcggctgcgggccggcttgggccggggagagagagagaaggttttcggccgactttcggcccaaagccaaaagagactattaaaacattttccaatttaaattattcatgaaatgcaattccatttattaaaaatacttccttagctcaaataaatcccagaaaaatctaggaattatagaattaagcaaagtatttaatgaaattttatctggccccattttatattggaatttattaattaaaaccagatcttctcttctaggcttttaaaataaattctaataattccaatttagacaacaatttatatatttgggatttttagggtgtgacacgtctttcgaactcatatacacaaatttctctctttaatatatatatatatatataagcaataaaaatatgcttattttgtagtattacttttgaaaccatcaattttaataaagttattgaaagtacaataaattgtcatcaacatgattagcataaattaattattttattcatttagttagataacgttgatatttaaatatatgtctgaccattcatcttatttaagatttttatgcaaatatgtaaaaatatagtcatattcaaaataacattagtaacaatattaatcaaaacaaaacaaatgataaccatatattttttaaacaagattaacgatcaaatgtagatttaaacgcaaacataaaaaatatagttaaatgtacaatataaacatatccagaaatacacaggttataaataaaacgtgccaaacggcgcgcttattttctagtatatatcccttgtaagccgaaaggggagagtgcgacagcccaatatatcccctgcgtttgtatccaactcctctatactgatcattgtcaatcggtgttcgtggttttttcccacgagggtttttcacgtaaaattcgtgtcttcgttgtgtgtccattttcataacatcgatgaccctatagagcatggagatctttaaccatagggatgaaatggatgagtgtttgctgggagaatcgcagaactatgcagcgatggcatccgactagaactttttgtttgactgggatttgcatgacatcccgtaccacaaacccagagatcctgcagtgagaatcatggatatcagcaaggatttgatgactccatacaggaatcttgattagtcttgtagaggcgtaatttccaaagagattagttgccatcgacgctgcacggagtgattttggggaaaaatcatggagaggactagacagtaggagagaaaaggaattaaggtgttatttgccaatttaccggtgtatgtgtttgtagttttatatgaaaacgtccatcttacattataaccgtccgattaagatagaagggcgtacatcgcctgagtgcatgagtgcaccagggttggtgggtgcataggacacatcgcccatatcggtagcaacatccgcatccatatccatatacacaatacattcaccattgacatatatctcccaaattcccaatgcccaaaattgaaaattggagagtgtgagagtgtgtgtgtgtgtttgcgtgtattttcttttcatccggttgatagaaagaactcagaatcaaaccggtgaagggagtcccgagcacacccttccatcccaagcgtccttcctttttttccccggttaaccacccactcattaaagtggctaagtccggcgggaacttatcgaccacatacccactattctttcccgacgcctcctttctcttgcttgatggaatagttcaatgcttgagctcctgctttgcttgcattcttcactggggcttgctagatgtatcactcatcctgaaaataaggcaaggagtctgaagtttcttatgatcattacgggaatgaatcacataagttgatttagaattgctcgggaattcattgatagtgattttttttcagttctaggggggctagtgtactcctcttttttatcaatcgagctcctcattctactcgtccagccctcttcataaatttgtacaatcaatgccacgaagatagcaaactcgattgtcgaatatataaggaaagtggcgacgatttggcaccagatatccggttgtgtggaaagaccagctgtgatatacacaaaaaccatcaaacaacaacgattgctcgtgaaggtttccatagaagattccctgttgtgaattcaataccaccttagactggaaaaactattcagaaaaacagaaaagtgaaggctatacactcacatatccgtctagaaagggaaaggcgtcggtacgtcagctatggatatagaataggctatggagcagagacttaaagtatttaccaagactatacaaaggaaaaagtcagcgaaagtgagcacgtaactaagaaagccggtatcagaaaagaagcccttccaaaataaaaggcaaagaagtcaatgattgaagcagcttctctaataaccccgttgaataagaggccgaaggctttttcaaacttatttatagagggggggacttcgacttttgttgtcatatgacaaaaacatctgccgaagggcaggcttcactcaagcaggtggaaaatgtaaatgggaaaatgtattaatctctcaaaaattggatcccctattacatatccttgggatctacttatttacagccttgggtttacaaccctagggttcttctatactaatgaatttacactgcccttgtggtagggacatttacaaggacaacagaaatcttttggcctgacctaccgacccgtgggccctgaaggcccactcctaggctgcttattgggcttccttgagcaggggtcacatgtcgccgaaccggcttcgccactcagtggatcggcttcgctttctactggctgagctacgccaactgcgatccggcttcattattccgtgttctgctttgctattcagtggatgttggttcagtcgaatgtcctcatgacatgcctccaacaagcccctcacaggcaacggtgattatggtgcctcaaccgagaccgtgttcgacacctggcaggatatgaggtgccacctttaggcctatgttctagtcgaaacatgttaagaaaagaaaaggtgtgaggacccaaaataggacctcccgtgtataagtgttaatctaggatcaagctagcacacacagacacaaagataatatcacagccaacataacgaaggaaacctaatatttattaataaagtgactacgataagccttatggatagattttaccactacaagataattaagctattgccaccaaattattacaacaaaaaataatttgtagcaatatattacactattgcaatgataatttttctatggcaaataattattttttattgcaacgatctacaatcgttgttttatttagtacttttgttgcaatagaaaatgagatatcgccacaattttaatttttgtggcaatttatatagtacatggtacttttcactattttttgttgccacgatcaacaaattcgttgcaataaaaaatttatcgtctcataatttaacttaattttttcatatggacacggattaagacaaatttaatatggaaattatagctctcgacgatatctacaattttataggtgataaatttttcatttgaaatcttttagatattcaaatctcagttagctaggctcaaatggaacgatatgcattttccaacagaattgatgcgtaggtgagttggtaaaggagagcatgcgtgaaggataggtcttgagttcgaatcctagccaagacacaaaatcaaaaaaaataagtagataaatagataggatgatagattaatatttgaacttttaatttggtacgtaaaactaatgccacatatggagtggtggcaataatttttattgcaacaatgtgaagtgttgcaatatgaatttttgccacatccattccgtggcaacatttaaatttattaccacaaaataaaaatcgttgcaataacctattaccatgctgtttattaccacggctagcaacgattttacaattgtggcaacatgtatctattgccacaattttagtattgatgccatgatttttttcgtggcaacaaatgatttttctagtagtgtatacatttattttgctacgaagggcctaagaaaataataaagtagcagtagaaataagataaacgaatagaggttctattcaacttgccacaggcggccaactgggacacatgtcctactcatcttcagcaacaaactccttgggaaacagcggaaacatttcttctggaattaggggaattgcaaggtgagtatatggaataaaaaaagtacatggaaatatgcatatgcatggctgacaaagaaggcaatgactattttataaacaatttataaacaaatgtttaaaacaacatttataaatagtgtgtaaccaaccatccatccacacaagacatgtccacatcggaccacatagctatattcattaacctgcacaaagctcattcccagttttcacaaactacccctcatgagaaatcaccaagtacatccatgaccgcggatgtggctatttgaatagattaatttaaccatacagaggttgtacagcttaacccaaacgatacatcgttcttttaacggtcatgcgcaagtgtcacacttcaggttatgtgcggccaaggagtctgtaacaaggctctttagaaacttcgcctcaacatttcctttcgccataagatacatttctctcacacaaacaagaaagtacttttcgctaaccttaacacctatcatctagccacctgggccaacaatgccaagacttggaatcctattaggccaggttcttcccatgagaacatgtggttgcacgttacgctcagatcaatcgcttatgaaataaagtctttaattgatcaggacaacatgccaaaactacaatagcatagggtagcagcttaaggacacttagttggccctttgagcaactaaataacacacagcttgacagtagactcacacagagaccataccaggtaacaatcacacacatacattactacctaaccaggttcacacagaaccacccatcaccccaatccaatacgtttgtccacctgttgtttacaaaaagatagcacacagccacacaattcatataaaagtaattataagtatatgattaatacaaattatattttgcttgtaaaacaaccttcagaaaggctaagcataactactttactttgagttgagcccaatattcaactcataaagactaaggtgacaaagtatcgtaggtaatcaataattatcaaatgcaggataacaatttggacacgctacccattgatagtttataaacaaaaataatatatgtattaaaaacattttataaattgggttcaatatgttcaaagaatatatgttcaaagaatgcactgcatcttctgtagcgaactgctcctttgctccaacatctagacgatcacaaacgagaaacaaataaacaaaataaaatactaactaaataacatcaaatgaaatatcaaactgaaccagaaggtacagcatgttttagatgaatttaggaagaagaacaggtcaaatcggagttcaaacagaaaagttataacctttggagttggaaattcagaaaaaatcctaggataaaagaaaaggaatatttaattttgggaattaaattacttttaacaagaaatatttgtggggcccagtggacagtggctcggagtacggtggattgggtatatgaggaatcggctaacgtggacaaacacgtggcgacacatatctacacgttgcgtctatggatgacagggcgatgatgcggatagaaacgtggaaaaacacgtggcgacacatgtcgacatgtggcatctatggatgatagggagatgatgcggatggatctaggccgagctgacgtggcaaggaaaaggattttggaaatccaacggtggagattggatctaggggatcgagcagctgagattgcttgcggtttttttaactgcttgacccaccacgccatggcatgctccagcgcggcatggtcgtcggcagtgcggtggcattcggcagctgaagcatctaggcccccgtcattgattttggtaattaatgacaagcgctaattgtggactaactatttccttgagttatacattttgatttaggaccacgtaatgtgtatgcatagaggatcaccgaggactaaattcgatggcgcaaagtaaaaagaaggaagacggtaaaactagaggtttatttttaattgatcgaggagttgggcgatcaaaaatttgctagttttatttaggaaaaagtacgaattaccccccccccccgcgaactatcgcggtcgtccgaattacccccctgaaccacaaaaccggacattcttcaacccccaactatgcaaaccggacgaattaccccccctcgacccaatctgcggtgattttggactacgtggcgtacacgtggcagtccagtcagcattctatttataaaaaaaatgtgggacccatatgtcatacactactctctcttttctctcacaatctatctctctcctcccggcgacggcggaggcagcgagcgcggcggagaaggcggcggcggcgacgaggcgagggggcggcggaggcagcgagcgcggggaggcgagcacggcggcgaggcgagcggtggggcaaggcagtggaggaggcgacggcggcggggtacggcggaggaggagagtgcagcggcagaggaggcgaacggcggcagggtgcggcggaggaagcgagcgcgg

SEQ ID NO: 27252 - DNA, 10138 bp, Oryza sativa
  unsure (1)..(10138): unsure at all n locations
ttggcctccctcctccgacgtcgccgggaggagagagagtgtgtgagaaagataattcatccggtttgcatagttcggggtgaagaatgtccagttttgtggttcaggggggtaattcggatgaccgtgatagttctagggagggggtaattcgtactttttccttttatttgtagctttgccatactatcaagaggggtaatgacataaacaaagagatgatcaaaatgccacattaggtcatttgcatttagacttggtttgcttctatattcgtttgcattattctgaccagggtcggtctgaccgaggctgctataccggtcaggccggagtgtatcagccggtctgaccgatggatcggtgccggtctgaccggccccctggaagctggctgtgtgctggtggttgcactctagggtgaaaaatccgagccgctagagccgcagccagtcattccgagccggtggcggtctgagcaagcctaggccggtctgaccggccgctatattgcggtctgacaagccccctggggttagctcaatgatttccctttaatggctagttctctagcgaatacaaagtagttttgtctgaatgcccacactatggcaatttgatcggcagtgcactgagttggggattttgacccccaacggctactttttgtgggtgggagtataaatactcccccaccagtagcaaggggactctcttggcacttgcttcacttgcatacaccccttgcacactctctcacacactcgagtgcttgtgttcatccatttggagtgattgagggatgattagccaagagtcaagtgcatttgtttctttgtagagctagtatggtacttgattatctctgagccgggtcatcgcttgttactcttgaaggttgccgcctcctagatggcttgtggaggtgttgcccagtgacctctccaaggagattgtggagaaggcccggcaccgtttgtaagtggtttggagttcacgaccttcagagtgaaggaagaactacccctggtgaacgattcttgtgtagtccacttcgtgggccggctcccaccttgcccaccccttgacgaaaggggcttgtggtggcttcgtggttttgagcagagaagttgggcttgccacaacggggagtaggaaactggcgagtttccgaacctcaggtaaaaaactccttgtctcttgtctcatttacttatagcatttacatttgtgcaatttactttcaaagagacatatttgagcccatatcaccctaggattgcaaaacttaacttaggtatgcaatttaatttcatagagacatatttgagcccatatcaccctaggtttgtaaaacataacttagtttcttagttaactttgtacctcaccaagcctagcaacttatgttagtattgattaggtgtcatttagttttaaatcgcctattcacccccccctctagtagacatctcgatcctacagcaacgtcgacaagaagaggtggaggcggaccaggtggcgtagcacaagacttcaaggcgacgtgaaggcggtgctcggcgagggatagcggacgctggagctggggaagagaaagggacggtggcagcggtagcgacgggacgtctcccgacggcataacgaagcaacgacaatggcagctactcgcagcggcgatggtggcggcggcttcgggaaaggagggaaaaggggtggcggccggcggctatttacagaggaggggagagctaagattagggcggtgcatgacatgaatttttgaaggtggtgccggttcttatgggaggcggcggcggcgttagttgggctcgggtcgatggcggtgtaggccaggggcgacgtggaggggaggaaggtcgggctgagggcgatgatgagggctcgggcttggcctccctgggcctgtagctagagaggaggtggccgaccggatgtagaagaagaagggaaaaaaggaaaaagaaagaacaaggagggggctacaaggaaaatgggcaattagagaaatgaaaggaaggaaaaagggaaatggatagtgacatttctggaaaattccaaatgtgaaatatttggaattttcaggagatttatgaattaaggaattgaataggaatatattggatttgggcagaatttgattaggaattttagctccacttctgaaatacaaattaaatccaaataactccaactaagaacaacaaactgtaacatcccgaaaatttacaattttctaatcttgcatcatgctgattcttatgttcttaataactttttaaacctaggaaaatataattagagagacctcctgtcacaccctgaaaatttaaaatatataaattgttgtttaaatggaatttttagaatttattttaaaagcctagaagagaagatctatttttttaattaataaattccaatataaaatggggccagataaaatttcattaaatactttgcttaattctataattcctagatttttctgggatttatttgagctaaggaagtatttttaataaatggaattgcatttcatgaataatttaaattgaaaaaggtttttaaaagtctcttttggctttgggccgaaagtcggcccaaaacccttctctctctcttcggcccagtccggcccagtctgtagccgcccgcgctcgctgacaggtggggcccacctgtcaggcctgtcgtctacctccggccgccgccgcccgaaaccctagtttcgcgccgccgccgttcctttccaaattcggccgttcctttccgtttccggtgaaattgatagaggggaaatgatcctcgggatctcctctaccttttcccctttggaaacatcggctaattcgttttggaagttcgtggaatcgagttcgattcggatcggcctctttccttcgaaccccgatctttccatctcgtcgccggccgccgtgggcctttgccgccgtctcctagcccctttaaaaggttccccggtgtctcctctacccgtcgccaccctcgccttcgcctctcgtcgtccgtagcgccctagcgccgtgtaacctcgagccgccgtcgctccagccgtgcgccgccgccgttccggtcgtcgtcgtcgctcgggaagatcgccatcgtggtcgccaagtcgtcgccgtcctcgttcgctccttcgccgccgccgaagaccgccggagcaccgccgccgtcgtcaagccgaaggtcgccgccgcttcttcctcgtcgccgtcgccgtccgttgctcctccgccgtttctttggtcaccggtgggttcgccgtgccgtccgctacccgttggtgcccttcgttcgtgccgaagcgccgccgttcgccggcgagtttgcgcgcccgagccgccgagccgccgccggtggtgacgtcaccgctgacgtcatcgtggccgtctgccgtgagccggtcgtggaccgttcgatctcggccgtccgttttggatcaagtcgatctcggccgtccgttcgcgtgaaccgtcgcccgtgcgcccggtccaccgaaaccctagccgctgacgcaataaaccttcttttccttttcaaaaataattcattattgcgtcataattcaattaaaatctatataagtgttttaatccgattaaatcttcaaaaattcataactaattcatcttagctccgatttagttggttcaagtctctaaatttttctaaaattgagatctacatgttaaaaatatccacatgtactgttcatgcttgcttatgtgttgttttggtgattttgcttctttctgtttcagattccgtcgtttccggagagtccgttttcgccggagaagagtttgaagagttccaaggccaacaaggcaagtcacacagatcccaaataaccctttgagcatgttgatcctatttaaagctattgtttctattcaactattgcatttattttcgaatgtcattgggtggaattaacctattctttgttatagcctttttgttcttgattactttattccttgataccttgggttattataacttgatctagttgagctttatatattggttcagctagatattagatgtgattgcttagccatgcttagaaacattagcacactattgggataacttatgactcactattatttcatgatggcttactgatagctcacgatggtcaatcgtgattggttaattaattaatgtgccaactaaaacctgataatggtgggttgtgagcacatggttttgatggtcgtgctcatgacaattaaggaccggttcacgagtttcggttgtgaaacatttaccgtgccaaccacaagccagcgtgggcaacggctttaccttttgtatagcatggttcattgcggagcaccagactgagaagtggcagagataagcccacgggggtcgctggggagtccatgccttgtttataagggggtgattatgatccaggaatggtgcgctgtggtggattgtgttgtgcgaggggtactgtcacagcccctttccgaggtaccgtggtggtattgaggcacatggtgacatgttgtggggctgtatcttgtgggtacagtggtatacctctggccagagtaaaactattcgaatagccatgcccgcagttatggacgggtctaacaatgtctttcgtgattagtctcacacttctcattatagtaaaagatgctataactgataataatttgattagctcctggtttggaatggtacattcctggttggagatagaactgtgcagccggggtggctgttcagaatggttgggcctatacaacagggtatgttgtatagcgttggattaatattgtttaattattactaactgttttattaaattctcaaatgtttgctaaatgctgcttttgcaaatgaaaacctattatgccatcctttgttatcttgagcacttgcatatttgctgcgtggcttgctgagtatgtcatatactcaccttgcaatcattcatcagaggaagagttctacaatgatgctgatggtgtggaggattaggtgtagccttggtcaagctgcttgtggagtggagccgtctgcgccgtttattttattttccgctgcttagatctttattgattgagaggaactatctacctctgtaatgactttttattcgcttcttaattagagtaataattgtactctattatcaatttgttattgtgtgcctcggctgattcctggacgagggttcacacacatgtaagcgtttggaattttggatagaaattccgggcgtgacacctcctaaaactaacttgcataaaaccacttattttatttaatctcttttatgacttttatttaaaacctatcttgaggtatttcttgattcgatttcgatttaaaactttctttcgctaaaacttcctttatttaaatttagtttgaaaaccctttttacctttatgaattatggtccaagcaaccttcccattttgtgctagaatttaaaccgaagcaattccaattttattggaattaattgttaaacccatcctttgatcttaaacctatccttcgattccaagcatatccttagttccctttccaaatttcaaatatctaaattcctccctttgatctagccatcattaatctctatggcttgatttcctattcggcacaagaatagcaatattgcaaatattgtgaatgattgctcttgtgctaagaagaatagatttttattttatcctcctcttccaaattgattccctattagccaaaaataattcttcaaatatttctgctatcaaatctaggattcaaaccctttttatctttacctccaaccattttcctccgaatatatatattgaggaattatattgttaattcccctctcatttgagtgctttgatatttagtccattatattctatctccaaaaacattgcactcaaataaattggaaaatccctcctttgctaaatttccttccaaaacttcctgttcaaattatttgcagccatccaaacctctataaaaattagacttcttcctttttgacattgggccgaattccccttttccctcctctctttcatgcggcccaagtcggcccagcctcagctgagccgcctcctctctcctcccttccttctgtgggcgccgccgtgcgccatcggagcgcgtgcgcgccgccgccaccttgccgtcgtcgccaaggaatcatccatgacgtcagtcgccgtgccgtgctcctccttctccgccgccaattcctctgcggccgccacgtgcacgcgccgccgttgccgaccaatcaggagacgaggccggcgccgttttctttttccctacgcagcggcgccgtgccttcctcgtcctccaccggcgaaccgaccttcatgaaccgacgtccaccggctataaatagccggcaaacccctgctcttttccccatccgagccttgagctcttcttcttctctctctcctaagtccggccgacgccgccatcggtcgatctcctcctctatagttcccctagctaaatccttgcaccactgactccccctccctccggcgaacccatttttcccgtttttcccttctcccccaccccatagcaaccaccacaaccacctcctttgcagccgaagagaagctcttctacttgccgttccggccaactcctcatctccctctgccggaaaccatcctccccagatgcgcgtcgtccgggaacacaagttgccgccgacgtcgctgatccccggccactggagccccagcgccccttctctctctctgttgttacacgggaagaaggagaggaggaagatgacgggaggaagaagaagaagaaagaagagaaaaagaaaaagaaagactgacatgtgggcccctgcacagtaacattttgtattttccctatttaattcaaatcctattatttagaagcccatatctcctaaaccgtagatccgattccagtgaaacttggacctaaatttatctaaattcaaacccaatcttttgaccccaaatttgctcttttaatattttatttgaatttattcaaatactgtttgaatttatgtttgccttttcaaatatttctttttaatccaaaataccctttagccactaaaaagccgccggttggaactttacgccttccatagcgacgttctcggtttactatccccgacatcggaccgttggttgtaaagccaggcaaaacccaaacccaaggtcgaagtgctgctcctggcaccccacgcctcgatgcgtatagtggtcggagcttcactattccctcgacctccacagcacaccacacagttagctcttgggctctgtgtgatcctagccgctccgccgccactcacggttgtcggagtaacacttcctccccactaaacccacacaaacctcctatccctctagccgttatactctatgttgacaccggctagagaagataccaattctagtcattatactgcccaactctagcaacgaccagcaaacacctaaaccctagctgatatttatcctacctcaatcagcttgctatccagaccccacgccagctagaatatcatcacaaccatttaccctccaactacctataacctatacatgaaatacgagccgatatgctatcctatttcagcatcgactcgagaacaagtaaatcctggccattcttctaccaaagcccaacttcagccaatactagcccaataatcccaagaccctataaaaaagataggctataccctaaaccctagcccttctaaccgtttcttgctttcttgctattttatggcttttattgaatttggttcttcttcttcttcagtagagtctattatatttggatggtaacctgtggtatttcgagcattggataatcaggttgcctatcttgaatttatttgcgttggagcaaggcaagttattattcctctcctttgagcattattatcctatattctatatctcgaatatctcatgcattagtcattcatgattttgaatgcataacctgaacatatagcaaaccagatatatgctagcttttgcttagccatgcctagttagactgcataaaaatataatgaacttagattggaacagtacggtagaaatggttgatttccgggtggctagtactgttccaaccgatataagacagccaagtacatgtgaagaacatatgagtacgaccgcaattctcgtatgggcatagacctagctgattaagttatctagcaaaggtggtacctctgtatagtggttcttcttaagtcctcgcgcaggaggcaaatttatgccgcgaagggcaattgtgatatttaccgaggcacaggtaaatatatgagatttattgacgtcaacttgtttgtgaaccctgattgcgatgacatggtgtcatacaatcagttctctttaaagacctcgggaacgccagaactcctctcgctgctaataacgttacgttcagagcgtatggggactagagttcatggaacaattaccactgatgttagtaaccgaaaagctttgccatgacaaggctaatgtgtttggcacgtcatggattgcgggtaaagcgtacatctactgcagtatgaatattcttaaaaactattcgaatagtcgtgctcacgggtatcgggcattgggactcacaatggcatcttggttagaaacataattccatattttattaaatactattgcattacaaacatcatagactttatacttctacattctcagcctttctgcaagtaaacctagctctacacagatgttaccatttcatgcattcattgttgattaatataatagcttgctgagtacgttgtactcacccttgcttcaacccctctttttcagagtctatttggagtttttgccgaagctgggaattcaatcacataagttagtttcattctaacttaattcgcaaatatagattagacagatggtttaagtctatagccaaacattggagttaagtcattctatagcttttgctgtaatagttagccacaaccttgtaaataccctattattttatataaagaaatctcctttggagccttgatcaaatgtatgcgataaagatccagattgtttaacctatatcaatctactgatttagggcttgatacagttaaacatgtcggtttccgaatcattagttctgggacccaacacaaacccaacagcataattcatcactttgaattgttttgatttaatgaaagttttattaagctaattttaggcaagcaaaccaaaggtgaattttcgcaaataggcgaaaagaaaggaaagtgaaaaaatcaggatgtgacaaaccttcctcccttaaatagaatctcgactccgagattcggactagcttgggaacaacttcggaaactctgccttcaaatcatcctcacgctcccatatggcttcagcttcagtatgatttcactgaactttgtagaaacaaatgctcttactcctcgtagttccctctacaatctctagaatcttgattgaaacctcacgatatgtcaaatctggttgtaactccactaactgcaacggtgtttcctcttttcgcacgcgaagacatttcttcaactaagataggtagaacacatcatgaataccagacatcgaaggcagcagttccaactgatatgcaacttctccttgatgagcaatgatctggaatggtccaatatatttgggggntagctttcctttcacctgaaacctcttggttcctctcactggagtcaccttcagatacacataatcttcctttttaaaggttaaatcccttcggcgattaaataaaccctattgaaataaaccctattgaaatgttaataaggcctacctttaatctatcccttattagagcaactctctttggcctcacagattacatttggtccaaaaaccactatttctccaatcctatagtagatttaatatgcctaaaattactctataaaccctatcgaaaggtgggcgagtctaacatgcacgtgtgaccacgacagattccaacaagccagcccacgtgctagtcggcccacctccttatttcgccc

SEQ ID NO: 27253 - DNA, 892 bp, Oryza sativa
atgttcgaagctgaaggaagaacctacatccatgcatgtcagaaagtggcaaggatcgccatagaagaactccgcgatcgctccagtgatcagttggccgacactgagtatcgctaccatcctcgtcaaccacagggaagtgatcgtgcaagctaccttgagactgaaggaattgagaatgatgctaccacaaagcatttggtggagatgctgtgggctatggatgaaagtcgtgcggagactgtgttagcagctcaagatcgtgaagactggaatcgtggtaagatttgcaaattagaggacaaggtggatcgtttggagaaggaactagccgcgttaaagggagaagcaccaccgcagaaggccaggattcgtcttacagcaaggaagagagctctttttgtccctcgctaccaattggcgccaaaggtccgtgtggtgaagaaagaagttaccctagccctagcggatcctccggtcatcatcataagtgatgatgaagaagaagaatccaagcgcacccattccaaggtcgagtggggagcaactcaagatgatgaagacgagccgaacgagccttcaatcaactccgatgcccggaagaactagagtgacatgtctacccgttgtcttagatcgttgtgttagtttgcttgttttaagtttggttgtgtgtgtttcgcatgtaatttacatcagtggtgggatgtaagtgcatgcgtttgtttgcttttgagtgttaggaagttggtgagtttagtggtgtgagagtcttcagttttgtaataatgaaactcagttaagatcaataaaagttaaagtaattttctgtcctaagtagtttcccccggtttctcttcttgtgccctgtccatgccagatggtgaacact

SEQ ID NO: 27254 - DNA, 938 bp, Oryza sativa
caatccactactccttggaattgagccaaccaattcatcccggggatcacatccaagttcttggtgtctagaagaattagatccgagggaaaaggaatcccctggatttctataggaacggcagagctataatactttgctgtcataacccctccaggggtggtgataagcagagggttcctaagcctttctacccccaactgatttctccccacgaatggcacagatataaacgagtgggaagctccagagtcgaacaaaatggtagcagggatggaatgaatgaggaacgtaccaacgatgacgtctggagttgtcagcatgtcctcggccgtcacgtggttcacacgacaccgaatgacgtccttaccaccgttgttggagcggggaggcgcttggccttgctgtcgcctcggcttcgggcatttatccgcaaagtgcccgggctcgaagcaattgaagcacagacgctgcggacctgaagcgtccctgcggccttgaccaggttgtacagttggcgtaggaggacggggcgcacgagtcccttgctgactctgctgttgctgcggctgtgggacgcgcaccacgaattgaggtcggggcgcggagcgaggttgctgctgctgttgttgctgctgcgaggaggatccccctggatagggattggtgtagcggaccctttggttagcaccctgctgattgcggaaattcgccaagcgacgcttgtgcgactccagttccttgtgtttggctccaagcggatgctcttgtccaccagacgttgaaaatccggatagtccccggagactagacggacggacagctcagggtccattcctgccaggaacttctcttgcttcttctcatcttcccgcacattctccagagcgtaacgggccaggttgttgaactcgtgcaaatactccatcacggagcgg

SEQ ID NO: 27255 - DNA, 1705 bp, Oryza sativa
agaattgacgatttgtgtgagcaacttaaaggtgctaccggtttctctaaatagatcttcgatcagggatcaacagttaaggattaaagaggaagatatacctaagacagcttttaccactaggtatgggttgtttgaatatactgttatgtctttaggacttaccaatgcccctacaatcttcatgaacttgatgaacaaggtgttcatggaatacctggataagttcgtggttgtctttattgatgacattctcatatattcccgaactaaagaagagcatgaagaacatcttcgtcttgcattagagaagctgcgagaacatcaactgtatgccaagtttagcaagtgtgaattttggttgtctgaagtgaagttccttggacacgtcatctcagcaggaggagttgccgtcgatcctagtaacgtggaattcataaccaactggaaacaaccgaagacagtttctgagattcgcagtttcctaggtctcacaggatattaccggcgattcatagagaatttctccaagattgccaagcccatgacacgactgcttcaaaaagatgtaaagtataagtggtcagaagaatgtgagcagagttttcaagagttgaagaatcgcttaatatcagctcctattttgattttacctgatccaaagaagggtttccaagtgtattgcgatgcatccaaacttgggttaggttgtgttctgatgcaagatgggaaggtggttgcctatgcatctcatcagttacgtccgcatgagaagaactaccctgctcatgatcttgagttagccgcagtggttcatgtgtgaagattggcgtcattatcttttcggtactcgtacagaggtatataccgatcataagagtttaaagtatatctttactcagccagatctgaacatgagacaacggagatggttggaattaattaaggattatgacatgggaattcattatcacccaggaaaggctaatgttgtagcagacgctcttagcaggaaaggctattgcaatactacggaaggacgacagttgccattggagttatgcaaggaatttgaaaggttgaatttaggaattgtcagtagaggtttcgtcgcagccttagaagcaaagcccactctaattgatcaagttagagaggcccaaattaatgaccctgatattcaagaaatcaagaagaatatgagaagaggaaaagctatcggtttcttggaggatgagcaaggaactgtatggttgggtgagagaatctgtgtcccagacaacaaagatttaaatgatgcaattctgaaagaagctcatgatactttatactccattcaccctggtagtactaagatgtacaaggatctcaaggaaagattttggtgggcaagtatgaagcgtgaaatcgcagagtacgtagcagtatgtgatgtttgtcagcgagttaaggcagaacatcagaaacccgccggtttgttgcaacctttgaagattcctgaatggaaatgggaagaaatcggtatggattttatcactggtttacccagaacgtcatcaggccatgattctatttgggtgatagtcacagacttaccaaaagggctcatttcatcccaataaagacaacctatttccgaaagtcggtaaccgaattgtatatggcaaggattgtgtgtttgcatggggtccctaaaaaaatagtg

SEQ ID NO: 27256 - DNA, 733 bp, Oryza sativa
cacggcgctagggcgctacggacgacgagaggcgaaggcgagggtggcgacttttttatgatacaccggggaaccttttaaaggggctaggaggcggcggcaaaggcccacggcggccggcgacgagatggaaagatcggggttcgaaggaaagaggccgatccgaatcgaactcgattccacgaacttccaaaacgaattagccgatgtttccaaaggggaaaaggtagaggagatcccgaggatcatttcccctctatcaatttcaccggaaacggaaaggaacggccgaatttggaaaggaacggcggcggcgcgaaactagggtttcgggcggcggcggccggaggtagacgacaggcctgacaggtgggccccacctgtcagcgagcgcgggcggctacggactgggccggactgggccgaagagagagagaagggttttgggccgactttcggcccaaagccaaaagagacttttaaaaacctttttcaatttaaattattcatgaaatgcaattccatttattaaaaatacttccttagctcaaataaatcccagaaaaatctaggaattatagaattaagcaaagtatttaatgaaattttatctggccccattttatattggaatttattaattaaaaaaatagatcttctcttctaggcttttaaaataaattctaaaaattccatttaaacaacaatttatatattttaaattttcagggtg

SEQ ID NO: 27257 - DNA, 714 bp, Oryza sativa
tgtggaattggattcacccctccccctctattcaaaaccctcaaaatggttttatgttgggctcggggtgcatggttttgatagtagccccccggccatataaggaccggtcttcgggcttctgttgcaaagcactaccgtacttccacatgtctagtgggtaaggcttagtttgtggctcagtctggttataaacaaaagtacacggatggagatggacgaagtcgggggtcgatggacattctctagggcaaatgaaggctacacgagctgcggctcggtagtcgagatgtcatggcacagggccggtgtcctgctgctaggggctcagtcctgcctgcctgtcccgggggttccgcccgtaggtggggttgggtcggtactcttgtttatggctaggatgggttggaaactatatcacgtcttccgtccgtataccgtggtggtatgtggcacgtggttacacgtgaggaagatgtgtcttgtgggtaaagatgtacacctctgatcagagtataatctattcgaatagccgcgccctcggttatgggcaagccgagcaatgtacccaagttagtgtttttaattcttaaaacctgcttaacaactaaaatgtggaatggttggcctgggttggcttgggacgagctgggacccagggtcaggttgccagttcggtctgaatcatcgtaggccttgggttaaggcaggttc

SEQ ID NO: 27258 - DNA, 1312 bp, Oryza sativa
gaagaaaaattcaaaaagatcaaccacgtatacacttacatgtatggttccgatgaagaggatgaatccaaagtagcagcagccgagtgggtcaggagcaagaaggttgtgccatgtcaatgggtgagaagttctgggaaaagaggaaaatttgattttgatatcaccaaggttgataagattttcgatttgtgcttcgggaaaaacaaattcaacttcctgctggtcatgtaattccatcggctgaggaactaggcaagaggaggtattgcaagtggcataattttggttctcataataccaatgattgcaaagttttcagacagcagatctaggtgtccattgaaggggggaagattaagtttgatgattcaaagaagccgatgaaggttgatagtaatcctttccctgttaatatggtgcatacagctagaagatcagtcgatgaaaggaaaactcgaggttgtcagttgaattcaaccaggattatcaacaaatatcaaagaaggtatgccaaccagcaggagaggtattgcgaagaagatgatggtggatttgatcctcattgggactgtgggttctttagattttgctggaatgaggagatgaggttgccatccatcaatgattgcctgggtgcagtaataacgcagggagtttaagccgaccttacaatagaggcaatcggctgaatcaggaaaggatgtctgttcgttagagattgggcccggttaatcaagattgctaccaggatggatatgagggcaggaagactcaatgggtccttctggtatttttcacaaaaaatcagaagagaagggttcagagaataaggaatagagaacgctttcaagaagtagagcaggaaatcaaccatcggggttagaccataccagcagccgccaaggagatgcaaagtcgatatgctcgatgttgtcaaggctgaggttacacgtttatatgatgctggtttcatccgaccaaaccgatatgctgagggggtttccaatataattccagttattaagaaaaatggcaaggtgagagtgtgcattgattttcgggatctaaacaaagcttcccgaaaggacgagtacccaacgccggtcgccgatcaattggttgatgctgcttcagggcataagatattaagttttatggatggcaatgcaggttacaatcatatctttatggcagaagaagacattcataagactgctttcaggtgtcctggtgcatcgacttgtttgagtggattgtgatgacctttggcttaaagagcgctggagctacatataagagggctatgaac

SEQ ID NO: 27259 - DNA, 6866 bp, Oryza sativa
ttttatttgagccgcaggctcttggatgcagagacaaggtattctcttgtggaaaagttgtgtttgtgcttatatttctcttgcacaaagttaaggcattatctattgtccaatgaatacactgtgatatgtaaagccgatgtggttaagtacatgctattggctcctattttgaatggaagggttggaaagtggatatttgctttaacggaatttgatcttcggtatgagtcaccaaaggcaattaaggggcaggctatagccgattttattgtggatcatcgtgatgactccatcggctcagttgacattgtgccttagactttattttttgatggatcactgtgcactcatggttgtggtatcggcttggttataatttcccctcgggggacaagttttgagtttacctatactattaagccctatgcaactaacaatcagtctgaatatgaagtggttctcaaggggttgcaattgcttaaggagttgaagccgatgctatcgaaattatgggtgattctttgttggtgatcagtcaattggcgggagaatatgaatgcaagaatgatacattgatgatgttgacgctttttcgtgtccaacacaaaatcaccgaatgatttgtggtgtaaacaatagagtcgccaaaatcgatagaccaaaatcggctagtgaaaccgatttcgagattaattcactttcgcggaatcacacgactaatttacaagcaaattagcaaagaggataaatatcgtacttcagtcaattggcgggagtatatgaatgcaagaatgacacattgacagaaaggctatgtgctctcggggggtgacagatactttgcccatgtatgcagctatgtagccagaccagccacctatggtttttgttttaaattcaaactggttcttggaattcatggtcatcggattggctgaagaggtgacatctaaaccagtgatcatgatgacatcaagcagagtgagggtcatcggcccttgattgaacaggaaggtgttgagcgtgttgaaccagaaatatgttgcagaagccatcaggggttcatccttagccgaatttgctaaagtaagtgcaagggcttggttaattccgagttcatcccagagaacttgcttgctttccgacacacgtttgtaccatacgggccaacttttctcaggagaacttttctcaagggaaggccaagacttgaatgtatttttccagtgacctagatttgggttggccaatctaaagggtatcctattggtttcttcgctaatgaacttagtagggtcggaatcgccgattggaccaaggaaatactaatgctcatgagataggctgggaatcgcaaccagattggaaagatgctacaaatgcaaaaaaaaaaagaacagagaagaagaaaacaagatgacacaaggaaaaaccgatctattgcataaagaagaagatctagccgatgggcacgtacctctgcatactcggctgatggcgcggcggacgggctagcggaagtcgacatcgctgcgggcagaagcttggccggagggagaatcgccttaagatcgccttgcgcaccgaggggatcgccagagaaagagaagacaaagtttgcttaagcggtgaaaacggaggtaactgtgtgaaatttctcgggggtgacggttagtatttaaagcgctgcggtaacggtcggaaaaacggcaatgagcaatattctaggagaagcagatatggcaaatccgaaatattaccaaatataccggacttggggggcatgtgttaacgaccaaatttggtaattcaggtatcggagatggagataaaatcgaagcgaaatccaagatagaacaagaatcggctaaagtccaaatcggctatgatcaggatcggaagagttcgagtcggactaagtagccgattgagccgattccgacaatgtgactcgatacacgttgtcgggttgagttaatgtgtttcatatggattgcaacgcacggattgagtcctgaaaaggcaattgtatctattaattaggatatttatgtaatttccttagagataagattgggcaaaaatctgtcgcaaagacttatggtatcttagagtttgttagagataagagtgatgtccgacaaggacgtattttgtatctcgggtataaatatgacccgaacccatgtaatcaaacaacacacgttcaataacaatctaggcacatcgccacccttttactttcgtttactttcgacaagttcttgctttcgggttgagctgcatcggcttcgatcttcaactagaggtaaaacttgttatggtggcttgcgttcacgggattagtgcttccatctttatgatactctaatcttgtttatgtaattcattgagttatcatatatcctatataatctctgacaatatcattatttaaccttcaatcggctaacatctatcattggaaggcagccgattaggttaaataccaatgttgacttaaattatatagggtattcaccatcctatgaaacatccaacagcttgattgtctagatattgtccttcttttcatacttatagctgcatcagttgagtttgaccttataagtcgtgattagaatctcaatctctagcctgcttttggttgccgattagggtttcatcggggtttcagccgatcttaccttatttaactacattatatcttatatgcatgattgacatgttaaatccgccctttatgtaagatcttgttgcatttaggtatattaagcttcctgtttgatatattttgcttgctttaatatcttaatatagagtagtatcggagtattagccgatacatgctgctatgaatgcctataatctccttgttaatatatatttcgatctaagtgatttatactatctcggcatggcgaccgatcaatcccaatcacttgatttaagtatatatcgacggaagtattatataccattagtatcttcagccgatcgaatagatttagttctttcttgcctatttacgactgccgatcgactcaaatatgacatcggctcaaagattaatgatacgtcatcggcgactggccgatcgggtatcatttatagatttaaccgctattttcctgtctttatttcttgttaattgcaggatcaaatcaactggcacgctcacgaacctaaaggcaagatttttggacctgcactgaagttaagcagatattccaggccagtgtgtgttttttgcatcaacaagggcagagccttcggcctccgagggcgaagccggagcggtgccgcccctgatggcaccactatctctcccgccctcggcttcgactgatgtagaaacggcgaaagcggcagcagcggcgaaggccatccaggtcagagtcacgtcttgtcatcccaagcaccaggggcgccttcgaccgccgtcttcgcccaaccagcttcgacgtcagcaacgatcaccacctcacaagccaacgccaacctcgaagcacaagccgaagctgatatggggctatgcgtcagaatatggctaagcttcaagacacgcttcgccagatgcaagagcagcagcaagcgtacgaagccgcaagacaagccaaggcccactcccagcaattctatgctcagccccaagttctacttccacacgctgtgcaagcaccggtgtacttcgccagcccacccaagccaacgccgcgcgtccgacacggcagatggtcccggcaccggtccgcccggcagcacatcatgcccagtacccgaagcccactcacaacccgcaagcaatgatgaaagaagcttcgaccttgcaagcacagttccaagcttttccgcaataactcaatcaacaccacaacaacataccaagagcttcgcctccggctcaggccgagggaagcccaagtcagggtgtatcggcgggccagctgttgggacagttcgccttgctaagtcaaattcaagggccctcgcctcaaggtccaccttcattgttcgacccaagtacaatggcccaagcaccaacgactttcgcacaagccgtacctccagagtacagaatggccccaccatcgattcaagtctggaatcaacccatgtccgacccagccacggtgatgcaagtcacttcgattgaccagcaaaaccaggcaatgatattcggcacagcacactagtcaacacccgcagctcaaccacctgttaaagctgtggcttcgccgttcgcacttccataccaacaattgagctggcctgctcaacaaggggatatggtcaagccgggggctgaaaagggtttgcccctcagctgaggaatcaagaatcatcccatcccaccctagtttaagtctctccagtcccacggtattcgggagagatggatccgaaagagttccagtccatctacaaatctgcaattgaagctgctcatggcgatgagaataccaaggcgaaggtaattcacctcgcgctcgatggcatagcgagatcttggtatttcaatttgcctgttgatagcatttactcatggaagcaattgcatgatgtctttgtccttaactttcgaggtacctatgaggagctgaaaactcaaccagaccttatgggcatacaccaaaggccaggggaatcgacaagggagtacgtacgccggtttttgcaggcacggtgccaggtgcaagatataactgaagcatctatcatccatgcagcttcggccaacctgcttgaaggcgaactcacaagaaagcttgcgcgcaaggagcccagaacaatcaaacacctctttcgcgtaattgatggatatgctcgaggtgaagaagataccaagcaaaggcaagagatattagctgaatatgaaaaggcaggtgcggccgtagcaaccaccatacaagccaacgcccaagctcaggtccaagcttaaattgtaagttcagcacctgtctaggttcacccaacacccatggctaaccaaggaccgtatccaaggccgaaccaagcacccatggaagaaattcaggaccgagcgagctagcaaggtggtgatggtggtagaagaggtacaggctctccacaaagagttcaagacccagcaggcaggcggacaacaacaacccttttgcaagaagatcaagaaggacctatactgcgcctttcatggacgctcttcgcacacgactaagcagtgtcgaaacattcggcagcaaggcaatgctgaagtgccaaggcagcagtagccaaggatggtaccttcacagtaccctttgggcaaagtgcttcgaggaaaagaaattacagggcgcctaagcaaatgggttgctgagctgtcacctttcgacctgcactttgtcgcccacacggcaatcatgtcccaagtcctcacggactttgtggccaaatggacacccacgtccgtcctagagcccaaacctgtcgaacaaccatgggtcatgcactccgacggttcgtggtctcacaagggggcatgcatcactgcaatcctgacttcgccagggggtgtaccaattcggtacgtagcaagactgcagttcgacacaaccaacaacacagcagaatatgaagcagcgttaatgggcctgaggaaagcaaaagctttgagaattcggcgtttgctagtccgaactgactcaaagcttgtcacaagctaagttgacaaatcctttgttgttcaacaatcgatcggctgagtcctggcatttcataatactctcaagcgaagcaatctctatattcttctaaaagctctataacttggttatgaattctgcagatagattcttactgatgaatgtcgacctaggtctatctcctggacctataccaatttcttccaaatcatcagccgacatgaaaccctgtccttgcttgtcatcgagatcatctactgtatccttggtgtagacgtttgaagcctccacgacgccctcaaaataataatttgggctctccgtcttcaattggctgtatatcacaatcgaaaacttttagaaaatctccatcccaaacttttccagacaggcaatcaatatcatccatctcccaaagagctaaatcggcactggcaacgttaactgacctgtcggctggcacgatctcaatcttgtcgccttgccattgaatcaagcactgatgcatggtcgaaggaatacaacaattagcatgaatccaatcccttcctagcaacaggctataagaacccttcccatctatgacaaaaaacgttgtaggaacggtcttgctgccgactgtcagctccacattcaaaactcccttagtctccgatgggttgccaccaaaatctttgagaaccatatttgtctttatgagatcatatgaatttctgcccaactttctgaatgtagcatacggcatcaaattcacagcagccccaccatcgaccatcatcttagacatcggcttcccattgacataaccattaatgtacaatggcttgagatgccaattttctgtcccttctggtttctcaaaaactgcctgctctggcgacaaaaccaatctagcagaggtttcctcaacttcatcaacatcggcttgcctggcttcaaattctgccggtagcataaaaaccatgtttaccgatgcagttgcaacacttttccctttcatttcacattatcggaggcttttcagaccttccattatatttgaaagatgaagtgaataattcaagtcatcaaacaagcataatgaaacatacgacgcctcgagagaggaatattggagacattgttaagcccttagcctgccaatcaacttcaggccgagatgtgcccgtcaaaccactccaaggcggtgaccagatg

SEQ ID NO: 27260 - DNA, 2227 bp, Oryza sativa
gaagtcgggggtcgatggacattctccagggcaaatgaaggctacacgagctgcggcccggtagtcgagatgtcatggcacagggccggtgtcctgctgctaggggctcagtcctgcctacctgtcccgggggttccggccgtaggtggggttgggtcggtactcttgtttatggctaggatgggttggaaactatatcatgtcttccgtccgtataccgtggtggtatgtggcacgtggtcacacgtgaggaagatgtgtcttgtgggtaaagatgtacacctctgatcagagtataatctattcgaatagccgcgccctcggttatgggcaagccgagcaatgtacccaagttagtgtttttaattcttaaaacttgcttaacaactaaaatgtggaatggttggcctgggttggcttgggacgagctgggacccagggtcaggttgccagttcggtctgaatcatcgtaggccttgggttaaggcaggttcgtgtgggttcacggccttggttaataatattgtattgctctaggaccgtgtttacaaagtagctttgagcaactaagtgacttttaatgctggttactgcaaaccctaaccccctatattataacccccttgtactcccttgcatttattctgcacttatgggtgtgtcttgttaagtacggtggttgtactcagtcttgctcaatttttcccaaacccagaagaggagcccctggatgatgaaggctttggtgtctagctcgtgcctgccgtcaagcgcctgtggtcgtcgccctagtcttccgctgtttcccgtttgtctttgtgtgtgctgggccttcgccgcccatgtaataaagtaactatttacgcttccgcttgataaactctgaaatgtatcaacttttggtgtaccttgccgcctgggataaggaataatacacgcacgtaaggaacgcccgttgggttatttccggtcgtgacaagttggtatcagagcccccttgaccctaggacgagctttagatcccaagccttagcaatattttcgaaataaaaatcctttcttatttgtgaaaatcctctagtctctctctgtcctgctgcttcatttatcgtcaaaatctgatctttaaaatgttgcttttctcttttgtttttgtttgtagatggccggcagcatcaaccgtcgtggtctggacctgactggtttcgttttggagctgcggggcatgtgcgttgtcttggggtatccgcatggagtggactaccagggcaagcaactcccggagcaggagggtgacgatgcagagccccacgctgcttggaaggtcaccgcagcgatcctcactggctcacccgagaggacttcgttggcagtcactgcgggtggagattccttctccgccgcttgccagaacgccgcactcctcgccatcggcactcttcaccagcgctacccggacgagttgcagcactcgccctaccgctaccaccctcgtcgcggaggagcccgcgactacgccaccttccgggatgctagctcggaggatgacgctaccatcatgcacctggcgcgcatggtggaggcgtacgacgcggcccgtatcgacttccaccagatggtgcgccgcgggttggtcgagaacaacatgaagatcctggagctgcgtcaggagaatctgcagctgaagaaggacctagacgcagtggaggcgcagctgtgtcagctcaagatctcccagggagaggtctgtcgccccaagcgccgtcgcgtctgccgcagcctgaagatcacctcccgcaagagtacctccaggcccgagcttgtccgtcagtccttggcatggacctgtttcgtcgagacccctcgtgccgagcctgcgcccgtggttcctcaggaggagggagcctctggcgttggcagcacagaggatgcgctgctgctcaccttccgccctggcccgtcgcagaagtagacgagcagttagtaggcttgcgcgtgtgttcttctcgtttgtttttctgctagagtcgtgtggggcatggttataccggtgtgtggtataactgtgtcggagcctgtctttattttattggcttaagcaacctgaaccttaacgaacccattttatatcagtaataaattcaagaattatggtagtcgtgggtggttagttttaatagtctgttctctcccttggctggttctgtatgggatatttcagatggtg

SEQ ID NO: 27261 - DNA, 6755 bp, Oryza sativa
catgtagttatgggtaaacaattagaaagaaccatgtcaaatctgagacggtattctttaaatcagccatctcattgagtttaggccagatatctagaggaacaatataagttgtttatctgcactatattaaagtagcatttgacaaaaggaacactattttgcatttaaagattcgtctagattagggacacagcactctggataacagggttacatgaactctctctagccaaggatataatctggtctcaactttataatgattcttggatttccctttttttattgttagtcttcctttgttttattaaggggggagagggcgtacagaaagtaccaggacaaagataaagtaaatggcagagagtatcactgcgacactgtaaacacattaactccgaagaaatttaaagattaccctttcttagtgttcaagcccgttccaactgcagttccaccttgagcaagctgctcagcaaaaaatatgatcagaaatcattcaacttttgcatatcattctaaaaacaaatattgaacattagtgtagtacctgatacatccgtggtaaggtacaaacaattctatcaattccatatttcacctatacatggagttcaaaatagcttataacttataagtatttctgtcaatcataaacgcatagcaattaataaaataataacaaattactggaaaatttcctacttgtgtggcgtaaccgctgaactcttggccaagggtcaatggggtggcatcttgggtatgtgtacgcccaattttaattatgtcttgaaattcaacagactgttacaccaagttgaaacttttgttagaacagcatagatgctatatgaaggaacacactgcatatcatctatcttctggtgttgccaaccagaagtgctaaaataagggaaaacaataatcagctgaatggccagcatacattttctgtggatttattttattgccttcactgataagtaagtgaaccgtttaatcttaccaattaatttgcacgaaagcattcatatgttgcaatttcttgctcattatgaagacaaattaaagtaggttgtgtctaagtgctgagatcttgaggtaacaagtaaaacaaaagtctgccccagccatacacggatacgtcgtaaacaatatgaggttcaattgagagacttcatggagaatggacaaaatattaataatagaaggccttgaaatggatagaaaaacaaaatataaatcaataagaaataggatgatgtgatatccatgcattattgggctgcagttgtctgtctagcagccaaagacatgtgcccaagtaatgtgatccaatgtagcacaaggaaaaaaatagatataatatcaacttgtgatgcacttgatttgagtatcttagaaatagattcaaatgcacagttaatagcagaggtaacttaagaagattgctgcaaattggaattaagccaataggtgaaacacgcacccataaatataaaaggcacaagacaagaatggattttaatgttgggaaacaagagacaaaaaaaaatacctttgaatcaagtgacttatgcaactgttgcaagcttgggacaaaccttgaattgatctctgtggctgctgctatgtgcatgacctgaaaatgtcagcaacataaatcataacatcagcaaaggtaaatgcacattaaaatgacggccaaaaaaatagtgaaatcttacagtgggaaatgtatcatttgaggactgtgatctgttcacatgatcattagggtgtacaaacttctcgccacgcttatgtccaagaatctcagcggccctatttgcaataacctaaattgcaaaagcagatcagaaatggtaagatattacagtataataacacaaacttagctcacagtaatgttaacatgagaattaaacatgataaaataattcaataaagaacagagagatttagtttgcccttctattcagacatcaaagctttaacgcacattggcaggtaccacatttaattattagtaacaaacagtatagacaattcatacaatagtagtgcataatgggaaaaaaaaacctcattggcgttcatgttgctttgtgtgccactcccagtttgccagataacaagtggaaagtggtcatctaactgtccttcagcaacctcctgagcagcctgcattattgccttcccgattgttggatcaaggccatactccatattcacctttaaaaaccgaatgaacaagtgagatatacataacacaagtataaatcacctaagcaatatcatcaacagcacaatctgaaatttagttaaactaaaattcaaagcatggcaatgtgacattcgattagctgtcaactgatgtaaaatattagcagaaaactgaaacaattttgcaacaacgagatgtaacagggaaccaacgtggttttttaccccaaaaaacgtgagctccattgtttattaaatatgtgcacatcacgcatttgtttacatatgttaacatcacgcatttgtttacagaaactatccacagcacataaaaatcgctttccagccttgtgctccacaggacaacaaaataaggccatcaaattcatctactcgcccccacacacgcaggcactaaaatggtatagtctcgcttaataccttagcggcgcactttttgagcaccccaaaggcgcggatgatgggcaccggcatccgctcgcgctcgccgccgatgtcgaagttctgcagcgacctctgcgtctgcgcgccccacagcctacaggatacatacatacaaccacgaaaagcaccccccatcaacagatcaatcaaaaccaaccacggcatccgtcacgaacagatcgaaacacctcctagcaatccatgcgggaggagagagaaaccgaaaccacacgcacttgtcgttggggactcggatggggccgaaggtgtcgcgctcctcgcggaagccggtggagatcgggcgagccagcgccgggcggagcagcagcgcggccgcggccgctgccgccgccggcgacggggcgccaccggcggacgcgcccgcgaggcgccgcaggaccatcgccatctcgtgcgccgcctctctctctctccctcctactaggaggtgtcgtacggcggcgagggaagcggcggctggcgaatgtggggagagaagtcagagagagaaaggcaggcaggttggtggacgacggaggggggaggaagagaacgcgttgcgactttagtactgctacttacggcccattcttactgcacacccaactcatgtaggccggcacgagcgtgcggcccattttgattgtgccggatagctcagtatatcggtttgctttttaggaaataagtttattaaaggtccctcattttgacgccaggttctaatttttcgttctcgaaccatataacgcgtcccttaactttaaaaccagtgtacttgaggtccaagtaatatagtactcggttttacttgacgtgtcgagtggaaacttatatggccccacatatcaggcccatttcttcttcctccaacatcccctctctctctctctctctcctctattccccatcaacggtggggaagggacagaggtagccggtgggggacgggtgaagggaattagagtggtacaggtggccgcacggtagccagcatgagatcgccgctgacaataaattgatggacactttatatatagtattggaatttgatgatgaaatttaaactcctcgtcaagatgagaggcctaatgtgaacttatttcttgtttttataggttgatggagagaggctgcggggtctagctcacagcccacggcttgtttgtctgagtggccatacagatgttcaattatgtctaatttttgtctgtgtctgaggactctgagctctagacttctctccacagttatgtttaattttcttaaatcaccacgtaatttttagaaaaccatttaacacattaatttaaccctagcttaaccgtagtcttgatttctggccccactcctcctgaccgcctgaacagaacacttccctcaaaggtgagcgagcatcgtactgaaatacgtactccctctatattaaaaaaaaactcgtactgaaatacgtgctccctctgtctaaaaaaagataacacgtgacccctcctaatacaatgaatctggacggagggttatccagattcgttgtaaccccttataggttactttttttttttggaagatgaagtatgacccctcctatattgtcttttttttttatgatggagggagtatgcgtgtgtataaatcggagtacaagctttcaaccaactttgatgaaagtgatgtgctcattgttctgcggccacaccgaaggtgtctttttttattaattaaaaaaatattttcagtctaggatgatgttcatacaatcatacaagttcgtttctacattgaccacaagtcgatttcacggcgatgcaacatggtcggtatcaattgaatgcgttgttttcattacctaaataaaaaaatcgactggatacttttttttctgactgttgaaaatagtacactctctgcccggccaattttccactcacgaggcaagaaaaacaggggcatccagttcattaaattaaaattaagtttctattaacaataagtgaatatgcccctatcacgaggtacccaacaaggcaacaacagaccgtaatggcaccggtaaagcgacttgtgaataagtgaaggtagccggagagcttttttttttttttgcagtggtttctcttttaatgacgtgaggagatgttaggttgggagaacaaaaactgaactgatttttccctggaataaaaaaaatatttttgaacttatcccttctttcagttgttggtacgaatatcacaattgaattctgtttctcagaattttgcattgccataatttgttaattagtaaactgtgcaatactcttctttctaataagaaaaaaaaaggaaagaatctcttttattgaaaatagaacggatttgacatactgcttgtgacagaaaacaaagagaaaaactttcgaattcttggccatccaatttgctttaagatttgtgcacggatgaagaattaaaaaatcaaacggcccacgcaggtgttattccacttttgggctgcgagtgtgttttgtagttatattgtgactacactttacttacagtaagtttacagagcatcaagattgtcaggatcgggatactaggtagtgtcattttgcttaaagtaatatcgtatcatagtatcgggataccatgagattttctttttttaagtttaattaatatttatattaattatatatagtcattctatataaaaaatgtagtaatgatatatgtcatgcaaataaagacatttatcaaaagaaacatgttggttttgatatatttaactgatttttatataaatttgagcatatttatttatattattttcaaaccatgctattttaaataatattttatagtatcgtagagatcgtagaatcgggataccacctaagatttcgtaggatcatgtagtaatgaatagtaggatcgatatactatgaaaattaggatactaggtgggatcggtatcgtttcggcttggtaggatcgtagtatcgtaagatactaggatacgaatcgggatactgacaaccttgcagagcataattacatgacatgccaataaaaatataatattactattgtattatatttatatctgaaagttttaaagaaaaacttacaacaactacatcaaatagaaagggggatgtcggaatcgaatgatgcacgaacaagagacttgagagttggaaacatttacctcatcttaaaccaattagcattttttcagcaatattttgcatcatggtcatttacctcctcagacattgtcttgcttgaaaattgtcactactacatatgtagtaatactacataaatcactactacgaaccgcttgagtgactgttgatacgtgctatcagaaatttttttaaccagatcacccaaattcagaccaaaacctacaaaaacaagattatgggattatgaagagaaccacattgacaagatttatattggttcagacccctcataaagagaactatagagattacagtagagaataacagaaccgatgagttaccgattagacctttcttgagaacaacccgacaagatcaatcagcgagttggtttcgagttctccggattatttctgctatgaccgatggcaatgctatgattcgataatcctatacccttagggagccttgtatttatacctcaaactgccttggcttccaagtagaactcgaagaatcttgcacacactagatcacaaggcccaaatcccctccgaataggactctaacaccttccgaatagtcagttttctttcccattggccaaattccttaagactaaggtagcattcccgcatatttgagggtataccatattcatatactctgtaacccaaagaataggaaatatgccttatccataaccttgataaattactaaatttatcatgaatttattataataaaaaatataaattccctttttattataaattgtgtgcatccatcttagattataggatcatattaaaaaaaatcactttgtccggattacatgtaaattccgtgttgttttggacaaaatttgactccttggatttatgcc

SEQ ID NO: 27262 - DNA, 5060 bp, Oryza sativa
cctgtcatccttttcacttcggtcgtttcaccctgcttgagctctattgccgctagaagcgtcgctgccaaccacactgccccgctcgaccttcaccgttgtcccgtgttgccaccagaagcgtagcagcgctccaccgttgaaggaagagtggagagcagaggatggaggtagaagacaaggggctatttggtccaagaaaaatagaaaatgcagccaagggatgtacaggatatatcttcaacttcaataggcttcattctaatttaacaaatattaatgatatattttaaaaaagtaaaatttataatggcatggattgaattaacccaaaaatcactttactaattagactaaattgatttccttttattaacttatagaggtagaatttgatcttacatatttgtaaagtgatatatatcgtgtgttaatatatattgttgaaaaaattgtataaccctttgaatgatataaacaatggaacatctcctcgaagggaaaaaaaatcaatctccgagccctaccaagaaacatttcaagttgacaaacacaaaatgcgtgcaagttttgaaccgtaaattaattggtatcggtatacttaaatataggataccacacgtatatttattatatctatatatacaagactcaaccaagactgattgagatttccaagattctctctacaagtttctgacaaataagaaatgcatcgaagcatcaaggagtgaacaattttcctgaactgttcatgaaaccatgcatctctgatgaagattgtgaaacatctttgatggccttctactcttctagcatccgtgcagagcaggtttcagagcttggacagtgcagagtccatcacggcgacgaagaaatctgcaccaaacagaaaaaaaaaaaacaaaaccaatgattgtgttagtataaccggtgagctggtacctggtatacgacagtgatagaatatgaacttgatcgaaatatttgatcttgatggagtgtaacggcctaccggcatcctccttggtgaagcacagagggggagtgatcctgaagacgttcccgtagaagccgcctttgccgaccaagacgcccatctctgcatgtacgcgtgcaaaatccatggcgatcaatctcatcaagccacaactcgatcagaaaccacaagaaaatgtgtccatgaaaagcttacctttcatgtgctccatggcgcggcaaatctcgtctttcgccggcgtcttgagctgcctgtccgtcaccagctcgacgccgagcatgaaacccgtccccctcacgtcgccgataactgcattcatccatgggagacggcaagaatgaatcaaccacaagcagccatgctgtcgtggccatggcggccggcaactacttactttcgtgcttgtcctggagagcgcggaggcggtccttgaggtaggagccgacggcgtgggcgttcgcctggaggccctccttctcgagcacccggagcacggcgagcccgccggcggtgcacagcgggttgccaccgaacgtgttgaagtagcaccgccttgtcagcacctgcgcgatctccggcgtcgtcaccaccgcgcccagcgggatgccgttgccgatgccctgcacgccatgcaccgtcaggcttgatgttcgatcgagtcatcatgcatggtggcgagcgaagcggaacggattataccttggccatggtgactatgtcggggacgacgccgtgggtctcgaacccccagaagtggctgccgacgcgcgcgaagccggcctggacctcgtcggcgatgcacagcccgccggcgctccggaccgcctcgtacgccagcggcaggtaccccggcgacagctccacgatcccaccgacgccctgtatcgcctccgatatgaagccggcgacctgcccggtggtgccgaactcgatgatctcctgcacgtcgcgcgcgtacttttcggcgtcggagccgaacgcgcccctgtacgggtccgggttcacggcgtggtgcacgccgctcttcaagcacacggacgaacaggtgatcagaatcgagagtgttttcatcgatcggtgatggcattttgtatgtactgacctggacgacgctgaacttccagttcttctgcgcggtggcgcccatggtgccagcggcgttgccgtggtaggagttccggagcgatatgatgtcgtgggagccggtgtacagccgcgccatcatgatggcgagctcgttcgcctccgtgccggagttggtgaagaacacaacctacacgcaacgctcgcgcgcgcgcgcgccatcgatccggtcagagcaagcgtcacaagaatcggcaactggcaaatgccggccgcgacagtataccttgaggtcgccgggcatcttggaggcgagcgcctcggcgaagtcggcgatggcgtggttgaggtagagcacggtggagtgctgcaggcggccggcctgcgcggcgatcgcgccgacgacgtccgggtggcagtggccgcagcacacggtggcgatgccggcgaacgcgtccaggtagcgccgcccgcgctcgtcgaacaggtactgcatcttaccctccacgatgttcagctgcacgaaacaaaaacaaaaaaaaccacggcgatttatcgttaatgaacacactgcagcgagccccatcgtaactgaatcccacaaattacggaatagtttgattgccaagaatactataccaaaattcagggaaatttcaaaagagcacgaaaaattaatttcagcaacaaattagaaatgcacatactggtttggaataaaagtggaagagggacgggctgaggaactcggcgcgcttccgtgcgatctcggcggcggacgggccgtcgtaggggagcgggacgtggttgaagtccgccattctcggcggcgcgacggcggccgtctccaccgccgctgcgagcctcgacaaccctctcctcgcaatcctacccccctgcatcatcataaccacaacccaacctaacaattcaagaaaaccacaatccgttcctcctcctctatctcacgcctaatcgctgatcagtcgatcgaacgatctcctcgacgacgacgccggaggaagaggagaaattaacaggtcaggtactcaggtgtgtgggtgtgtgggtgtgatcagggacgcaggtgtgtgggtttatatgtaaggcgaggggtgcatgcaaccggcaaagagatttcgccggccggtgattgacactatcaacggagaattcgaacgttgcgacgagtgtatcatatcccgctcaaatcccgtaaatttttgcatcatctacgtacagggtgtgtgggaataaatcataattaggcaggcagcagcacacacagcgctgctctcccatgaatctggacctgcttcctttcatgggttacctttgcgattagttagtgtttggggttgagggcctaagtttaacctgtgaaccgggtgagaccatcacaggttcattgaacctagacgtgctatggcaagtaaaggggtaaatggaaagaaaaggtacaccagactagcccaatatacctaacccggcccccacacattggcaagtaaatgggtgagtgcctttttttttaaaaaaaaaagatggattaaaactaaaatatgtggtggaaatagaaacctgaaaattaccattggatcgaaaattaaaaatctgagattcgttcacgtcacttcagtaaaatttttactcatgagtgaactgggagtaaaatttttacttatggtgacgcggacgaatttcggacgtccatttttgatcaaacggtagtttctaagttttcactttatatacatatatatgttttacactacatattttccctcatatccaaacccagatgtacacatcctgggtgatgcaaccgtgaggtttggttgataactcggactgttttgataagtgttgtgaacagtgtataagtattgttagcttgttcagttgtcccatatcgatatttcattgatgagatagtacaacacttaagggtctagccagaccaattacccaaaaagcgtcgtaaggttatacttttacggtcctttataattaaacacttaaaaaaagcatatacctcgtagtgcttatgaatttttttttgatttttgtgttgaaaatttctattatttttttcatatatgaaaatgttgttgaattccgatcaggaccgagaccgaatttgtcggtcctagcatttttgcgttgaaattcggtcttcacttttcaaagaccgaaccgaagactgataccaaattttttggtcagactgaatgcccacccctatgtccacaaaagacttgtattcaacagtaacaacttgtacgtactctaatataagaagggatatttttttctatatttgcacataatagatcttttcacttggatgtattatttgattatttaaaacaagttaactagacagctcatgagagtagacttgtatattggttgagtccttttgttcttacttcctccgtcacaaaataaatatagttttgtactattcatctccaacgtttaaccgttcgttttatttgaaaaaaaaatatgattactatttttattgctattagatgataaaatatgaatagtactttatgtgtgactaattttttaaaaaaaattataaaattttcaaataagacggacagtcaaacgttgaacacgaatttttataactgtatttattttgggacggaggtagtacttcttagcgtgtagttgtgtacatgcactcttgttaaggacaaggacgaggacgcgctctgttgtctagtaatgaaacaatctcaaaggcaagtaacaactccttaaacaacttgatggatatcaatcaagccaatatggtatatatgatggtgattagggaacaaacaatatgatattgatataatgaaactgttctgtgagatgtaatgaaaaatgataacatatcataggaaaatgtcttggtctaatcagatgtaatgaatttgttatgtgacaatgatattgatattgatgttctataaat

SEQ ID NO: 27263 - DNA, 1282 bp, Oryza sativa
ctaatgattatgcataagatataaataaaagaggtgattatataccctacaaactgaatcgcgaccaccagtcagcaagatatcgattgttggatgtagagcaaggcagtacacccgagtcaaatggccatgataagacctaataaccttaaaaatgaaaagaaacaaaatgttacgataatgccaatatgccctgtatactgcaatctacatcgaactataagctaaccttgttttgttcaagatcccaacactttacttgtttgtcatcaccagcagaaaataaatatgtgtgccgttggctcacagcaagccctacaatgcacattgaatttatcagtaaatgaacttataacttatagagtaaaacaagtagcagtggaaggctgctatacagatcctaataaccaatgccaagaaaaacgtaccacgaatttgttcaatatggccagtcaatgtaagcttcaatgttcctgatgcaaggtcccagatctacaacaagacagaatcacatgatgaatgagctaacagcatttagaaattatagtagtgttgcttgttggggaagtcggtttgttgacttaatgtactagtaaatgtgaggagggaaagagagaaaagagatagcctcgtttttctatcagaaccataagatcatccaaaagaaacagctagtaaaaacttaatggccaaataaaccctgataataggacttcacgaacaactaataagcactcagtatttttctgaatcctcaggggtcatccacagagtaacagaacatatacactgttaggagtaacaagattgctagacttgaagaaattgcaacaaacaaacagaaaaattttaatagaattaaaaaaaaaacagacatctgttgtcgagctcaaaactagcccttaaacgaataaaagtgctatatacgagatgaaataaagttgtggtatgctgataccctatgatcagtgcccatactggatatgtatatcaacagaaattagtgtaaagaagaaaggggagtttgtattcatataaagagtgcaagtctcagaaaacaacactttgttgtgtcaaatggccctagcctcacttgccattatcataccacgtggtcttttgttgaagaaaatttgtaagggatgtatagcaatccagcaaaaaattaaatctatgaagatttcagatgtatgccacaaaacgttcacaaacagcttagaataataaaaagcaacataaacaaactaaatctatactcctctaaaagaccccaatggtggtg

SEQ ID NO: 27264 - DNA, 3046 bp, Oryza sativa
gaataattttattttaatttttgaggctttaaagtgtatggcggggttctcttttttaattcctgtcgcaaagcacgggcattcagctagtaacatgtaaaaatcccagagcatattggaacactactgcagaagaagagagcaagctcaccttaatcgtcctgtcggcagaacccgtacagaaccattcgttacttggatcaaatgcaattgaccgcacccatcccaagtgaccactgatcacctgcacacattttgagaaaccattagtgcaaatcataggcaaaactagaaaatccagcactaatgaggaaaaagttaccctataattcttccaaggagcatgccagacaggccgtggccatctacttggtatcctttccatcagtgcagatgtagagaatctgaaatgagatataagccatcagaaattcatatttcagttaaactagaaaattttcaacctgttctatcataaaggatggaatatatacgcttgctagtgtttctagcatgagaggagtttggttttccacctcactgccacatctaacaggagctagagtctaaattcttgcaatgcgtacccacactggtgatcctgttagaccccatcatcgacttaaagcaattaataatctattgagtggcttagcctctctccctccagtttactagttccaggttagggaggctaaatttcttagcctctcttcttggcatcaaaacacacatgccattaggagcctaagaagcacctatacacaatgatggtattgcaactcagtggaacaacattttctttaacaactactacttcaagttatcaaggctgcccacattctaaagacgaaaaaggttagctgatacccattcctgagcaccaagacccacccatatcctaattcacctaagcactagagccactcaaaggtggtgttcataaagggctaaggggaaacgccatgagctagttcaaagtttcaattgaaggcatttctgtttttggattagccacattggggcaacatcaagtgtttgagctgcatatcaacgattaaagcaaagataagtgaacaaacctgtcagatgaaccaggaattgttatagttgtattcttgcctggtatcgttgaatccctaaaaaatcaaaaaaaggaagttctcagtgcctacaattaaaaaaagagtaaacaagttacaggcaagcgaactatgaatggacttacggtgctttggggagcatatgtggtgcaggaacaatagcagtactgctgcctttgttatcagcatctttgacatcttgtgttcctgaaaagatatttgtgagctcaatgtaaaagtaaaatcagttttaaacggaagcttgctatgcttgtgtcaggtgtctcgatttttgcagcacaaacaatctacatcaatgtgcatttgcgtaatactgtaattgttcaagaataccatgagattttacctacggaaaacaaaagatgcaattatacaaaataaaagggcaccatattttacctggaagcgccaatgcagttgaaggtgccgcatcactcttgacctgtcctcggccctgatctgttggtaggttcttcaccgcgctgtactctgcattcacctgaaagatccgacaacgccatcaattattttcggggcttcatcaaccaagcaaataaaggacggaatcttaacaagtagagaacagagacgtgcgaacagaccttgcagccgacacgaacctgcttactgccgtccgccacaacaaccaaaccaaaggggggaaacagtttagcaaacagcgccgttagggttctagggtgaacgatgggggcagagaggggagcgcgcaggatttacctctccggatcgggagtgaagaggagggagtgggtgggcgcgaagaggtcgtgcgagcgcttgagcgacttgaggctcagcttcttcagcgactgcggctccaccggctccgccgtcgccatgacgacttcctgctgctgtggagggagtgagaagaaaaaaaaccagcagtcaggcagccatcgccatgaattccgatgaacaaaacgcacgcacacacgacagatttcagctaaagctcgacctagatggtactagatgcttagggtttgtcgcctctcaccgatgaacgccgccggagatacggcttcccctgctcttacgccgcgtgagccctgcagatccaagcccgcctacctcctccccgtcgggccccgcccgtcgccgccggccgccctgctccggtggtgtcgctgctcgccgaggcggaagagagagggggaagcagccgctgtgacggcgcttcgcgaaccgcgagtaagcaaagagattaggagaggcggcgcgttcaagtgggccgcccgcggagcacccggcccatcagtgagacgggcacgagttgggccttctgaatcgtctactataggaacaagttcaccggaagtccctcaacttaacagcgagatttttttgagatccctaaaccacaaaaccagaaatgtgtacccctaaactctcacaaacagttcaaaggaggtcccatggcagtatatgtggacggattcgctaacgtgacatcctaatcagcaaaaaaaaaaaaaaaagtacatggggcccacaagtcagttgcacatcgtttttttcttttcttttcttctcctcctcttctctctcttcttcacagagtgagcgcgatgggagggcgggggcgagcgcgacggttggtccgcgcagtagccgagcggcggtaggtgagcgcagctgtgggcggaacgacggcgggcggagcggcgtcgggatgcgggcagagcagcgatgggcgatggtgggcgagcggaaggcaagcgcgacgggctgcgagcagagcggacggcgggcgagcggacgagcacggggggcggaggaggggggcgcaacggcggaggtggccgaagcaggaacgtggcggcagtgggcgagctccgcgcggcttactctgccagtcgcgtcggcggcggcggcgagagtggcgcgcagagcggaca

SEQ ID NO: 27265 - DNA, 9046 bp, Oryza sativa
catgggacccacgcggggcccacatgtcatcgtggccacgtcagctcctctctctcccctcttctctatcactcttcttctcctctatggcttgggcaggccgaccgacgggtcacggcgtcacgccacgcacgagacgctggcgtcacgcgagacgggcgggtgcgctacgaggagggaggggacgaggcccacgaggcgccaacgggagaatgcgctgcgggcggcgggggaggcgaagagtgcgggtggcagggggaagcgcagtgcgcgggcggcggggggaggagcggcgcgcgggcggcgaaggagcgactgccgacggcggaggagcagcgcgccgggcggcggcagacgacgcccgagtcagggttcgtcgacccgcgccgccgccgccgccgtggccgcggacgacgtcgacgtcgacctcagcatcctcggcggcggaatgaactacatcagctagctcaccggctggcgtccggcatccatggccgtgacggcacagccgcccacgcgtgccgagggcgacgtcgtccgcagtcacggcgacggcagcccgggtcgatgaaccccgcctcggcgtcgtccgcgttgctgtaccgacgctggactacgagcaaagaatagcgctgcggtggagcagcctgtaccggcgcatcgtggtggggcacggtggccggccagtgaggcgcacactgaggacctgggatgagggcgagcgttgcctcggcaagtaggagctcgcccgccgccgctcaatctgacaatggataatcagagaaacaatcaacaattaggactgatatgtagacgtgaattgaaattgccaacttgtagtgattcctggtacgtcacaagcaaagcatgtgcaggatggccggagtggcaggagacgctgcagccggcgccggggatgccatcgctgcacgcctgcacatgtcgcttttgtcgtggaacaactctggcgcggcggaacggtagcacatcatcttcgatctcgccctggttcgagtcaattcatcactagagagagccagaggagcacgagcccctagccccgccgcggatggtgcttgcggaggcggcgttgtggtcgtggctggcggcggaaccacgggagctgagggtggagctgggccggctctgctcccgcgtcgtcgcgcgcagagtggagctcgacagcgcgggtgatgccgtgctggtccttcctggccgttgtcgaccgcgtggccgtcgccgaggtcgagcttgtcgcctcgccacggtctgctcccgggctcgacgcttcgcctcccctgccgcccgcagctcctccccctgccggcccctcgtgggcctcgtctcctccctcctcgtcgcgcacccgcccgtctcacgcgacgctagcgtcgccgtcgtgcgtggcgtgacccgtcagctggtctgcccaaatcacagagcgaagaagaagagtgatagagatgaggaaggagagaagaggttagagagagaggagctgacgtggccaagctgacatgtggggcctacgtgggtcccatgctgactcagccgccacgtcggacaaaactggggtcaaaaccaccgaaggacctaaagtaaatggttttgttagttcaaggacgtccggtatctggttttgcggttgggggacgattttataactcgatgacaagttgagggaccttcggtgtactttttccttctaaaaactacctccaaccaaacgggccgatatagtttcagcccattacagtgcttgggccgacgaggctgtaattggagtatttccatttcctctctcttcgcggagacttatcgtctctcttccattctgcttgaactaccgcccgcgccgccgatggccgccgccgccgcggcgacgtggcgcctctggaggccctactcctccgctctcctctctcgccgggtgaacccgaggttcctccgtactacgccgtgcgtctcctaccccggcggcgccgcggcttctgcggcgccaccctcgcctccgcttgccaccacctgctccgacgattggggcggcgggatgaggtgggagtccgcgcggaagaagagggtcgtgctccgcgtaggctacgtcggcacggagtaccgaggtttggtttgtacggccggatgagatgtttttactgctccgattctttggagttggctgtgcttattcagtgtgctatggcctccttttgtccttgtaggtcttcagaagcagcgggagctcagcgcggactcgagtaagctctgatttgtatgatgttgatgctaggtgctgctgcttcgttcaggtgttgagaagttgagttgcaatgttgcgatcaataaatagaaataaaaacagttgcattgcaaaagtctgtgtggtagaactagaatattggtatttagtttcatcctagctgcatcgaattgttaatcacttgttctatgcatagacgtatagtgccttgattgttctatgtatagacatataatgcttgctttgggcgtgtcctttgccatcaactaaaggacaatctaggtcgaagtattctaccgttaacactttttatgaaagatccagattgatattttcatatgttattatgacaagttgattgtgagcattaacactatataagacatgcatggagcatctcatctatgagatcggtggtgtaagcattgcatctctgtaaatgttgaatgggttttctgatctctttccgcagcaattgagtcagtcttggaaacagccatcttcaaggctgggggcattcttgagagtaattatgggaagctgcaaaaagttggctgggaaaggagtagtagaactgataaaggggtaggattttacattttgacctatagagttgcacaaatgattctaatgtgttctttctgcttctttttgtctaacaaatgcttgtatgcatgcttagaacgaactaatttcaggtacattcactggccacaatgatctctctgaaaatggaaatccctgatcgagcatgggagaatgatcctgatggcattgctctttcaaacttcattaactcaaatttgccagacaatgttagagttttcagtgttttgcctgctcaaaggttagagactgaaaatcattgatatggagtgattgattgagttatgcatggaaaaacaacttttttattcatggtaccacatgcattcaatctcaggagtttcgatgtgaggagggaatgcttgtatcgggaatacttgtatcttcttcctgctgaaataattggaattaaaggtggttgtagctctgaagaagtaatggaacacctgtcagaattcaatagcattctgaaaggttttgaggtatgtgtatgatcaagtatatcgcctgcattctgtgcttagactgtgcaaaagaacatgacatatgatctctttgataaattgtttgatagcagatgtgtttatggagacacccagatactgccacatagttaaataagaataaaacatgagtttgtatgaccagtaaatacaccagaggttataaatatatcctgtcaatccattgtggaccttgactttgaattttactcttgcgtgttcctggatttgcttagatccagctgcaattcgtgagatggaaaaaatgaagtggaaaaacttatttggcacattttagcatgcttggaatccaagagggaaggtcaagcaggcccagtagcatcactgtgtcctaccttgtcgatttccaattatttgatgatggatgtacttcagtgaagagtttaacaagttcatctaaatactagactaaatttaagtttaggaaccatgtaggggtggtataactaaatagatgaaggactcctggttcattacactcttgcataacagttgctggagtattggacccaatgtgaattgtgaatttgcaaaaaggccagcccagtttgatcctggtaataatttcaccttttgacatctgggctttttccccaagaaacatctgattggtacatagcccaggtgagttgttttgctgaaccatctgaattgtttgttatgcatttcctttttactcaatacagtaattatagacattgtcagagtatttttatctctcattttacagtttattctgcatgtgcacagtttcattaaattggttatacatgtagggaaaccatccatttcataattacactgctcgtgccaagtataggaaagttctagcaggaaggcatcgtaaggtaaaaggggcaagctcagctgtaaattccatgcccactgaaatgagtttggaccaaagctcctctgatgacggaactacttcagaccatgatgaagaagacttgaactcttcgtcgataattggttctagtgtaccagaagacagttataaggataatcccgaattttctgagaagcaggttcagattcgagctaggtggcttcatgagcctgatgaaaatgatcgactgaatgcttcacatttcagagatatcctcacattctcctgtggagagctccagatttcatcaggaattcaatttgtggaattgactatatcaggagtatctttcatgctgcatcaggtatgcacaagaagtgaccccactcatcaatgaaaactaaaattctgcaatattactatgctatgttcgaaactctttgtaggctaattaatagtgatgttctttgttgtcaagggaattgcacacttgataccaaaaataccactctcaagtctcaacaaactagtagtttaagctgtttgactgcttctaaaatccaaactgtagtgttttgttttcactgttaaatgtttaattccttctgaaactatgcataatcagcaaaacgtttggtttgggttcatggtgatctattcactggttatatgccttagtatgaactgcagaacgaatatttgctgtaacagtattaagtattatgcatgcatggaactagtatgaatatgccgtgatgttttttttttttttgacctcagatccggaagatggttggtacttcggtggcggttaagcgtggattactacccaaagatattatagcactgtctcttgcaaagttttctcgcattgtgttaccaattgccccttctgaagttttggtgcttagagataacagtttctgcctgaggaacaagcaagggactatagttcgccctgggatccaatcaatgaatgaatctgaagaagtcaagaagggggtaatggaattctacagggcagctcttgttccagagctagcaaacttcctggatgcatccatgcctccatggaaagaatgggtggagaacttggaccgattcacgagcataccagatccacagctggaggaagttaggagcgcttatagggtgtggaaagcggactacgaccgagtaaaaatggccagaaagagtgccagcagcgactaatttgttgccaagcccatcgcacagtgaatgatgggctaaataaaattcttagctgaagagaaccccatgattctatctcggatatttcttcatacaggagcaggagcagcctgactgtcgggcagagccttgttttgatcatggccagtgagccattgagactgagctattggttgatcggactactacaaccttcagatttggttcaattgaatgtttttgcttaccgttttgcctaagccaatgttatgttgtatcccggccactgcaaaatctttgcagagcaatactctgatcagttgttaaaggaaaaccgaaggtagaaacatcgttaattatctgacgatattcaggcactgcaaaatccgcaagcatcataatcatctggtgatctcgtaggggcatggatgatatgttcctggcatggacgcgcgtctcgtcagtcacgcgctcacgcgtcaaggcagcgtgacctctggagagcttcagtgccctaattgtcgccttccgagcagcagcagcagccaaatcccgtcgtccgagctggaaaagatgatggaagctagtatatcagctgctattactacgctacgctccacaattatacacatcatctgggcgccagagctaggacccccccagcccccaggctcgtccgtgcccccggcccgacgacgacgaccgactgcctcgcgccgcgcgcgcggcagcagcagctctcgtgagccgcatcggcgacgtaacgtgtgcgtacgttttccctggccatcctggccccccctccccctcgcagctggagcaccacgacgacgacgacgcggcttgtcgcttcgcccgggcacggctgtttgtgcgacgacaacgacaaagccacgccgtgtacgcgcgcgcgctgatcgatcggtggtctctctgccttcgctcggagcgcgggcgactgttacgcccatgaagaaactgcgaccgccggcaaggacgacgcgctctcgtctcgctcgctcgctcgcgcgcgcgcgcgggtgggggtgggggtgtctcgtcgatacgtccacgtacgcgctttgttgttttgcacacggggagggagggagggagacgcgtcagtgcgtgtgaggccgcggcccgctcacaggagaggagtcacaggcgggcgcgggaagaggaggggcaaaaccgacgggggatcacgcggcggcacgcatcgatcgagtccgtccgcgggaggggcgtcacgggggcatagtgggtgtgtccggtgtcgtcgagccgcccctcgtcacccgtgtcccctaaacaaacggcacggcagcccgctgcttcccctctctccctcccacgcgcgcgcacgcacgcacgaatctatatgtaatgtaacaccgtcaagatatttgttactatgaggtaggagatgaatttatagtcattatcttttttttgaaaaaattaattagatactccatatatctctatgagatacatcactctataaacataaaatgaaaaaaaaaactatttttagaggttagatttatttttcttcaaacgtttatgagttaaatttaaatttgcatatttatgaagtgaaatatcttaggcatatcttattaattttaaaatattttttatgattatttagatggtgtgtaaaaattaactagtgttacattcccctaagtaatgaaaacagtttacctactaggtgattgatgattgcaaccgatcactccactttgctccatgcatatccagtatgtcacagtatgtcactcgctcgatcttgggaatggatataaatgttatcaacaaacacacacagtgatatgatccgggaggtctaaggctagcttcctttctcattgattggccgccatctgcatgcatggctccatgaattttggaaccggagcgatacaccttttttttccatctggtggtacgctggtatatctacagtgtcaatgaacagtgctactcatgaatgggagagaggtctcgcctatccagctacacgatgctcacccactgggctccatgcttgctctctgctccagccactgtttcagaacacagagccacagatgcatgcatgcatgcaccaaatgccatcaatcaggagcttcaaattaactttcaaagatctttccatcaaaaaaaaaactttcaaagagatcagggtttcaatgttgtgatgcatgctggtcgtagcactgttcagtgagtcagtaatatttagagctacgtactgaagtacagaacgtatgcctctgaatcccatctcatatgttacatgatcttatttgccatagactacatatacatatatcaataattatgatgatatgctccccctaattaacagtagtcctattacacaggaaatgcttcggtgtacttcgtttcaccgaattataggagcctatcatgcatgcatgcgccgccatgtagacggcggagacgacagatcagacaggagaaaagagaagaaattaatgccgggggaaaatggagaaagaaagaataggacagactaatcattcgagcaattgctgcgatcgatcggccatgctcgccgccggccggcgaggaggaggagatcgaaattaacagagctcgatcgatccgcttctgtgcttactcgtcgtcgtcgtcgtcgtcgtcgtcgtggtgatcgccgccgctgccggagcagctcctgatcgcccgcagcacggcctgcttcacgacgtgctcgtccaccttctccatcaggttcttcagttcaggggagagcatatacagagacaaagcaaagaaaaagaaaaaaggcatgtcaaactcttgtcccagaatgtatgccggcctacagtgtttcttggtactgaatcaatcgaaacatctgcctttacctctcgaaagggctcaatgaattctacccaaattgacttgggcttaatttgaattttggccgctaatgatataatttgttagctgattaatataattacctcgctaccgatggcttctaggcggaaggtgtcggtgcaggaggccgtggcctcgaggacgctgaggccgagctcgtcgaaggcctcgaggatggagacgaggagccccgggcagctcttgccggagaagacgttgacgaggaacccgtgtcttagggtttccacggtcacctgcatgccagacaccattaatcacagcagctcgatcagctcatcactgatgagaccagatagttaattttcagacacaaattaatcatgcgtgtagatgcagacatgggagcattgattaatgaactgtgtgtgctctgtctgcgcaacagtgtgcatgcgtgtacgtactggagtagtactagctactgaccaatccaaactccattaactggctcatcagctatagccgctatagcattacaagtatctcgtgcatgtgaacttcgctagagccactcgcaggttggcatctagctagcgcgcgctgtcctctctctgctcgtagtacgaaattaacagaagaagaagagagagagagagagagagagagaggaaaaaaaaaagcaaagcactgtgcaatgtgtctgtgcagtctctctctctctctctcagagggagtttaagctaggtgtgtgatgtg

SEQ ID NO: 27266 - DNA, 10344 bp, Oryza sativa
tgcagacctgacgcacggtcgggtcgttttttttcaatcagtgacgacatgcatgcacatgaaaagtttagcagagagaaaaccttaataagaaaggagagggtgtgattaattacagcgtgggagtgagtgatggaccggaggatttgcagcttctcctgtagcgccgccgctttcttgcgttccctcgacgacatcatcttcgtcctctgtaagtctgtatagcagcagctctctctctctctcgctcttcttaatttcttcgcctctctctctcacacacacaacacaaacacaatcacagacacacagctgaagctggattacgatgaaggcctgataacccaatcgaattagcgagagagatattggcttgagaaagatagagaggagagaaagagaggtgtatagcttgctgctagctggtgagcaagagctgctgctatagtacagcagcttagctagctcaaatggggaacaccgagatgaaggccactactactccatatgtatatagtggcttctctccccggccgtggccactcacgtgaccatattgttgtatccttctgatcatttctctcatctaaatatcaattgaagggaaaaaaaaggaaatgtgtatgcatgagaattcagtgaaggagataaagaagaaaagaaaggaaatattggacgtatgcataatgcatgtctgccatatatgtttactagtataaacctctgaatctatatgagaagggacaaaataagatcgactaacctatacatcgtgctgcatacgacgtcgaagcaagtggacgatagggttcggcaaatattattgattgcttttgtgttccgttctagctttaattttgctactaatacttaatctagatgtgaaatatgaaactggcatttcgagacatggttttattacttcctgggagcacacatgcacatgcatgatatgtatgcatgctactagctaatttaaacaatataatatatatcatcacgcgttatatacagtggatactgaaattccgtaatttgaagctgtaggctgggctgttcgaagaaatggatgatcgatacaaaagttgaattaggcgacaaattgatccatgtagctagatggacgtacggatatggtttggttccagcaatgtgcatcaccagctagaaggaatctgcttgacaagatgcagtgcatcctccatcccgtgtggattaaacaactgaccattatcattttttttatgaaaactgaccattagttatccgaggactagtatatgaacaacttgctgtacgtagtgtgaaatatatatttatatatcggatcatcgaatacataggatgcccccataatggaacacaaatatccaaggtccaaacatcactgttactacatatagtacttagcatggttggtagtagtcctccggccggtaaactgaataaatttctttcccccttttgacagggccagggagaacgatgcgtgtagctagggtagccatgagatcaccaaccaaatgaaacattctgatatgaggtgcatgtatcatgtatggcagccacgcatgtgctgggctggtgaccattcccaacgagagcaaaaggaatggaagaccacggcactagctaagctagctagagctaggcgtcctcgctcaattattttactgctccctttatattaaaaaaaataagagttgctcattgaacataactcaagtagttagcttgtgtttgattatgggacgtactagctaggtaagatgaaacgatattatccctaattttgggatgggatgattctactcgtacgtttgatccataggatgggacgatcccagtttcttaattgatagaaggagggagagatgggatgaatgttgtttgcagttaccgtcagcccacgcccaatcccgacaacatgcttgaactcgacggcgatagactgccgagcggaggaggagcagtatggcccgcgagcgggtggaaggaggagcggagcaagcaggcggaggagtggtgaccgacgggctagcaaacggtcgggcgagcgagctgccagcaagcaggcaggcgcaggtggtgactgacagctagcggtcaggcaagcaagccgtcatgcaagcgagcaagagggcggatgtgggtgatcacacgaaggagaagcaatgtggctcatgccgtgcgcccaacccgttgagttcgtccgcttatttttatcggatggcctggacccggatctaaggggaatactcctctaatgggactaaggttaaaggaagggggaaatgtgggtgtttagcaggcttaagaggatggctagaatagtaatacttggccgggttgagcagtgggaggaaggaaacaatcaggggttagaaggcagtagccaaatgaaacagggaggaacggccaggtgggggaggcaggtattcgtttttccctcacaagctattcccaacagtattttctttcttgacgagattttattttgtcctgaacttgtatttttccttaattagatctaatccggtttctgatagtgagatgcatgagttcaatatttcacatggctcaagataccgccacttgatcttgatccaacaacccaaaatacaaagtgtgtattttatctgctttttttaataatataaaagaagatcatttagactagatttgagagaagaagaaacaagagtacatgttcccgaagggcttaaaatcatatcataacaaactgtgtactgcacatattgacacacatactatgactacatattccccttgtttgctgccctgcaactagctaggagagcttggcagctgggctcgacagaagagggcagcagatacgttcgtacgaggcgataagtttttaatctatttctcttcgagagaatgacgacgcgacggcctggatatatataactagtttaactacagcgtgaccaccgcgtgcgcatgcactgtatacatacgcgcatacggccgggataccaccatgtgagatcgatcacatatatatggatgcattcatgtataccaaaccatataaatctagctatctagccattaaattaacacctacatgtacatgtaaaacgttacgaaatgatcgtatccatgctggcgatcgacttcacatgcgtggcgatcgatagagagaacgagatcgatcgatcactatacagtactaccgacgccgttgacttttcgtccaacgtttaaccattcgtcttattaaaaaaattacgtaatattatttattttattgtgacttgatacatcatcaaatgttctttatgcatgacataaatattttgatattttcacaaaagaattgaataaaaaaatagtcaaatattggttaaaaagtcaccggcgtcatatattaaaatacggagagagtatatatatatatacccaaaataaacgtagtagtagtacatccgtgacggtacgtacttacgtgctaagctagtgtggtgttgttgagttgtggatggttgggtgtgggtgtgggggccgagaggccgacgttaaccagcgaggcatgcatgcagatgcagctagctgctgctgcaatgtgctgcatggagcagctggggaggagctgagctgagctagctttggcgcgggcaggagaggagaggagaggagaggggtgggggaatctgctcgtgatcgaggtgggaggggggaagctagcggccacagcacacaggcgcagaggctgcaggcaggcacctgcagcaggggcgcccgcgacggcgccgcgcgcgcgcacgtcgtcgtttcgaagtgggctcagttattagcaatgcaagccaccacgacgacggcgggcagtttagctttcctaggctcctagctactcagctagcggcacatcatgcaattgcatgcatgatgaatttgttttctttacgccaattgcatgacggatttgtttttttaggtatgtaaaagacaacttatagagatgaatacaaatgtttatccaggtttatccctagaagttagttttttatgggacggagagagtataggtgcgctcacaatcatatttaaatttaattgtttatggagcaatatattattaataatatatttctttaataaccatttagatgacaaactgggtatcatgaatgatcaatttgtgacagagatcagttgcccatcgtagagacaatcatgcaattgcgaggagacatctctatttgtgatatcctggtcccattagaacgagacatgtgtggcccatgacaactgtatacatgtgtgcatatctagtaccacattaattattagttgagcaagaatggaaccaacttataaaagcttgttcatctatatcactctcgggttaacatattaatacgaagcaaatgacgaaagtgtaagtgggccagcccatcgaaagggttgggctaccgcggttcatgtagattgattgatgtttgtatatacaaaacacaattttatcgtgaaaattagaggttaacagttgtatatcaaattcaactttgatttaaaatgtatttaaaacaattgtatcgcgaaaataggtgtgaagaaatcaaaccgaattctatttttaaatttagctccacacaaaactgcatgaaattaaaatcccgtaatttatattgctccaagagaggtttcaaaccgaaaaatccctacacaacgaaataatggtgttgttgattcaaaaatttaaaactaatggtttatttagattgatgccatttcaaaccataccattcttttttaaattatcaaatatgtgcatccattcgtttcttgccaaactttaataaatacataagaaatcctgccaaaattttggcattgtcaaaatttggtaaaatttattttggctacaatctgaacagcctctaaactacaaaatacgatcttcaaattaaatattcctgtgagatctaactaacctttaaatttaactatattatgacaacttgaggtcatgcatatacgcaactgcatacagctgataaattaacctctagctctagacatataaagacacgagcaattaatataatactggtgcaagaatagtgcatacgtgaattatttgccccgtatatatacttttctctgaatagctatggtctattttctagagcattccatgccgcctggctagctcgatcgctcactagcttgcctgctcgctagctggagcttttgtcattccatgcaacagcgtgcatgggagagagctgatgagcacgcataagtacataacgtgataacaatttatactagacactggagctattttgtttttggaagcgatgagagatgtgccgcatgccaaactagtatatatgcaagcaatgcaagggtccaaggagaaatgctctcacggggcggagagattaatttctgccgccgtgcgttgtccggtttccccctcgtgttggcgccagccagcccacacgtgccgatcgcaacaaatcgttggcagagcaatacgaacaaatgggcctttgttcatgagttagcacccagtttgttgccttgcgatgggggacaacgatcgaagtagtctaatcagattgcgcgcgctcgtcctctgtgtggacaagatcgatcgagctagcggcagcatgaatgtttgctagagtatataatactatgaatctgaatagaaatagaataaatatttagtaagtcagtaattaagtgaaagtgggaggggtcgagtagttcaccaagaacaataaatttttagtactaataacactaagacgaggcaaaaatacctttccgacgaatctaggctaaaacaacgattatggcatcaacaggcaacatctatccacaaaattaatagcttgatctttctagttacttcctcggtcctaaaatataagtgattttggatggatatgacatattctattataatgaatttacacagactctatgtccaagtttattgtaataacacctaaaatcccttatatctttgagccgtaaggagtaattttacagctctcttaataaagtgtccaattagctataaatagacagttgcttaagagtcacccggcccgtaaaaacttttaaatatctgaccgtcaaatcacatcgagattcgtgcgtgcatgggaaaggaaataatcaagagtgtaacaggatgaggacttgaactctcagtttcagccgtaagggtgcacgccgctagccacatacgagcttaaaaggttatatataaaattatattgcaattacagtttaatgacgatataattatgctattacgtactcgtattatactccctccgtttctaaatagttgacacggttgattttttaaaaacatgtttgactgttcgtcttatttaaaaacttttgagaaatatataaaattatatgtatacatataagtatattgaataatgaatcaaatggttaaattttttttaataagatgaatggtcaaacatattaaaaaaagttaacggcgttaaatattttgaaacggagagagagtattacatttgaaaaaaaaaattaaaaaagggcctaataatataactatacccccgaccgttagcttacagcaagactgattatattacacatacatgacatctggaaagcgacatgccaaaagttgatgttggaattaatgaatgggccttagcccactcgaagattaattctttggaaaatcacaaaagcccacctcatgggatggcatgcatgtggagtttagtaccaccttgcttattctaggaaagggggacctccttaaaagggaggatgccctcctagccacttgaagcatgtgtggtggagagaagagggggaacacgtgcgcgctcgctcgccaggccgggcccgcgcacaacgtacgacgtacgtagaatggtccgtcaaaattggttcctcaccttgctgcagatgcagcctccttttgcagttttgttttgctgcaaattcagattcgtttttgttttggaaacgcagttttgttttgctgcaaattcagattcgtttttgttttggaaacgttccgaaaaatccggtgtgtgcaaacggtgtggagtccggataagttacgcgcgacttattcggttcggttacgcgcagtggagatggtgcgggcgccctgatcaagcgacccttctctatataaaccgagccgccgccttcacgcaacacacgcgaaatcaatctagggtttgcctcctactctgtgttgcgccgtcgctcgtaggttactccatcccgctcgccggcgtgcacctgcgatcgggagagcaggtctccggaacctctgccttcgatgtcctgcaccgggagaaggcggcaataaggttttttggaagcgcgttgcgcgactgctccctgttcgtccgcgacggctcgtcttcctcttcgctcgcgtgctgcgtgccttcgtagacgcctacgaaaagtttcgaccgagcagccggcctttacgccacctcagtacgtgttcaatatgttgcgcatgtttgatctattcatgttatactgtgtagtttacatgtgtagatctaatgatgcgttcgtgctagttttcatctgtaatgtcatgatttatttatgaaatagattaaatcattatatgcctataatctcaacagttgacgcgatgcaccgtggattcgtagctagagactacaaccagtaccgtagcggtacaatataactaatctctacctatatatgcatacgaacgacaaccccatcccgggaaggcatcatacacacacaaacgtcgtacgaatcgactggacccgcgcgcgtccatcgatcgatcgatcgatcacgacgacgacacagcacggccccaattttcaaatcgcccacgtacggtcgctcgctgtacacgttcgaacatactccacactccgtccagtggcggtggtggctggccggcgcgcgaccccagcgcctgcacgcgcgcgtatactacgcccgttaccatatatacatgcatccaaccggccgcgaccgtggccatctcgtacagtcgcccggcggcgcttctctcgatcgatcgtgagacgatcgagcaggctaaatcgaccgcgcgcgcgacgacgtgacccaccgatcgccgatcggcgacggccgcatgcctcgctagctagccacctcagcgcctgatcgacgaggtaacgcgtgtattgccgcgtgccgcccgggcggacttgcattgccatgcatcgatatgacgatatcctcctcgcgatcgactcgatcgcgaacgagcagtacgcgcgcggttgagtaaacggcatgcagtctcgacagtttttaactctcgatcggtcgggctactattacatactccctccgtttcaaaatgtttaacaccgttgactttttagcacatgtttgaccgttcgtcttattcaaaataatttgtgaaatatgtaaaactatatgtgtacatgaaagtatatttaacaatgaatcaaatgatatgaaaagagtaaataattacttaaaattttaaaataagacaaatggtcaaatacgtactaaaaagtcaacgatatcaaacattttaaaatagggggagtactctactatatacttacatgcagtaccgtcatgcaccgagaaccaagctacaggcggttttttattaaccagctaaacctaagctatctgccggccagtaattaagttgccacatatggtaggagtaataagttcctgttcttttctccaacaaaagttggatgaagattaagatttttgtggcacgtttttaaattttcaaacggtgtgtttcgtgcgaaaactttctatatgaaagttactctaaaatatcatattaatatattttttaagtttgtaataattaaaactcaatcaatcatacgttaataccatatcgttttgcgtaaaaaacttaatctttatcttcatctttagaagaaaaaaacaccacctaagtaagcttaagtaagtaagattctattatgcctgatacgatcgatcctggatcgatagatttgactgttgcccggtccggccagatcggccaccaagaggggaagggtcgtgtaggttttccaaaaaaacaaataataaaaaaatgaaaagaggggtcgtgtaagctggctgaaaagctgtttgtgtaggccgccggagagaatcgaatgtgacgcatatgcctccgccatcccccttccctcctttcctacacggctacacatatctaatgtgatgtttggatttagggactaaactccctgtcacatcggatgtttgacactaatttaaagtattaaatataaactatacttacaaaactaattatataaatgaaagctaattcgtgagataaattttttaagcctaattaattaatctataattagagaatgtttattgtagcataaaataggctaatcatagattaattaggctcaatagattcgtctcgcgaattagtccagaattatgaaatgaattttatcattagtttacatttaatacttttaattagtgtctaaatattcgatatgacagacccatccaaacaccccctaactatacctcttgtgtgcacagaaaaattttcacatccatcgtctatcaacctgaggtgacctaagctagctttgtatcactgtctttgatggcatatgcgcagcaacattccacatacacattcccctattttattgggcaaacaacccttttcatcgatctctctctcgcccgtgttagggtgcatgcagggaatatgttgctgagctgtacatggttttgggccacactaggcatagccctcctagtcttcacttaaaatcaagacttaattaattactccaagtcgtaatcgtacgtccgttaatgaatcttatcgcctcagatcacaacacgtacgtagtctctacaataatagcaactatatattagtacgcaaatgtgccaatgtgcatgcatgttcagaactactcctagctaagctagatcattgatcatatatcgtcgtacatataatgtacttttcctgctggtttacgtcattttctaactggattaattattattccacacatatgttctaacttcagctagaacgtgttggaccagctacatactccagcatcttgtatgtggggctagcttactaccaatatgatgataagctattggtgataaccatcgatctctcttctaactctcaggcagaattgaagctctctcgattggtagtgtggtgtgtaaccatattaatgtagagagaaggtacagtaagggggactgatttgggggagagagagagagagagagagctggcag

SEQ ID NO: 27267 - DNA, 10695 bp, Oryza sativa
ccaaattggatgattctttttcctaaatgtttctaaaatcatgctctatcatgttatctgtgttgctactgttattatttaggccattttttcttgtaactttgttttatcaatttaaaatttaaatttcaaatcttcaaataatattatgaagcaataaacgatttcagctgaaaaagtcaacaacaacaaagttgtataactcatcgatatctataatttctattttggtcatttcttcatttgacaaagtgatactaacattttcacaaaatttacatctctctcttatagttataaaactatataatagatatgtacattttgtgaataatcttacaaatcactttgtcggatgaataaatgaccaaaataaaagttatagatattaatgagttacaccaatttgttattgacgactttttcagttgaaatcatttagtatctgaaaatgttgtttgaagttgttataatttgaaattcaaattcagactgttcaaacaaagtcatatagaaaaatgaccaatacaaaagttgtagatcttgataagttatacaactttgtttttgataacttttccatttgaaatcatttactacctaaaaaactatttgaatttcttatattttaaaatttaaattttatatagttcaatcaaactcggatagagaaatgaccaaaagaaaattggtagatctcaacgacttctacaactttatttttggcaactttttcatatgagtttatttaagaccataaaattttattcgaagttctcacatttttaattaattttttaatgcttatttttacatgcggaccacttaaggagccgcatgcaaaaattggtccacatgcaaaaatatcaacagttttttcagttttttccctcctcaccacttcaaaaattttcatctcccctcctctcctctctctctgtctcctctctctgatatcctcacccctctctttttctttctcttcctctcactctctttctcttcctctctctctctttctctcctttgcgcgtggccaacgagggggcgccgagcagcgggcggtaggcggcgtcgagcagcgggcggtgggcggcagcggctcggcggccgacaacgacgacggccgcggtgggagcggcgacggcgggcggcgggagcggctacggcggcggcggcggctcggcggccgacaacgatgacggccgcggcgggggcgacggatccgatgctgccgccgacggatccggcaccggtgacgacgatgggtggcgggggcgatggatccgccgccggcgacgacgctgggcggcgggggcgacggatccgccgccgccgacgacggccgcggtgggagcagcgacggcgggcggcgggagcggctacggcggcggcgggctcgcagcggggtcgcggcggcggcttggcaacctcggctcggtggccgacaacgacgacggccgcggcgggggcgacggatccgatgccgccgccgacggatccggcaccggtgatgacgatgggtggcgggggcgatggatccgccgccggcgacgacgctgggcgacaggggcgacggatccaccgccgacgacgacgccgagcggtgggggtgacggatccggtgccgccgccgacggatccggcgccggcgacggcggggggtggcgggagcgatggatccgctgccggcgacggcgtgcggcgtggatacggcgctccggtggcgggctagggtttggtttggggttttttcgattttattttttttgtttgcttaatttattttcgcatgcggccggtataagcaactgcatgcgaaaataggattttcgcatgcggttgcgccggccgcatgcaaaaagggtgatttttacagacgatttcgtccatgcggttggcacaaccgcatggaaagttggttctcagctgtatggaaaaaccatatctgtagtagtgggtgtcagacgagttagcgtgacaacgtacgtacggctgatccatacacatataggcagcctgtgagcctggtatatatgagtttaaatatccattattccttacctagcttataatccgatctttaatcagcaatactgcaatatagctagtattccctccgtttcaggatataagacggtcaaaatcaaattgttttaagtttaaccaagtttgtagacaaatataataatatttataatactaaattagtttcatatcaaatcaataattgaatattttttaataaatttgtcttgggttgaaaatatttttatttttctctaccaacttagtcaaacttaaagcagtttgactttaaccaaaatcaaaacgttttatacctgaaacggagatagtacggtataacttcaattcgatcctataccatacacgtccgtgtgtgtctctaattaatttctttatgcgaaatgctttcaaattaatttcgacgtacatttggcgcatgcagcgcgtgacgtaggtgcaaatcgtactcaggtagtcaggtataggtacgtggtgtatcgatctgacccatcaggggggcgtcggtcacatgcgtacatacgtacatgcgccattgttcgtatatgcaggctctgtgtgtacaaaacggtgtctaggattctcgggggcggtaaactagctcccaaggctcacgtgacggcggcgagggcgcgatcgatatgaatatgatcgagcggtcgatcgggagagagccgagcgctttggaaagtacactcacatgccattggcagaatgtaccccctgcaggctgcagccatactactggtagctagctcccctgagcataccgatcagatatggactttcatctctagagaaaatatcatctaaatagttatcaaaatatttgatattccctccgtcctattttaaatgcaatcataagtttttcgtacccaactttaattgttcgtcttatttgaattatttttataattagtatttttattgctataagatgataaaatctgattagtactttatgcgtgacttatgttctcgaatttttttaaaacatttttaaataagatgaacggtcaaaatttggcacagaaaatcatggcagcacttacaatgggacggagggagtaataaagagtaatacatagtgtgaaataccacaaaccgctataccaaattcgatttctacaaattgcaacagaaaaataaattaaactgaaaaaagtaatcgtacatttataattatatttgttatttttgttacaacttgtataagttgaattttaacttgcatgtttatagagtaatatattttatattaatttatcttgctaattttttaataatttagactagtaatatacccgtgctaaacgctacggtacaatatcattgtctttaataacttttaaatttcattttagaaattttctatgatctatgcatcgtatcgattcacctttctatgttttcccctccatgtccattcacctttcaatttttttttcttcctaatatttttctctctatctgttcagcttccattttttccccggtatatttaggttgtgttccctaaaagaaaccactccctccactcgtaaaatggaacgatgaattaacacgtgattaattaagtattagctaaaaatacttttaaaaggattaatatggtttttttaaagcaacttctgtatataattgtttttatgaaaaataacacgcttaatgattagggaagcatgcgtacgggaaacgaggcagtggaggttggaaacctcaataaacaaacgcagccttattgatatttgacctcaaataaaatttataaataaaacacaatacagtactacctcagaaagaaaataataacatcgattttcattattcatacgtgccatcatctctcacaagtacaatacatagatcagatcagaaaacaggtactgcatagatctcagcaccttcagtttgttctcagcacatcatccagcatgttttactgaaggccaacattttttaaaagcactgaaaagcataatcatgtattaatcccttgagacttctcttcataccatcaagttttggcaataaagttgtgtagattaaccgaggagataaagtaattaaccatgcatttatgcataagtgtgatttagcttgcacagaaacatgtatcttccatgccacagtacctatctttagaggtaggaatgaaatgaaaaattgaacaccagttagcccctaatgtaaatcagtaagatatagtccaaacgtagacaccaaacgcggcgagttacggaatatagaacctgcaatacaagaaaagatgatatcaaaatacagctatatttctttttcttgaaaaataatgttctgtaaaggtcaaagcaatccaacacaatcatggtaccccctatagttacaggcccttcccgtcaatatcatatatatgcaagccatcgagatgacattgcaaaaagttattggaaatgccatacataataagatgttggaggagaaaagctcatatatgaaaccaaacaaggacaggccgatgaccatataaaaaacaatacatttcgagccgcatgttatatttttatacaaagaaaagaggaacgaagatttaaaaaaataagggccaaaaaataaccccacatattcgggggctggaccccccattcatataaaaattggatctatcactatgctggaggtaaatatataataaacatggtgtgcataagagtagcagtcccgtataagagtagttgaaaatcatatggccgctgtatctcttctcacgcacaaaaaggatccaaaatatcttgttaataaaaaacaccactcatgcaagatacaaggttgcaataaaaaacctaaactcaatttattcatccatggtagtgcagacatattatgattatagagcaatatatcagaattatctgttgtttcgcatgagtatatttcaggaaagtaaggcaaaaacagacaaacaacaggcacactacttactccgttgatataagaaatttcagcatcgttatcactataatatgaaattttagttatcctgagcaggaatatttctgttatcatctaattaaattttgcatccaaaatggttgaactgtaatgccattattttgactcacaagcaatgagaagatattttcagacagctaggtcaaagttctcattccaccaaaaaatacagaagaaaatccaccaactttctttaaatagttgtgaaataaacaaaaacaatcatgtactggtacgacatgtttcccttttacagagttccaggaagtgcatcgaactatctaagtacaccagcaagacaatgcggctattttgatcattttgcctgaagaaatgaagttttatactccactaaacaaatctaaaactcatgaattagaacctgatgggctgcagacgagatcgagctgcaaacttctagagcccctgctggaattaaactgctctcaagaaagaaaagaaaagacaaacctttgttccccttctgtagttctcaacaacaatgttgataatcaatcaccagataaacaaaaataatggagtacagtgtaacagtgaaaatactgtaaatatatacatgttgaattatctgatcccatacttccccttttgacatacatgtggccaatgtaaaataataatcagcaagaatagattcattcttattttcaactctctctttcagtcactttcgaacaaattctctgtgatttctgagggaaggaatgtttcctacttgacattttcagaaaaacgtattgaagtacaacatactgaaacataaattgtctagaacagcatcatttagtacttgtagttataaactgaaacatgtaactggtaaacataaattcgctgcgagggagactttcctggatggtcgtcagtgacaggcggaggtcgaggacggagatgcagtgtggtcgtggatgacaacatgggcagcgcaggtgaaatagacgttctacggtatcaacggcgccgcaagatcggcgaggtggaaattgatgtccctgccttatccaatttagcttgttgtcccagacaactaagcattctgtataccaagccaaaaaaaaaaaagatagtagcatgcagattagttcgtagccttttaaattcattcatgcacagaaagcatcaaatacccctcacaatctaatttcagccgacaatatatctgataatgcaactacaatttgaaaatttctaccttgtgcacagatagagtacaaaaccacacattgaggacaaaattgtttgatgaactgaatgtaagactgtttatactgcatttaatcgagcacctcccggacatggaaatttgaaaccacacattcagtgaaacacagagaaagaaaatgattgaatgctgcaacgatgaatcctaggcacgcagcggcggaccccgtcgcgctgtaaatgaaagatcggtggcggggtgactgattgggtgagaggagacttacatattagggatgggggagagagagagaagggagagggggatgggggacgaggggctctgtaccttccaacgacaaagggaccgcgtgagtgcgattcggagagacggcgggtggtgcttgaggcggccgcgcgttgccggaggagatcagcaaggcggagggacggcggcgcgactgcacgcctcggccggagaagaaggtgcgcacggctcactggcggcggtgggttgagggatcgggtggcggcggtgggctgagggatcgggaggaatcggcagcgacggcttatcgcgagcggcggcggcggtgaggtgcggtcctgggagggcgagagggggagggatgcgcgagatcgtgggcggaggcgccgccgtcggagaaaatttcgggcggaccgcggacggagagaggacgcgggtctgggagcgcgagagagaggtgggtcgggggtggatttggcaaccgtacgtgaggagggcggtggagtccatcagatccgttggttcaagcgcggatgatacaagtcgttggatttgatgaatgaagtatgaagaatgtagaactgtgttggtgaattatagggtagaagatgacatacacgaaacgaggtatatcccttcaaggaatgaaacactttcccaatagtatgcaacaaaagagtcaatcaaaccgcagcgtagagtaacgtaatgcaatagtatgcgtgtgcccgcatctgctccgtagcgagccggcctatcgatcgcgccatcgcccgcctcagaatcatttcccatgtgattgatatacaatttaactagggctgtaaaaaaaaggtttgggggctcagctcataagctgctcgatctgactcactctatgcttgatacgagctcagctcgagctccagatgagctgagctcgagcctatatatatcaaaacttgctagctttgtcgagccgagctcttgacctcctgtcaagcctaacatgtatattttatttattatttatcaaatcatatttacatgttctttagtgacatattttgaataataatttattacatgctatgttttcaatgaatatgaaattagcatcacatgaaagtacttcaaaacataaatctagtgatataacgtgcataataccttttttagataatacacatgcacaatatttagcatagatattaatatgatcactagtaaaaattatcgagttcgatttaagaaaatgaggcgtctataatttaggaacgagagagtaccatttatatgtatccatgcaatgaaatagtttatattggtatcatgtatttatctttttgtacttattcattaatatgattgaattaaatgagttattttttttattgagaatcatcctcaaaatataagtgcaccacttattatgagctaattaggcttgatgatattcaagcttgaactgagtctgcttggaagctcggatttttcacggactctcgattcgttgataatcctacagataacgagaggatgttaatttcaagagtttagaatatatatcgtcgcgtccccggcccgcgcgacgatcggcgcccgcgcctgcatggctgcgttcaacgcgcgcgcgtcccgacccgatcacatgcatgcaagctccgacgcgcgcgaggggcctcgcgtcgccggccggaggaggcgctggcgcgatgcaatgctgccgtagtcgtagcggtgtgtgcggcgctgctgcgctcggggggagagggaggggggggggggggggttgatccattttggctctggctgctgatgagtgatgatgcatgcgcctgctgctgcgccgtactagcggcgagcgatttggcgtgcttcgtcgtagggatgatgatgatgtgtggactggtatagtacactgctgagggctagtactgccatgcaagttaggtactccgtcgtctagcactctagcacaggtgtataatccctccgtaaaaaaaataaatatataattaaatataacatattttagtacgacgaatttgtataaatatatatctagattcataatactagtatgtgtcatatctagtactagattgattttttatgggacgaaagagagtatatacatgaagctaattaatttctccgttagtttaactacctcttcaaaaatatttaacattaagatgcacttgatagtgttgtggcaaggcgtgtgtcatttcaacccgaggttccgtgtttaatccctaaaacactcacaatttctctctctccaatttttgtttcttttaaaaaaaatttaacatctactagtattagaataagtcgatagcttattttaagcatagtaaaaacgcaggccttcatataaacaagtactccctctgtcccataatataagggattttggtgaatgtgacatattctagtacaatgaatctggtcagacagtctatccagattcattgtactccatccgtcctataatataagagattttgggtggatgtgacatatcctagtaagcgatatggcacaaagcccacctatatcaaaattacttgcatgataatagagagaaaccactaataaaaaccgttgtacatgtccttatagtcagaatgttaaatatttgattagatcttatcctagtaatcaaatattttttactggaagtttaaaaaacattacatggaagatatgtagccacacgcacgtaaaattaatttcaaatgttatttatggagttcaaatattataagataatattgtgatcaaagatgttcactcgtaaccaactgaaaatcgtaaagcttttgttgcgatatggcacaaagcccaccattcgcaatttcggtccattaatattttgggaggatcagagcagctcatcaggcccacgcccaccacaccggctcatctgcgtgtctttccttctctccttttcctatgacgtgaggcgttcttttcttcgtgtcgcatttcgggctccttgtgccaagataaaaggaaaagttcaatgggctttcaaatttcatttcaaaccttacgaatgtggccgaaaagaaaaaagaactaacgaaacgtacgtgagggcttgcttttcttcgtgttgcatttcaggctcgttgcgaagataaaaggaaaagtggcaacgatttcaatgggctttcaaatttcatctcaaaccttacgaaatgtggccgaaaagaaaaaataactaacaaaatgtgacgaaaaaaagaagtgcaaaattgatgcgcatccggggaatcgaaccccggtcagtaccgtgggagggtactatgataccactacaccagatgcgcttgacgcttgaaattaaacgattatttatatattctttacaatactcacttcaaatgacatcaactaaaggcacacttcattgaattttatatattcttctggggaaacaagcttgatttcatatcggtttaatttctgactgttgcatagcactgtcgacgaatttacacatccaaattcccctaattccctctttaaaaataatttgggaaatcaacaagctcgcactgattgccctctgcacaggccggcgtgttgtgtggacatccccgtcaacagtcaccctcctagctgctaaatgaattgcttccaataatgatttctttcatcatcctggcctacctaatcagcaatcaatccggatcccatctgatgtgctccatcgaggcatcgactcaccgcgcgcagaaagcgaagcgcatgacaccatcgacctatcccctgtcactctttcagtactgacgatctctcatccgattcgccaagcaccaaccaagcagttcggccagccgagaatgcaaatttaaccaacacaacattaagcatttgcacatcatcatcacgcacgcagtttattatactcgtatatatatatatatatatatattataagtgctcctttggaacattgagaagtggagagaatctatgaggctgaaatcctatgaaaaataatcctaatcagttctttgcaacaaatgattgtgtggcttccacaaaattctttagaacttatatggaatgacccgtttcgatataattttggaggaaaactagtaagggcgtgttctttctggtttgattttggcttattatttgcacgtaaaacgagatacattattagcatataattaaattgtgtactatatatttaaaactta

SEQ ID NO: 27268 - DNA, 4850 bp, Oryza sativa
cacatatgcatggaaggttttactgtaaaaaaatagtgattacattcgtgcgattttaaaaaaagaacacttgagtgacatatagcttgccccatgcagcttagtacttagggtgcattcgaatatgcttatgaactgagctttttagcctcacgcaaaacataacaagttattaccgtataattaattaattaattaagtattaactattataaatttaaaaataaaattatttgatttcttttattaaaatatgtatatataatacttacaaaatgtagtttaggaaatcgtactcagggaaacgagtaagtaattaattaaccagaaatgggagccttaattaccagtgagtacaaccaggtcggtggggctgagccctttcccggcgaagctagtgacgaagttacccaggtcggtggtcggtggatggaggttggtgttcgccatggtttggttcgtcgtcatcccgtccctcctcccgagctccaccgggtacgatggacctcctagctgcatccatgtcgtacaatgttaatggctgctctcttcgtctaaaaaaaataaatctactatcttatatccagattcgtagtattagaatgtgtcacatctcatttgagatttgtcttttacaggacggagagagttgttgcgttcaattaatttgagacaagctagcaagcttgggatcgacgtacggcgacgacggagtcgcgggcggcgacagcaaggatgtcggcgcaggagacggtctgcctgcaagatgcctcgagttgcatcttaatgctagagatgacctcgaatcccctcagcgagttgacattagggaacgcaccctgctccccccggaaggtggcattgtcggccagcagtatcgacgcgtcgcatccctatgaaattggtaagaaaattaagtctatgacataagagacatgctattgaaaaaaatgtgaataagccataacggttacactgaacaaagtataaagtatatgtctaataaactgtgacaacaaaaaaatgtggtgtggtaaagtgttatcgtgaaccaaacaccctggcctgtaaatcacaacatcctacctagccaattcatgttagtagtatatcccaatagaatttcactgagatcaagaatatatctctttaagcgtgtgttatgaggacacattcgtggatatataagtatagtgttacgtgtgtagtggcatgtgtctatcatgtaatcggaaaaaaaatcatataaagcaatagagaattaagtaaaaaaatcatataaagcaatagagaattaagtataggggcaggagtaataattaagattttaagactaatggatgagacttgcttggacaaagcagtcgtggaagtggagcctgagcagggaggcgcccatgcggggctccctggccaccgccgcgttcacggcgctcctgatcgtcgacagcgcggtcgggcacgacgaggcgtagaacgtcgtcgacagctggcccgacgccgccgccgccaacgccaccaccaaaacgctcaccgccacggcggcggaagagtaggagtaacccatatggtcaaaatgaaatatcacaacttcacaagctctctctcgttgctgtggctttgcttaattggtgctgtactgcttaattacctgcattggcaatgcacacccacagtcacgtatatatatagccacagagtcacttgacaaagccctcgagagctcagcttatagctagctactcccttcgtccctaaatgtttaacgctgttgacttttttaaacatgtttgaccgttcgtcttattaaaaaaattaaataattattaatgatttttttatcatttaattcattgttaaaagtatatatacatatagttttatatatttcgtaaaagtttttaaataagacgaacagtaaaacatatttaaaaaagttaacgccgtcaaacatttaagatggaggtagtattaagcacttgtctttacatgctaattattgtacggctcgtgaacagaaaaccccaaggctctgtggccctcgggctctgtggcagcaactggttagttagcttgtcctgctgcatgcatgcatgttctccttctgcagtgcagtgctgagggactggaattctggaaagatgtagtatatatacggaacgacatcaatattactatcgtggtctcaatcaatgacgacctgtaataactaatcatgcacgcacgtatgtttccataacaacacaggtacgcataatctttggccctaattacctgaattagtagcacaaactgtattgatcgatgcctctaagtatcttcagaataagccgtgttaatcaactgggactcctgaagtgaccgaggttaattgatcttagtggtgttggagagcgctatgtacctgcttgactgtttaattaacgtatacatacgaacatatgcgataaatcatgatatcaaataattcagccgaaatcatgatatcaaataattcagccgagataattaaacgccaatgatattattgttggagcggatatatttatgatttcaacacggcttttcttatctgtttacgaacaaaacgaaagagtgtagtgtgctctggtcctgtcatacttggataaattactcacaaagtttgatcatgggaacaaaatgtacactgtagcagggaaactaatcatcttctagcggttgtggtcagccagctcagtgttagcctgtatcgactaacaacgaacaaattaataagacagcttaacaagaaacaatattcatacccatcagcatagggacatcctttgcggcacatgcatttgcatggatgcatccatcgctgtaggcctcaagaccaagagaaattaaattaggttacaaggctgaaattagatagctcttgtttgcctctaatcatcaatcaataactcccctaaccccaccgtttttctcattttcttgattttttttggctatctggatggtttacccatcgctcctcctcattccggctcctcgtgcacgcctgcatgaccgctcgtaagcggtcactggtccaacgatttttttgggcgctatgggggcgtgcgcacgcgccggtctcgacggcgggttggaacctgtttgattaaaaggatattttgcaaaaaaattccttgtgtttccacgaaatatcgtatacgtccttggacaggttcacacccgttgtgtttgttgcgaaaaaaccctcctatttcacaaatatacaatgtgaagaagagaaaattccgttttaggggtaacgctgtaaatattaaaaactaaggtgttttttcgaaaaaaccaccacatataccctaaaccctaaccagggctgttccccactccctcaccacgcggccgccgccccacccacgccccgtgctcggcgccggcgccggcgcgggactcccctcgcctccgtccgctctccccgagtcacctccgtcgtcgtacgccctccacccgccgccgccgacgtcgtccgtcctccccccgctctccgttgcctctccttgcaggccgtgcgacggcgcggctcgtggcctcgtctccggtgccaccgtagctagatctggccctcccacggctggatctagctccgccgccgctggatctagcggccggaggagacggcgcgacggaggaggatggccgcgatagcttcggacgacgaagcggcggaggccgacaggtgcggcaccatcgtccgccttccccgcgaggggttccgctgccgccaccgtcacccgtcgcctccgcatgcccacacacaccacgatctgccgccggtgcctcctccctccttacccctccccttgtggtgacgtcaacgggacggaaggcggacgcgtccatcaaggcttgaggtggcggcggagctgaccacgcgaccgccgcccgtcggagccggtactccctagccccttcttcatgcgccaccgccgcctcctcgttcttccctagccgtcgtcaccgcccgtactcttcatctccccaatgccgccgcttcctctcttttgccctgtcgtatagcaggccaaacgggcggcccggcccagcacggcatggcacactgacggcacggcccactagggcacggcccgttaggcacggctcctatagcgggccgtgccgtgctggcccacgtgccaaggcctcggcccaagcacggcccaaggaggtgctgggtcgtgccgggccggcacggctactgtagtggaccgtgggctggtagccggcccactagtacatgtggcccataaaaattgaaatttgaggggaaaaaagaaaaaaaagacagaaaaaacattataaatataggataaatgtgaggaaaatttaggaaatatatcataaaatatatggtacaaataggataaaatgtggaaaaaaataaaaaatatgagaaatatatgggaaaaattagaaaatcgtaggaaaaataaatgggtcggtgggccgtgccattccggcacgctaaagtaaacgtgccgtgccgtgctggcctacgggctgaggcgtcggcccaaacacggcacgggataacgggccgtgctggcacggcccacaggctggcgtgccgtgccgggccttggccggctacagtactgccgtgctcgggccggcccggcttggcacggcccatttggccaggtataccctctcgcctcgctcggtggggtgtcggatttgacgagcaaggtcagcggcgaggagcagggccagcggatgtggcaaggtggcgaaggcctcagcagccggcggtgggcgctcaaagcggacgaaagcgaggccgccggcggccccatcaaccgccctacccacca

SEQ ID NO: 27269 - DNA, 617 bp, Oryza sativa
ggttcttcattcgcatgggaggtttcagctgtacaacaagatgcctgttccaccatttcatggtccaagtactgttcgctgctaccattgccatcttctaggtaaaacaaaggatactgatttggtgtctcttggatgaaacaggacgattttagactcaaatcagtacttgatgctaccatgtgatctccatgaaaatgtgtaggcacattcaaggtggcatatgagtcattgttaactaagcactttgaaagatggtgaggacctctgttctcatcttgattattgcaggaaattttcatgctcgacatctcatcccacaatgccttgccaggaccaaggaaggactcacaacgaaatgcatcattatagctttcatctccaatgtctggccttactccacttccaatcctattcaatgtattcttgaaaaatccataaatttcatcaggaataagttctggttgtaacaagagaacttgaccaagcttctgagcaccatacgaaaaagcagtccgaatacgattaaagctggctgccaaaagtaaaatgtctacataaattagtagaagtgaaataatgtacagaaaacccctactatgtgcaagttcaaccgc

SEQ ID NO: 27270 - DNA, 7067 bp, Oryza sativa
aacgaaacaatagagcgtttaacagcgaatgcaaggtatcctgaaaacaacatatcaagtagcattttatcctgaaaacattgtatcaagtggcattttatctggtttattctagtgggtgacatcttgttgaaaccttgagtatgaagtggcatattatccgttttatccccgggcagagaaaacagacatccgggtaccgtgtatgaaatcattcagatttttttttttttggcaagcagcagcttgttaatgccaaccagtcaaccgattacacagaaaacgtacggcttgatatacaggaggttgcagatattctatcttgttgatcaaccgataggactcatacggaaacagcattgtaatcctgcgatgctttctgcatactcctacttgaatactatgtagtcctatcactactgttcactacataatgctgctatagtatttttcactagttcatacgcgatcaaatgattagtcctcgggatcgaagtccctaaccttcacatctgcgtctaccccatactggatgcagttgtcgatgtgcgacagcacatactgaatgctggaaaaagaaatcagggccagttagagagatgaaaagaggagcacacggtacaaacaggtatctgtacatttacaaacttgatgttaagtttttatttcactaaaatattttgcttgagacttgcgctataagttcgaccgttgacttataaaacaaaatgttcactgatggaatgcctaatccccacccagagtagggagtcgaaatagcagttcttgaagccaggatatatacagcacagacactaccatattatttttatggagtaggatggacatgtgtcttcaagagatgcgatacatgaaaagttggcatgcatgctagtagcatgtgtaggacttatagggtaaaggctcacgatcagtcaagtccaaaagagttttgcaacaaaatatgataaaatttaggcatccataggcctgaaattcagaatgtgaagtactgagattctaaaggaaaacggcattacctgctctcttttcttaaatcaagtgggatgaaattcaccatgctgtaatcatcaacctacatgatagtattaagattaataatgattactgatagcactgcattagagcaaaatatctttgaacaaaagaatacattctaaataaggtaatgggaagatagaatatggggttactataacttcgtaacaatcagctcagacagtcaggcatatattatctaatagtagttgattcagaatttcagatatgtacaaaagataaacagcatgagtatacccttttattcaaaatgctcacacaacaaatcgatggttctaagcctcctgttaggagccacacacgcacaaaaaaaaaaaaggaacactacagatggtggtggagataatctcatgaaagtgtcggaaaactcaatagatcagaaactaaaatggtaatagcattaaggtaaaggggcaattgcatctgtgcccccacttttgatgccaattgctgttttacccccattttttagggtttgcagttttacccccattttttgaatctgaaacagccgtctaccctcacttctaacagccggttttaatggtgttagttatagagaaaatgacatttatacccttggtgcaattgtccctagataaaaagtgattatatgaatcagtactccaattcacctcctttttcttttcaaaagtcactagatagatattgacttaatttcaaggttttcatgatctcactactcaatgtttatatgaatcagtacattcctcctgaaggttatacactgatacatagcaaaacattagatcgatttgatatcgaacaaacctcaacgagcattcaaatcaaatgagccctaattatgattcaccttctctccagaagataattaacaaggttttcatggataggtaggagataacgcagaaattagacagagcatcttgtcgatcttcttttttccggggtcgccgatgaacctgccgccggaacggagggaggggacgagtgcggaggcctcgtcgctggtgcatagctcgaactcggcgaggccgtagcggctcagcgtcttcctcacctgcccacgggcgctgccgccgcctcgcgcgcggccgctagggatgaaaacggagcggatacggacggataatgctcataccatattcgttttcatattttttgccggatacggaaacaaatacggatagctcgaatacggaaacaaatacggactatctcgaatacgaataagaatcgaatatgatcggacacgaatacggaaacaaatttttctcggaacacgaaaaccaattcaacttctaatagaaacaaatatcaacatatataattagctcattttatataaaatatagtataatttataaatatttttaaaattttaaataatattaataatgtggactagtgttaagagatgaactactattaaaatctaaaaaagtatattgaaggtcatagagttataaagaaatggggtatgtcttgtggcttctgcggatatccgaatagcactgttcaccggatatccgaattattatccgtatccgacggaaaccctgataccatattcgtattcgtatccgagagaaaatatccgtattcgtatccgtatccgaactatccgagaattatccgatccgaaaggtatccgtattcgtttttatccagagcggacggaaactatccgctccgttttcatccctcgccttgcgctcgcccgcagccgccgcctccgcgcgcgccctcgtcgtcgcaggcgtcaccccacgcgcacgcccagcgctagggttttgcccgaaaccgatgcagggggtgggaggacagactcaccatcctatccattccctcaggggtacataggtaatttcatatttcctaaaacctttttttaattttcttttgtatttctttaactcaaaacgcgggacccaccaaatggctgtcacaactgagggtagacagctggttcagattcaaaaagtggaggtaaaactgcaaaccctaaaaagtgggggtaaaacagcaattggcatttaaagtgggggtatagatgcaattatccctaaggtaaaaggggaatatgggtaaaacgaatgcaccaaaaattgttaagatactgtcatgtttgattcaccacagctaaacttggtggtatctcccttccaaatcatcaatatggctaaagaaaagaagagctgctcatggtacctcgtatcacaaaacaagtgtgtgatagaacttgaaacaccaacaaatgtttaatcaatatttaagtttattttgttgttgaaaaaaacaagtatttcatgaaaatggtatgtttcttgatacttagaataggctacagtacattatagcaaaccttaataatgtaggtaatttgcttcaaaggaataacgatttttttaaaaaaataatgctatatgtccggcatttatgaatttgtgagtctgtgacatccttgaggcactcatgaccagtgttattagattcagactggactggcggtttgaatcggaaaaaaaaggaacccagtgctttccccagtctggtcaaggctatttgatcatttctgcagccaagccactctggacagcaaaaacctatcaaatcagctgtttttttttgtggcctggtgagagaaccaagcccagtgagaaccaactaatcagaataaataggaaaaatagcatgatcgttaggctttgagcacaaggcctccctaccctactgaaataaacgcacgtagtggccaccaggccatgctcttggctgggaacagcagtgaaagcatagacatttgaaatacatgtgctgcctgaatgtataaagaaaaacctgcagttcaacttcaaccagtgaccaatgacctgagacctgaccgggtcagtcacaggttctgacaacaggctggcaaccacatattttgacaaatataggcttttataaaggagtaacaatatacagaagaatttacaggttcatgtcatgcgtaccagttcagctaacgatttgtttaacttgccaaacttgggtgccatctgtcggttcagctgtgacaagagaacctgcgcctctggattcagatacctagaaaacatcaagagattaatacaaagcaggatggttgaatctttaaataaaggagaaatgaaataaacatactcttccacatcctttttgttggcgaccaggtccatctttgaaagaatgttgatatgaggaagttcaagctgaatcatggcagaaagagaagccatgcaaccactgatgtattttgtcacatcactaacaaacttaaccaagaaaaacaaaactcaagtcagacttgtctacttgtgtttggggccagtatcttttttcaaggataaatatatttggttagtgatccaagagtccaaacctgtgaatcaagaaagtacacggcacaaacgttgaaattttttcgtttcaaatgttcaacaaagttacgcagaactgggacatgagtgaagagttcaatctggcctggagaaacaagatgtggtctctcattgtcatgattttaggtgaagttaaacaatctaaaatatttcagaattcccatgcaactacaggggaaggacataatatctgtattgctagagaataacatgagcaataggtccttgtacaagcttatcgcacaagtataattcgttagatagagatattgattaatcgttggttttttcaaggccatgtatggtaagaatagtagtcaagctctacgtaacctccaactacatttaaagcacacaatcatgaaataaagaaagttacctgggcaatcaaacacaagatagtcatcatccaaataaccatccagttgctcatccaaccaatcatccaaattgtcttcaaggtgcctatggttttcttaaggaacaactgacagcataaaatcctattaaataaaaaatatacccataacatcctctttagattgacatgatattaataccaagggttttttattggatcctagtacacatataactctacagaacgttcaaacaaatgaagagtcagcataaattgtacactgctagcctgcaagtaatgtgaatgggtgaactaaacaagactaatcaagtttgcagtgttttaactaacatagtatggagaattaaaaggtggtgtctgtgcaaatgtctcccgacagatggagtagcaaattgaacatatgatagcaatgacatagtttctaaagtatcatatgcatatagcaaaactacttactcttgggacatctatataaaactactgctaatgaatggcgaaatagagaaagaagttagtaaattatagagttaataagcatgagcagtccatctcaccaacattcatcagcatacagatacagatctgatgattgcatggccatagagatatataatccagttctgattccgagtttaatatatttcaggtgagctgtctcatcctaccgttgattgctcaaaacaaaaaatgcatggccatagttgagaggaaagtatggcactccagttataatggccaagcaaataatgcttttgagaccaatatgtactaaatctcaagagcggagagagccccaaaagctagttgcagagcaattgcggaaaaattgtgctaaaagaaaagtttctacccacaatggcctgatgttgcccctgcaacccaattagctttcgaaacacaacaacagcacattgcaaataatttaccacaaggatcagttaagaacttaaatagcttggaaagaaaagggcaataaaattaaaagactcaaaacaggatactccatgcaatagataagcccgccatttggtcccatcccaagttcctccatgacatcatccaatgatatgagctccctaatatctacaaaattttaaaaagaagccaagtataagcgagccgggtggcatttacatgtgagcagaagaagcacaagattcttacccgtagatacaggatagctgaagtgctctgcagcaggatcgagattgaccatatgaattgtcctacccacagtctcacaatgttgatacaaactggagcaatatgtcgactgcacagcatatacaacagattagggggaaaaaacaattaccagcatctcattttagtcactaggaaaacttgcaatacatgcttgtaaattctctgataatgttatcatgtgccaaacttaatactcccaaattttaccggaggtggtaggcatcccaacaactagtattacactaaccaaaccctagtgaaataagaataaactcaaatacaatcgacaggaatcattccccactaaaacagcacggagacaatcccaagactcgccccgaatatcctaaccatcgccgaggaaatcccaccatcatatcaaaccccctccaaaaccgaaaaacctaaaagcatgaaacgaagcggatgggatgggggagtcggatagacccattcaccttgccgctcccggcggggccgatgacgagctgcgcgtaccccatggcgggcgagaaggactagggttttagagaggggagaggcgggggaggaggtagttgctctggaggaggaggaggaggaagcgcgcggcgcgggttagaaggcggaggagatggcggcggcgagcacagcgtcatctgggttttggtgcttgcggcggccttgtgatggaggcacatgcaatggagcgaacagaagttgctcgatactggcgtgcaggcttgagcgccgttgggtctgaacatctgcagcgctcgaccgttggatggcgagcgctgggtatgatggacaccagcagcccgttttccgggaaatttaaatatttgccacttttagattcgataattatccaaatatccttattaggtttgcacttaattttttccttttaagagatagtctcttaactatttgccacttttttcccctcttaagaggaagtctcttaactatttgccacttttgccaacgtggcatactcgggtgaaaaa

SEQ ID NO: 27271 - DNA, 6449 bp, Oryza sativa
ttcctcttccccattgacgtcggcatcattgtttctccactgcgcctgcacccgtcaacattggcggctcggcgccgttccgcctcatctgccgttctacctcggccgccgccctctcccttcgtcgttgtcgcctcttcgcttcttccaccgccacgaggagtccttccggcggctccgccttctcccgtcgaagctctgcctcccccgccgccactgctccacttcctccaccagcgccattggctctgcctcctctatcgccaccttgcctcctcctccgccaccgccgtcgccgctccacctcctccatcgtcgctgctctgcctcattcgttgccactctacctccgctgccactctgcgtcctccacccaccatgaggagtctgttcggcggttccgcctcctccgtcactgctcactggcgttgacaggtagaggcacgatggagaagagaggcgatgccagcgtttatggggaagagaaagaacggggagagactgacgagtgagtcccacaccatttttcacccgagtttaccacgttggcatgccacataggcaaaagtggcaaatagttaaaagaccacctcttaagagggacacaaaattaagtgcaaaactaagaagggcatttggataattgccaaacttaaaagtggcaaatagttaaattcccccgtttacccctagcccactagaccacctccctcgccctatcacgcttctagcatagcttaactcagctatagggttcacagttgaattcgattcggattttatgaagtcgggactttttgaaggacacaaattgctcggcttttcagtcatgtccaaaaacaatttcaaactgattttttttttgcaagaaagatgatgttttactgatgagaaacaaagttattacaatagttgagaacaagaccttgaatacaagctatcctattgcaacctcttccaagttctaacatgacgaaactttacctcgctagcaactcatttgtgataatgtgcaatattgtgattttttttgacaaaaaattatccggatttcatccgttttcatcgtcattttattaacggatttccaatgataacgctcgtgaagtcgtttcaaattgcagcatagatcaaaaccgatgaagtcgtttgccctaagcaaattgcagcataggtcggcgtcgtcgtcctccatgggagtcgggaccccgagcgccgtccggcgctccctgcacgcaatagctaggcccgtctcgaactgaagcgccatcagtgagtcgcctggccaacataattttgccatcatgttgttgcatgtaccccgatatcacactagccttcccaaacgcgatcacataaaattggatccactaactactaataggcacatagcagccctgtaaacgccaccacatttcaccgattcctctcactactagccttgccttcgccttactttctcccttcctctctgtcgccatagaattggccgtgtaatggctgccacctccagccttccacggacagcttccgccgccaccaacggtgaaaacagttcaccacatccaggagcacatttcgacacctcaacatagccaacgtgttcctggatacactttccccaaggctccagaaagattcaggttaagaacatgacgaccaatcaaacaccccatgccaagcaacgtctgtccggaattttacggccactaatgcaatcacttagcattggtacactaccggatggtaaagacgttaatttctgatcaggcatgaagaaattgaagcaaacaaattataaggttaagatcaccatcaacctttgaaaaaacaactttgcataagcatctactacatccagcagcatgaaacataatgttcaaggtatcagactttggaagatacttaaatactaggccaaacggttcgtatttcaaaattcagctaacacctccactggtttcactaagacgaccacacttcaagccaggtgttcacttctttgccttcttaggtgccctgcatcattaggaagttgtggaccataaaacttctgaaaataagcaaacacgggttgaaatggaaggtgtcatgatacttacgctgcagtttgagcaggagctgccgctgcaggagctgctggctctcttgggccctgtttgcattcagagaagtattaaatcacatgatcagcaaataatcaaatattaatagccaggaaaatatactttgacaatgaaaaaattacttaagatttgacagaaaacatattgtaaaattgaaatgtgtcagtatgatgtgaggaaaacatcaattaacatatttcaatattgaatcatgagtgttactaactgaagaaaattaaactatagaaccataggcaaaaaaaatctcacctgagccaacctctcctccctcctggcaatcttcctctcacggcttgccttgctcttggcacgcttagcctcaaactggtcagagagtgtcttctctcttgccttctcagccttagacttgtggatactttccataagaacacgcttgttcttgaacatgttacccttgaccttcatgtacatgtcatgatacatgtgcttgtcaatcttcttggcctcacgatacttgcgcagcaaacgcctgagcacacgcatcctcctcatccacaggatcttggtggggagcctagcctcccttgtacccctacgcttacctgcaaaataggaagaataaggaatatgcagacacacatgtttgcactaagataacagcaaacttaaatggacccaacgcaccatagccagagtgacgtcccttctgcttagcctcatgggctctccgtgctcgggacctggagtgaatcttctggggcttcttgatgatgaatccatccttgaccaacttacggatgttctgacctgcaagtaggaaggaacagaacatcagatagctttcccagcatttcaggaacgtgttatagaaatcaaagttcatcaccatgcaagcacatatacaagtcacagggaaataaaaccaagtatctagaacagcttttcaagacgatagtaaataattactagaccatcggaaatgagtatttatactccaaacagaacagaacatagactttgtttatgaaagtatgcacgatacccaacatagcatagcaaacaatatatcttataattagcacaacaaaacttgcaagtaaacaaaccacaatgcatacatttacacagtatcatactgcagttctacaaatggtgatgaacaatcgaaatgaaccgaatgaacttagatgttatagaattgtaatttcaacagacaaaggaatgttcccctattgataaccgtgtgggcattccctattaataatcctgtgtgcatgaattgcagtcttcatcctacctggcatatgtgacgaacaagaataagtaatacatcaagcatcacatatcatgtctatatcatgtctatttttcatctaatggaggataataagcacacacatccccagaacagcaccgtggatttgacagaacccctaagatcaatctaaaccctaaccctaagttccatgtataaatcatttctcgaaacttttctacctctatgcatccatcacaaaaacgaacctagaaaaactgcaacaggcaacggtttaagtcccatgaagcaacttcctccgcaactaaattaaacaacacactacctagaacacatcaaaactactccgactaagcgaaccaaacgaaactccacatcggaatcgccacggcaacagtttcgcgccgcagactagcactatagctccagatctaaaggaaatcacgcgcaacacaaactaccaatcgcacacaaagatgatatcaaacgggagttgaggggagttcttacgggagttggccatggagatctcgttgacctcattggggtcgagccagaccttgcccttgccgcacttgagcacgctggcggcgagccgcttctgcagcttgagggaaaccatctccgccgccgccgccgccgccttcgaggttcccttcctcctccctctccttacctgggtgggagtgtgtggtggaggcgcgagggggtgcaagggttggcgaggggcggcgcggagggcttatatagcccccctcctgtgatggggctagggtttcagcgcgagctggctgggctgggccgtcggcccatcagtggttggtgtaggttccaccgcccagaaggctcgagtgagtggagcgtgtcgctgtcggggatgggatgacgtggaggacttggatttgtcgccggctttttttttttgacgaggtttatttaggttttaacgaaaaagctttttgcggaatcatggagaagagaatagtctagcatactcctgagtgaattttctgaaactctggacgccggacatttgaagctttcataaatgagtaaactatattgatgatttgatggctccaatttctgtgagatacttaaaagttttttctgaaaaaaaaaatgaaaagagatacttaaaatgtactctctcttttgcattacagtatcaggatcagtgtgggttcagaagcgaagattagaaacttctctaacgtgcacattaaaacgaatggctcattaacagatcagtaattaagtattagttataaaaacttaaaaattgattaatatgtttttaaaactgtgacactgcgaagtgggccttcaaaattctaaatttagcacgggtattcacatttacggctaattttttttcagtgatagacaatacaatcatcgacaacgagacgtccgtggtaacttcattaatcttaagatatgcctagcctttcggatgtgctcatagatatatctagtcttctgaatgtgctcttagaaggttagcgtgtgcctttggttagcgtgcgcgtgttgtgagtgtctgcgttgtccttaaaaaaatttataatatttaacagtttgaaaagtgtgcacgtgaaaaataagaaagtagaagttgataacatgttttattttgttttgtattaaaaaggttgctatatttctcgtaatcttaaataagtttaacttttgaaagttataacgtcttaacatgaatcggagggagcatttagaagtgagcgtagattagtcaaggtgatatcgatgtagtagtagaccagtatgtcattttctgcccatgcctgtaactcatctaaactctaaattgtttgcaggattagtaactaatcggcagcataagttttggtacctcaggtgcattttactacacattgaaccacacctgcattttatactagcttatattcagaaaagtgaaacgacagacatagaaacatataatccttggttgtgtacatccactatggttgtagaggcaggtttaatctattttcttaaaaaataaacataatccaaatatatttcattcatttgttctcaagtcaaatgtgataatatttccacgggcatggttgctacattaacttattacatgcagattcgccattgggaaaaggatggcatgccctagaaataaaaagcatctacttcaatgaatcaaaatatactgtttactatttcagtaacaggaatggaatcttgttttctccggcaccatttgcagtgcaaaaacaaactcttcaatacgataaggaactgaagatgtaaatgtctggcttgctttatttacgggtgagctagagctaggaaatccacaggacaggaatacattagtcgctatcaatcagaaggaccaatcattttctctggaacaacaagctcatggaattctgattctgtcaatactccgaggtctagagcagcttcctggaaagatgaaaaagagataaaagatgaaaaagagatatgatccacaacagtaaatcacaaaaagattaaaagcgcacaacatcaacatattgcaatttatgttgatacactaatatgaatggcgaccaaaaagatcagcgcaaggggggaaatgatggttgtcctaaatctctatatgtagcaccttatcccaatagcatggatttatgccttagaatattgatggttctgacaatcaagccaaaatatgaaattatgtttgcacatatcaccttaaggctaacgcagaccattgcacatcagtttcgaatcaaaacaactaaaataaatggaataatcaccttcaatgtgcttccttctttgtgtgctttcttagcaacagctgcagcattgtcatagccaattttctgcatttattaaatagaattaagtatgcactcacgaaagcagatgtaatagaaaagataaatgtaaggctacaaaatggatgaatttcacttacagggttcaaagatgtcaccaacatcaaagactggaaaaaaaaggatacacaaattaatcaagcaaatttgttgaaaaattgtatatgcatttttttcctacagttcagt

SEQ ID NO: 27272 - DNA, 8199 bp, Oryza sativa
ttttttttccccttcacaccggattgttgccaacttctcttactgcggtttgctaattgctcccaacttgcgaaacagatgtttcacctgcatctccgcatcaccaaagtaaagctcaaaataagttgagcactgagcagcattaggctaagcatgaatcgatgaacaatataattcaactagttgtcaatcgtagtgatggaaaatcgataggcctttgtgttggacaatttgaactacagagcaaatgaaaggcaatggaagaaaatggaaactgcatggagtactatgttaatcaagtcaatggtatagaccttaaacttcacgagctaacaataatatttttatcaagggaaattcgacagataaaaaagtagccagaagaacgaaaacaagaaaagaaggtaacattacatcctgcttcttttttaggaaaaaaaacattttcaaatacaatatttatttcttaccgatacaaattgataatctcggggttacagatttgattagaatatatacttgctataaacaagtaggaactttcttacacctcaagtgataaccttacaagactaacaataaaataaaaatttgatcgcaaaacacagaaatcgcaaaagatgtgctcttcaggtattctacgctagacatggcttcctgcatctatcctcaagcagcagaatctacaacttctgccggtggggactagggagaaaggaatgcatcgaatagcctaggtatttcagtatctgatcccttttgcaacctcaaagaaatgggcaacattttcctcaggagtgcctaccttaatgccatgaccaaggttcaatacatgcccactattaccagctttctgcacagtgtcaaaaatccgcttgcttatgaactcttttgacccaaaaagaacgccagggtcaacattcccttgaaccgctatgttagatcccaatcttttcctcccctcagccatatcaaccgtccagtccaagctaacaacatcaacacctgtcagtggaagcctctccagcagtccaccagatccacttgcatatagtatcagaggcaattcaggatgtgtttctttgacactatccacaatctgcttcagataaggcaagctaaactcctcaaaatcaactgggctgagttctgtagcccatgagtcaaaaatttggacagcttgtgctccgttgtcagcttggtatttaatgtagttagccatggacgtagtaaatttctgtagcaaattatgcagaatctacaataatatagatattaagggcaaatttgcccacatgaacagataaatgaatggaaattaatctaaatatgactcccaaaatttcgatcataccaaacaataagcaagccaacaatgatagtgaacctcatatgcatcacgttaacaaaatataataacgccatttcatcatttgcaatactttatcagacaaagtcaagtataatattttaaaatccatgctaattacctaggactgtcagcaggctgcataaccttttttttttcagggaaggttgattaatattcagtattctatgtgctcacaatcagcgccattataaaagaagcaacaggcagttgtctataatggaagagaactcatgtactctttttatcagcaataggattgtgtcaatacctctggttctgagaaggccattttcttaatctttgaaaagttttttgatgaacctccttcaacacaataggatgccaatgtaaagggagctccaacaaagcccaacacggcagcttcattgttaacctgaggaaggaaacagtgggtgtcactccaatgaaataattagtacacaaaacaaagcacaaaaaatgatcatagattctagttaactatatatttgcagaattctgcaagtttaactaaataacttagtatacaattgtgctcgcaagcaactgttcactttgcatacacaggccaccaaatccaacagtagtacaatgggagtgttttgaaaaagcattgcaacgtcaactgctgatgtcatccctctccagcacaacctccccaaattgtagttcatatctcataaaacaaatatggaagaacactattgccatagaggcatggaatttcatctgtgctatacgatctgcactctccaatctccagaatatatcagccctgaatctaaaagtcagtaatggactaattgtttgatgctaaacaaggatcagaataatttatagtttttcaataaaatgccaaattccaagtaacagtggagccatgaagccaatccaaaagaatggaaatgagcttccaagttttagtgattacatttccatcttttaattaatctaaaatattgacttgacaaactccaagtaatgccattttgagaaaacagcacaaaaaatcagcattataaggtaattgatcaattagagtgtaacagttcaaagattgtaggctgacaaaggaagtgaaaataaatgatcagctactttttatgatgtaatgctctccaataggccatctatttccaatctccgaagttggattctgaaagtcaatactaacctcttcccgcaaaatgtttaaagcctgcccaacatatgggacccactcctctggaacaaattctctgacctcattcacagcagctgctgttctcaagggatcaaatatcactggaccttttcctttcacaatgtcaaaaggtatgttcatcccaggaagcggtgtaaggatatctgagaacaggataacctggcaaaatcaaattaaaaacaacagcatcagaggagatagcatcaataacagagcattagatattataggcaaacaacatctcaaatccacgtaagcttcttttctcattttttttcatgcaaaagcttcttagatagccacaaaagaggaattacaaacaacatacagaaagggccaaaatctgcagcttactccatcgggcttgaaaaccttccatggttgtagagagatctcaacaacaaggtcaacattttctgatctttcacggaatgaaggatgtcgctcgcagagcaattgatagctctgttaaaaaaaagaacggcaagaagttggtaaggaaaaagggtcctgattgtaaggattgttgcaacacgaaaataaagtattacttcaaagaatgggcatttgtcacgattcaaacaactggagcttgctattaagtattgtataccatggaataaactgtttcatgtttaccgatgcctgcattaatgttctattgattcatttgttttctgtaaacttaccccactttaatgaatccgacgactgtacaagaaaaagagaaaattgtgcataagggaggttccagtaataggatagtttatgagtggtcactaagtttgaaaaaaaaatcaggaagttgatgtttgtcaatttctagcagttaccgagatatggtccacatcttacttgaaacgcgataacaattgcaagcaaattggaacatcttcctctagttgcacatttggatgcaaattactctgcaatgcaggagaaaaaaaacgaattagagtaaacctgccttcatgtacctcccggcctgcctcatgagccagaccggcggtctctcgaccttcctccccttgatcgcgctcaccagcagcggctcctccgccgtcccgaccgccgccgtctccgccataacctctgaaaaacacaaccaccccccggaacgagaccatccccaaacccatcaccaatcaaactccgcctcaatctggtgtaaacaaacaaacgatacagtggatttacggcaggcgctgacctccgacggcgctgcagcggacggcgggcggcgggcggcgcgcgcgcgcggacctccccgagaggtaggccggctgcagcgagagcggcgggcacgcggtcgccattgcaggagggatccgagctgcttctgctgctgctgtgctgccggattggggtgggcagcgtctcggcgagagacgacctggcaaagcaaagctaaatggaaatcggaaatggatgggtaggtggggcccacttggatttcaggatcaggtgagccgcggccgcagatgtgcggacgagatcgacgatggttatgggccctcgtggtccccgcatcggcccacgtatggactgggccgaggaatttctcatgcaggccgccaggccggcgaatttctcagaaatttggcaaaaattgagcactttctcgtcggatgcggtcgaatttacagcaaaaggatgaccaaacatgtaaacctacacagcagctttgagttgagcacctactgtacttctgtatcacacaattcagacgaggaaaaaaaaggaaaagaaaagaaaagaaaaggaagtaattaaacacgttgttttgggtgaccatatcatagcacgtagaccatgccgacctcgagcagcgacgccggcgggacgcggagggcgacgtcggggccgcggcagttgcggcggaggaagttgtagccgacgtcgacggcgagcctcttgagcagcgacgacccgggcttgcactgcacgtgggagtggcccaggatgaaggccgtgccggcgtccctcgccgccgccagcgcctccagctcctccgccacctgcttgttgtccgccgcctccgggctcgccacgtggctgtcgatgaagaaccgcacctgcttcgcccgcccgccgccgccgccggggctcccgtcgtcgtcgccgccgccgcttcgtcggcgcgtcgtcgtcgtctccacggacgccgccgacgagtgctggacgctgtcctggatgtcgtagctggcgtggctgctcccgatcacggcgagccgcgtcccccgctcctcctccggttcgtgatcgccgccgccgccgctcgcgtcgctgcaccggtacgaggcgtcgagcttgatgaaggtggcgaggctctcgacgagctccgtctcgaacgagtccacgtcctggtgcacgtcgcggtagccgtagcgcacgatgcaccggtaggagcggtggcccggcgggccgacgcggccgatgaggtagcgctcggcggggaacacgtacggcaccggcaccgacttgacgcagacgaacaccagcacctggtggaacgccgggaggttggtgacgaagcgggagaagttggccggcacgccggaggtgaggtcggtgtagacgaggccgatgccggggacgcgcaccatgccgagcttgtcgccgagggcgagcagccactccagggtgaccttgttgtgcaggtcgaactcgtacttcttgatggtggtgtagtgccacaccagcatgacggccatgaggaagagcgccagcaggatgggcagccacgcgccctccaggaacttgatgagcgacgccgagaagtagagcgcctccacggagccgaagaagaggaggaagcacagcgccagcaccggcggcctgcgccagcacagcatgatcaccagggacgtcaggcaggtggtcaccagcatcactgtgatcacagccaaccctgcaggaaaaacaaacttgtcacagtaatctgataccccttttttttttataataccagtatgtatttctgttctttttctggatgacaatgttgcagtgtgcagtgttgcatttgctctgcagctaaaaagggttgcatgatttgcactgcaaattttctacagctaaaagagtagagacccaaaaaagcaactaaaaatatggtatttttgtgcataacaccctagctgtcaagtgatcaattcagaaatatttcaaaagaattcaaggaatttcagtcaaataattactctagccatcagattgtaaaattttgatgcatgggactttcactagtgctggtattgacaacaagtatgaaactacaaagtaattgtgagtagttttttcttaccagaggcgttccccatgtgctttgtgtctctaaatccaacagtcacagcaatgcagaggatcatgagcaaccaattaatctcagggatatatatttggccatgaattttatcagacgtgtgtacgactttcactcgagggaaacaacttaaggactggctctggttgatgattgagaatgttccgctgatgatcgcttggcttccgaccactgaagctaaaatcgccagtacaagcacaggccatctcaccttatctgtagtttgattataaatatatgcaagtttattttttttccaaaggaatagaatgttctaacattaaagttgttaacactagttccatcatagcttacaagtatcatgatctgcaaagccaagatatacctggaactgcgatgtaaaatccaacttgggagttcgagtaaaagtcatgatgctttgataagtaagccgcttgacccatgtatgccagaatgagagcggggtacactaaagaagtgaaagcaagctgtgataaattaaatgattagcagtttagtgcataaggttactacagaatgtgttatggagagattttcttgcaggatcaccaaattacctggatcgcactatatgagaagtgtccaagatcagcaaacattgcttccgatcctgcatcgtcagtcgagctagatagttagctgaatttcctttattcaacatttcaaaggaaagacaacttattttcttttcaaaaagaaaaaaagaaataaacttctaaattatgtttacattatacaactcagatttttagaagcatattgtagctcacctgtcatgcagagtaaaatcccaccaagtgacatccaaccatattttcttgtcttttttaagaacttgaacatgtaacagggatttagagcttggtagacatgaggattccaatgtataatattataaagtccaagagcactcatacagattagccaggctagaactatcggggcaaagagaaatccaacccgatgagtaccgtaatgctgcagagcaaacaggaatgctaatatgacgcaggtaatcggaataacagcatctgcatgacaaggggatcaattatcagggccaaacaggaggtttgaactggaaaaagaaggccaaatgtcattgcagaataaatagaagtgtttttggcccaacagcaggatactggcttccatttgtcaataagaacttgtgattcagtagttggttttgttatgatctagatgctggccattttatcaacattctcggctcgatattaagttgctgtcagctgagcttaccaaacgggcatagaaaagaccaagtttctaaaatttggtagcttgtggtcactcagtcacctcggtacctcaactatagagactttctatctactaaagcgtggatgtacacagtacaccactcattaaattagagtcattttgaactcgaatttgagggcctcaggtaactgctagaaactagagttgctcatatgttttttaagcttttgcacttcacctaaaaaattagatatgaatatacaagcatgtaacacatacagtttttatgtatataggctcgagaactaagcaaataatgttccttgctttagagtagctacattgtccgtatgaacttaaatgagctgagcctagtgccaacatgcttttctctgccaccaataaacttaatcggggacatgggaactagattaatcctttttgcttgcaatcagtgtcttttgttgatcataaactaaatccaaacatctagcaacgatagggaaaatgactttttacaagaaaataacttggaaacttacattcacggtggtctttggacaaggagaattcaagacctgaaactgccgagaacactgagagatatgaaagattgaggggaaagtgagcatccggtcatcaaatctgtggaaaacagacaagcagccctaagaaaagaagctgaggataccggatatagctggcgtgagaacaccgtccccaatcaccatgcatgtaccaatcaaaaccatgatcagcagggcggtatgcagcttcttgtgcttctcaagccagaccttgatgcaggacttatcggttctctcagaagagcattccaatttgtaagtggaaagctcctcatcagcaatttgcctattaggaagaaggctcacattggcatgccggcaaattagcgagtacagagcaaaagttcctcctgcaagaacgcgaaacttgcaaacttaaacgcttcgcgagcaaagcaagcacaattggtcatgcctacta

SEQ ID NO: 27273 - DNA, 5039 bp, Oryza sativa
cccctcagccaccgcccgcctctatcatggacgtcaagagtggcctccgccaccacctgccgccatcccgccgccccaagctccgtccgcccccgccgccgttcgttccacgcgcgccgccgcctctccgccatggccaccgccatacgcaccgacgcttccgcctcgtatgcgtcaccctcatcccccgccgtcgccgccttcgtgtcacccgccaccgccgccgctgctctgtcccccgcccgccgcccgtgagagagagaagagatagaggaggagagagaggaagagtgaagaggagtatgacaagtgggtcccacaaattttttataaatagaatgttgactggactgccatgaatacgccacgtaaacctaaaccaccgcagattgggtcgaggggggtaattcgtccagtttgtatagttgggggtgaagaatactaatgtgttcggggggagggggttagtcgtactttttcatttccggctttcatatagggagttgctataagacatttgacagttttgtaaaaacttccaaacgtaactagctgaagtataattagatcataataacttatatgtaattgcctaattcgtacccccatgcactcttgttcccaaggttgcggcttagaaccccatcggtgcatgtcacaatagatgactcccttgcacgaatctcaatgtcatgcaacgatccacaaaattgaaagttttaaaagaaaaaccgttaatagttttttttagctaatccatttcatacatgacgaacctatactaatataaaaaacatcagttcatcgaactcaaatgtttttttatccttatatttgttcatccaacggtccatagagttggatttacccctcaattagcgatccccatctcaagtacgcagcagttagcgcaaaaataaaagaaaacaattagtctcccacgtctaaacagcagttaggatcggtcaaagcaaaaaaaaaaaaaaaaaaggaacgctcccttttgtgcgccagcccgccgccgcctcctcccgccggagccgctcagctcctcctagcgcgcgccagcccgctgccgccgcctcccgccggagctgctcgcctccttcacgtgctcgcccgccggagccgcctcaccctacccaccgctgcctgcttccctgctcgcgccgcgccgtgatggagaggaaagagaggcggggtctgctcgccctaccccgccgcctcctcgcgtgcgcaggccggacatccaggcgtcgccgccggaaaggggatatgaggtggcggagattcttgctaggaggaggagagggggccattggaggagggctagaggtcgctgcgcatggcccgtgggcggtggagagatgaagccaggaggacgtcagcgtcggcgaggttgactgggcaagaggcgagcgtcaacagacgttccagggaggagcagtccgctggcgcggtcgcatgagagggtgccgaccggaggcagagccgaggacccctaggaccgcacccgcgccaccactgctgccatcgtcaacatcctatatgatttttcgttgttgttgttatcagggatgcgctggaacaagggcacaggaccagggccgctggacatcatcgatgctagcagataaggacaccaacaacagttgaggttgatgttccatattcatgcttgcaatgtgtttgatgaaatgtttaactagcactagcatcatctcttgtttacaatttgactatttgtattgatgtcatactaaccaaatttcaggttgattgtttactgctttcaaattaacaattcaatggttcttgatgtgttctacttaacctttgcatttgtagtagtgtaattctgaaggtacaaaacactatttctactgaacttcgtcaatttaagcaaaacttttgaacatatggtcatccattgaggctcccgcaattccagtttgcatgttctgccaccattttggatcatattttccatgcttatggaaggacttaatgaactgaagtagtttgtgttggcagtgatctccattggatatcccgtctcttcagccggtcgtcaatgatacaaccaggtcacgcatgaggtagcagtccactccaacccacctactgaagacttgtctcatttggtttgattgatgcgtggagtgaggcacatgctgtccagatcaaggtacaggcaagtcggtttcttgcacttaattttttttcatgctatttgtgaatgttggggatttctattcatggagaaacaatgtttttattttccttttatcagtgtcatagcgttcttcaaatccagggtagtattatacggattttatctattttgcatacattgtgcctgtaaatttttgcatgaaaatgtatccaagagcacaagtaatttcgagtgtagtaaattagtacaggtttctcttgagaaataaaatcttttctctcaagaagtccaatattagaatgtctacttagataaatgtgtgttttcttagaaaaaagttaatttgtaatatagtagtaaaatcaattaggattgtcaagtcaaggcataatagtaagatttagttcgcacagctagccctcttaatttctattagtgccacctacttcttaatttcttacgctgatgtctgacaaaattctgtttggttcctttctgcagtagaacatcagcttatgagatctgaaagcaacaaaagggtaccaattttacacccatgtaaaatccagtgatttcagtccattctttgtggctattttcatactgcatcttggcatttgctatccgtttaatatgcttggcaaatgaacttgaattagtacaagtggatctttagatttgtatgtagaaggtcgagatgtttgcaaatgacatatgagttgagttgagtgatctagaatttagttcctatagtggaatatggatagctccagaaattgatttttttagtccatttattttaagctctactatttgttaagtttattctcaaaatatttaatttatagtattatccacaataattggagggcaaaactgaccaaattaaagttgccatatgttcatctggagtctgaaagctggccttggtctgcttcattttggtgttgttgtgactccaaccggtgaccggagcccgtactcaccgctagctaccatccccaacctgccccaatctttctccaggttatgttgctagcacttgatctgtacacgctgtgggataattgcttgttgacaaggaagatcaaatcctgatggtggaagaatggcaccccctgtgctccagctaacaatctgattagtttcctagatgcttgattattgattttatgtgtgatcattttattttgtttttgtatcagggctgcatagagtataaaagctttgcccccctatgcttgcactgagagactcttccgtagctgtcatcgcatatagtgttgcaagtatgttctctattatctcaatgtgattgcacgggtagcatatgtattctcactaactgctcttacactaacaatgatgaatcagactagcagagagagtttccaagcaaatttgatggcacatgtccacgaattgtgatttttaatagtttgcattataaatgctcatctttgtcctgcctcctttttcccttaaatttatttacatggtgtggcaggcagtatcctaaacacttaaaagtaggactcactaaattgaagaaaaaacaaatagctctaccttgcttatgatggtccttcatattggagcacatcttccatgggtctgtagcagctcatcctgctcaaggttgactataagttttggtcagtgaaggggatgtaattagtaatggaattagaacacaggtaacactcgagttaattagtgctttgcttgcagtttcaatgcttacaccacaatttcattctctgcaattacattcacattttaagcttggttttcttctctactcccaatcaccaaactcgttttttttaatgaaaacacaacttggtatttgcaagttttctatctgttttttgcaataggaaaactgttacatgttctagacaaaaatatcataacaagcttatggatgaactttgacaggttccttgacgaaatttgaagatgtaacccgccacccatgtttcgcagccatcgcccatggacttgccaagtttctggtggtgcccattgtggatgaaattactgattgcctgaagtactcaaagtttcatgagtataacaaagattacagcttgggtatctgtaaagtggttatgttgagataaaaggacaataatttgagatttctgtttacatctcaaatgttccatttaatttttttacgctactttataacttcgcctttcagtttaaatctcataatatgcattgtttcttttatccaggattgaatcttctagcctctacaaaactgaattcatatttctttcctcttcattgttagtgtaaacaatactcttcaatatatgttgacgtgcctggcatgtgcacgttaactagtatccaaactatgagagcaagggtggcattggcaaactgccaaccaggcaaccatgtattcagcttcctgcgaacctggaaataaatgtgtcgtgcaaataaatgtatccattccaaattgtaaggatttatattttttaggttctttagcaaatattatggttaggtcaaacgatttttttgaatccattttagttgtggattttaaaattttgaattgcttggattcctcaatgaagaattgtgtttggaatccttaaagtgatgggaattatgagaatgggagtatttcttttcttttccttttttttaaacaaacgtacatccaaggtaatgaaacgattcctcagtcttaacgttcataacacccgctggcaaaaaaaaaagagagtaaatttcacaaaactacatgttttatggttcaaattgcagaaaacattttatgttttatgtttttttacacattttgacacttggcactcaagtacatatgttttggtag

SEQ ID NO: 27274 - DNA, 9335 bp, Oryza sativa
caccgagaccgtccggccttctcggcaccgtgggctggggctgggaggcggggctcgatcggtcggatcagaagccgcagaagtccttgtcgctgggctggcccggcttgccgatctgcgtgcagccctgggtgcaggcgtcggcgcagtcgaacttgttgggcgccgcgcccagcgtcatgcactggttcttcatgcagtcgcagaagcagtccagctcgccggcgtcgccggtcgtctcctccccctccgcgccagcgcccaccgccgctgccgccaccaccgccgcgaccagcagcagcgccgccgccgcggctctcctcgacgccattgcgatcccggttgattctcccgtcgtgatcggatcggatcgatccggcaggtttaattggggaaggcttgtgttgggccatggcggaggggggctattatgtgttggcatttcagctgggcctacctattcttgggcatttggaaccattggtcaggagtgaagcttccaagggaggcaaatcaccgtaggccggcgttagcaaagccgcgacaaaatcatgggcacgcacacacttggttgcaccgcgattcacgcacgtacgcgtgcgtggaaatcgtgcgtgcaaccctttcaacacgcgcgtgcgtacgtacgctcttgcacgatcgggacaaaccgctggtaggtactatagcatatctgcatatgcattgcttgcagaggtagagccgggaaaaaaacgcgtcccgtcgtgtccgggttaagcttggcctgatggcctccatccatctgcagatcgatcgatctgtcccggcaggcaggccgtcgtgacagtgtaggctcgctcgcgcgctctcccggcaagtcgatctcggcctatacaaatgtagtacaaattatcgggataaatggaccggaaaatcgaaccgaaacgtactctcggctcgtcgccaacgatcgagcagccgcgacgcgcccacttccaccgcgcagccgcacgcgagcaaaatcttctctccggcgctagctgtcgcgacgcggcggccggcgaatccgcctcgttgtctggctagcgcgcgccgatcgagacaaggcggccgctttgattcgggggattgggtgattggaccctgtcgtctgcaatctgcatgcgtgttggtgggcacggccggtggcatacgtactccctcggtcaaaaaaaaaaaaaaagacaaactctgtttccgtgtccaatatttgaccgtccgtttcatttaaaaaatttataaaaaaaattaaaaagacaagtcgcgcataaaatattaatcatattttatcatctaacaacaatgaaaatacgaattataaaaaaatttcatataaaacggacagtcaaagttggatacggaaacccatagtttaccattttttgagacggatggagggagtacggggcaccgtggcaaacatggcgccttcacggaaagctaagcatgcacggttttttttcttttctttttcacgctggagattatcatgtccctagctagtaccccttcccatcatggatggaccgatggagtacgcgtacttgtggggtacgaatctggatgacatcccgattggtctctccatcatctgggaggacggaaggcgcacgtacgtacacagtcagtacacatcgatctctatatcgattgagagattttttttctgtttgttttggagaagtgaaatgatcgagagatcatcgatcgtgcgcgctgacgacttctctcttacgagcaggaggacggacggacgcagggtgcacccaacgatcccgtcgcgtcatccttgccggccggtcgcgaccaatgggcaaattatacccatcgattgatggagcacgtacctaattacgtacgtgtatctaagcgctgtgctgtgcttgtgcctgactgcctggccgtgtatgaccagtgacatgcgtgttatgtcgacatccgcatcatatccgtgatgttgggtgctggtgtgatgttatgttgtggacttgtgttatcagtgcttaccccatgcaccctccattcctccaaacatactatggaataatggattattgtttcatgaggcagttgtaataagccgatgtattgccatttctaacaggcgattgtcttagacgcctgcatctaaacatttcccagaggtgatttgtgaccatgatcacattgatttattgcacaggcgaatcatttttctgacagccagttacactgatatagggagtgtttgaaaatcgtttttttttaagtagcatgctttgtcgaatttacaatgcaatttttcaaaagaaatatatgttttggtctaagtcaatatagtttgatggaaaatccctaaggcgggccttaaaacctcctgggccgagtttattagggccagcctaataaatgtattggccatataaaaaaaataagtgaggccatatacgacttttttttcttttttcttttctaaactcttatagctaattttgatgtccattggatccagttctatcaatctaaaccaatggctctattccttataaattggacccccccccctttcgaaccctagtcccttctccattcctcccctcttagacaccgccgctgtcaccataccaaaccctccgcctctagcaaggtcgttcactatcccttcgctctagccacctctccggcaagccatcttatgcttcccttcatcttgttgggtgagggtcccttgtcccatcatcttggttggcgttatcaaattctccatcgttgattcttgttgtcctcgctaattctatcacctataatttttcttttttgtagatctatcaatgcttgctttgccaatcgatgacgatcaccacccatagtccggtaaggtacctcatgccatcctcctcatctttgataacactggtaggttcaacaccgctggttcttgttgtcctcactaattctatcagctaccgcttgcttttgtttttgtttatagatccagtcatgcccatctcgctattgcacgaccacaacggaccatagtctagtaaggcctctcataccaccctcttcctcatcttcaatagcagtattagattcagctccaccaattcttgttttccttgataattctatcacccatcgcttgctcctttttctacagatctagcagtaacccacttcaccgtccacgaccaccaccgcgtagtgctccagtctggtaaggctccttgttccatcttcttcctcatcttgaaaatattttgggatccaacaccgccgacttttcgttttgttgttatcctcgttaattctatcctcaattgctcgctttctgatatttttaatagatccaatagccccaactcaccgttccacgcctattggcacccgtaacttggtaacgcctctggttacatcgtatatcttattttagcaacatcgttagatccaacaccacttgttctcgttgtcctcgctaatcatgtcatctatagcttgcctttttttttctatccaatagttcctaccttaccgctcgacagctcgacagacatcgtcgctcatagctagattgctattctgtgatgccccacacttttaccgctatagataaaagtgcaagattgtgaactattaataaagtattgttttatccaataataacccaccatgagatatcgcaatggagaaacaggtagaactacttttaatccatccctacaagtctgaaggccatctctattccatcttatccttgcaaagacatatacaagaggaattatataacaacggtgagcgcatccgtactcagcaagtcattagtaacaaaatataaatgcataaacaataatttatttatcaatttatattctataccatacctttcgtaccatcatcaccttcacttttcatcaaaagtctatatctatcttgtacaagggttttcaaaaagaagatttttgaaaaaactaaaatacactcgtaacattgagtaaagtttacatcaacttcccgtagcctccaatctaggacgtgagtcacaatttaatagagcattgcgcatgcttgtatcattgtactcatatacactctagatattactgtacatattccctcaatcttcctatgaatcaaggggtcattgatgaaatctacgtgaccatgaatcgtgatatctgatttaaggcttattttggggagtttaagattttgagaagcaactggttggtagccagcttttgagaatctggaaaagctgggttttccagcttttggtttttagttctttttttggattctacaactacagtttgatataatcttaaccaaaagctaaactgtttgggggagttttgattctgggagaagctgtagcagcttcttagtggccaccgcttcctcccaatcgcagctaaagagaaaagggggacaatgttgcccgaggacgaacatgttttttaattgactagtaataaaatatctatttttttaactagtctctattcgcacatgtgagaaattcacctcttattcctactcaaggatttcactaaacagtttttgcaacgcttgcagtataaaactttcctccatcgcaagctttttgccaaggtgatcaccagctgagcctgtaagcgcacgcccacacaaacactctggtctgtgtctctgccgcgcaccagagcgtggtgggtgtgtctcttgtctcccgcgcccccagcccacgcacgccacgcgatgccagcctcctcctcctcctcccgctggtcatggttgcacaagctgaagctgcggaggaggaggaagaagaagagcaagcgggcgagccccgcgtcaacggcccgaccctccgacgcgtccgccgtccccccggcggcgccacgccagccaccggcggcggcggcgccggccggcggcctgagcccgtgctgctgctactgccccaacagggagtcgtactacctcaacagcgccgaccgcgcgcgccaggaggacaggcaggacatgttgctcccgtgcgacgacgaggtggaggaggaggaggctctcgacgtcggcgtcgacgtggtccaccgccgggccgacggcctcgacgcgccgccagcgacgccggagctcaagctgaggcccatcgtcacgagccggcggcacgccgccgccggcaagaacgaggcgtcggacagctcaagcacctcggcggccacgacgccgtctaccagggcgcgggggttccacgtgagaccgaccgccgccagcaggaggctgcgccgcgtcggcagcagcggcggcggccacgacagcaacaatgccggcacaccggtgtcggcgccggcgccggcgtcgtcgtcgtcgtcggtgagcgcggggaggccgagccggcggccgcggcggcggcggatgtggctgcgggagagcgaggcggtggtgttggagtcgacggagccggagctggagctggtggacagcatgatcgagatgctgtgcaccaatggcgtccgtcggctggaggacctgcaggacctcctcgcctgctacctctcgctcaacgccgccgagcaccaccgcaccatcgtcgcgctcttccgccgcgtcgtcctcgtctggatccacctcggcagccagaggcttcttcccgccagtgatcaaaccagctcagtgaatccattgctcaactcgatgcatgcatggtgatcgatcatggcgtgctcaattgatcaattcttcatggttacttccatccgagtgatgactgatcaactcgtcatcagttactgttaatttctgttcttgacttcttgtacattcttgagacatggcgcttgtgttaaaagagatcgggttgcttgtcaggttaagtaaactaaacatagttttcttttctctttcgttaacctgtctctgttacgtttctgtactgtgtttttacggttggtgtttgtggttttgtgaggttgttggagagaatagaaagcgggcgcagcgcaggatgtgcgcaacccactttggcgtcaaaagcgagatagatcttagatgccgcctttacagctcgattggctggacaggaaagcaatagggggaattcctcgctgttcgtctctcgtcgccggtggaaattatttccacgcgtgtcattcggtgtcatttgggatttgggaatgataatatcagaatggaagcctgcggtttttacctcaggtattctccccattccaaaatagattattttttttatttttgcacagatcaggacataggctatgttggtgtaggtgttagttgaaaaaaaaaatcagggcatcacctatcactcccattaaaattctagttatagattgttcagaactagggttgtacttttttccctttgatgaacgaattatttttggacttgaaattttggggttgttagatgcatattgcatcaatgctttgtttctttttttttccagaactttttacatagccaaaaaaaaccatgatccatttatgtggaaagtggaagtgtacttgtagcaggatatctccttcaaaatgtagaatccattcatgtggtttgcacaacagtaaagaaatcacatgtaatttaattgtcatcactacaattaggagccatagaattttgtataaaattaggtaaattcaggaaacacagcaaaatgagaccaactaccacttcccaagaaaaaaatgttggtcattgaaaattcacattgggatctttgcagagtagaagatttacattcttattgtaaatccacatgctccacgcctccaccccctttttcttaatggggagctcatatgtttggtaattcatcatgttgtctctaggttgttttttttaaaaaaaatcaatttttttgttgttcttgcaaggtattaagaggtagagatatctcgcggtaccaaccaagtcgaagatatctcataatgttaattttgtaagctttcaagggccgttaagaacctttggtctgattggcgcttgccaaaatttggaagtgtagagtcgcttcaatcacttgcttggtttcctaccaattagatcaaagatccgaaagatttgcattactacgaaataaatttaccaaatattgatataatccaaatggattgccaaatacctttcaaacaaagaaataattagtagcgaaccaaaccagctctttaattttaccgattgttcctacacatcaacatcaacatcaaacaatggtgtagccaagtaaggccaaaagtaaacaccgattttcagaaaaagttctgttcaccacccaagaatacctcatgcacctcctaggaaagttggaatagaagtgaaatgagctaaaaccatttatcttggacctcggataggctggcaacccaaggatggccgaatggccacatgtgtcccctctgccatcggactcaggagacgggtgtgcatctactagcaagttgtaggtacactagaaggctttgggtgtcgctagcaatctggacggcttgcgacctactaaaccccaaccactggtgacatgcttcgacagttatagaatggtgggagaacacagcaaacacaataggagctccgaaaaaggcgatgcacaccctaacgctgttagtggcctgggagatatggaatgaaagaaaccgcagaaacttccaacacgaagagcttccgatggccagcttgctgacaaaggtcaaggagaaggccaaaacttgggccttggcgggcacgagaagtctccgcgattggcttaatttttagttatcccagaccaaaggtccagtgcatgtacaacttctttcttttgtacaatttactcctatattcaatgaaattggcggctcgctgattcgtttaaaaaaaacatttaacttcattctccattctctgctagtactactcttctactggcagagcctctctacattctgaacactttcgtgcctccgcttgccactcacctctcacaaaaatgtgccgctttccaaaccgaagcagccaacacatccacatcaatccacccctccagcttcaatttaagaaagatataatgccaatgttgaactgccattctctatttctctccacacattattgatgtatatatgaaccgattttctgacggaatgattcatgcaaaattcctatttataaatgagcgtttagttgtagcttcttacatataaaccgtggccaccaaagtgatgtggttttattgtctttgagaaggtatacagggtaccacaatttataatgcaaatttttatacttctcccatatacaactttgctatgattacacaagagaagcgtatgtgcacatatcactgtatacgcacaccaccagcgaatgaggccctaaggacaaaacatatgctcaaagatataaaaccatgcagtaaatctctaacctcaattatccttgggcaccaggttaaaggactttaaccttgatgaatagggccatgcacccatgatacaattgccactccttgctctagatctagcccgattcatcttcatgatagttggagccgccgatggctatagccaggtgtgtcgttgtcctttgtctttggccttatgagctcgaggcaggatgcgcacatcggcatcagctcatgtgcttatcacctccaccaggacaacctactttctcttataggtaccaggtgcaacattctctcaccatggatcacctctttttcccttaagccacccatatccttttcaagccactatgccacactacaaaccactcactcctcccccctcgtccgcttgctttgtcctacacggcagatcactgctggcgtggagccgtgagaactgaggagtgttgtaaggtcattcacagtccgtagatgtggcattcagcgccagggtgccagtgaggagattcccctccatgcgagtataggtcatgcaataagcaaacccctcaaacccccacgaagatgcatgagcctcgccagggcgtgttagggtgaagtatgtgacgtgcggggcgatggcttgaagccacgttggggaggttgtgccctcgcgatgcccatatcacaccacggcgtctcgctgacctctagtggccagagaagaagctccagatcattgaggaagaggaagatgaaaactcacctcgccactctagatccatacaaccgcccacgcgcgtcgccatcaaggtcatcgccccgatatgccacctatgtgggctccgaattggagcttggttcacagccccaccgttgagcttgttcgtcgtcccgccgcttgatcccactgccaccgagctccatctgcatcgtcgaagatcaattcgcccccatcggagctcgatc

SEQ ID NO: 27275 - DNA, 1279 bp, Oryza sativa
atttacttctgcaaattattcccataccaaactaattcagttgtgtgccttcttgcttgcagtaaggaggtgctccatgtaaggactttggagttgctggcatagcagagaattgaatgactctgcttttctaagtgcaagcaattgtgttctttgggttttatactaattctcaaacttgatgatattgggctggtcgcctctatatttgctaactcaatagagcccttttccgttatagcatctttactttccaaattttttaatttgtaatttctttttatatgagcaattggtactatgaatgtacgagacatatggtcctacatcctgtatgtctggggaacgggaattggttgggaaaaaaagttaccatgtggacttattttttgttaggctcatgttgttcaactagccctgatagtttcctaaaactttgtttaatttaagaagctatgtaatgattctatttttggtgtacaagatattggcattatgttacacatagatgtgttttgaaagctaaataaaattacatagcaacatttggtcaacaatagctatatgtttaacagtagctttgcttaagctgttaatcatatccttgtgtgcgcagctgcgcgcggcgtggcgccgcgcttatacttctagttccatccatgcccatgacaggagccacttatccgaccaattcaagaccagcacataatttaactcgcctgcttatgtggacaaccatgaattgattgataatccctgtcaaattcaggacttgacccgcctgtaattcaagtggaataatcgagtctattggcatgacaattttgctcccaggtatagaaacaccatataggagtattgagcataaattttaagagtaactttacaggatgccgcactaaaatttgaagagtaactttactgaaacatacaatacatgaccggcaggagttctggtgtcgccgctccacatgtcaacgcacgtgcaagtcacgtgctgattaaagccctataggggctttacatccaacgataggattatattatccggaagctatgtgaatgcaatgccctctccaaaaaaaaatgaaaagaaaagaatagaaagaaaaatgcaatgctgtgccacaactatgggcaaacccagatatgttcgccaagaggaaactcttctaatatatgaaaacttcttacagtcaatattctgttcggtagataaggaggatttgcgaagcacggcaaaattcagacaggtccattccatggcgatgcatggaat

SEQ ID NO: 27276 - DNA, 6316 bp, Oryza sativa
agagggcaagagcatcgatttctgcagggcaaattggctcccaggtggaagtattgagagcacaaggcccactctcttcagctatgtcaaaataacaggcctgacactgcacaaggaactacagaatcacacctgggttcaagatattgatggcacgccttcaaacagagtgatctgagagtatgtgaatttatgggacgccattgaataattgatggcacttttctgtttcctctgcatacaacatgttctgcacggccagaagaaatcaagctatggtaaactgatctggaagacgagggcaccttcaaatgtcagattcttcatgtggttggcgatcaacggaagatgtggcagacaattttcagaaaaggggtgccggctatgcgagagggctaatgaggattgtgcacaccatttttgttagctatgttttcaccaacagagtatgacgattcttgagttgggtgaatatttctttccagctgccaggggacatttttactgaaatcactaccaggcttgctcagcagttaacttttacaaatatgaaacaatgactgtacaataggagttacaaaaaggggaaagaaagagaaccaaaaaagagttatatgtcataaactttgtaaccagtcaagcactgtctgacatagaggtagaactcttttgtcctacaactatgtaggagaacttctttcttgaacaaggcaaatctatattgataccttgagaactgtgcctagatcggttggtatgggttgattgctttcacccagcagacctaggtttgacctctcgacccgctcatattccacctggattaaatgaagggttggaaaaatatgtggcttctcctatcttaataccattggatgactagctccttctaggcatcccaacattttttttttatgttgataccttggaagatcattttgttaggctgtttccagatatgctaacatggcaggaacataatctctagaaaaccttttatttttacataatttttaataattttctttgacataatctagaaaaaccttttcgctggaatgcaaactgagtccaagcaatcgtctgaaagaactctagatttgtgttccaccgaaatccaatcctcctccagcattgtttgctaaaactgcatagaaagaaaaggtgtaacagagtttctctttgcccagatgtacaaattgcacatgttagacggcattatccggagcataatgcctcttgtccagcatgtcccttgtgtttaggcaatttgaaaatagcagccaaataaatacttttatcttcatcacacactttcatttccaaatgaccaaatccaaacaaaaggcctcttgaaataaaattcaattgtaaaatctttcggatgtatacgcaagattattccatgttaaacatccatttatctcccccgaagatgcaaattatcaatctctaattgcagctgctggaactcagtgtaggcttgaagagacagggaggtagaaagattgctctagtggtctagagcaaactaccttgaccgattccattctgctctttgcatgagaacactgagctagatgtttggtagtatgtctcatatcacaattccacatatcgtcttagaaaaggactgttgtacccgaagttacaaagcattgagttattccgctgaatatctcagccaagttaatcttaatcatatctcttcaccaaaaagatactttattcaactgcatatgtggaacttcactgccataattacttctttcatcccaaaatgttataacctatgacccatcctaggctgtaatattttgagacgaatgtagtattccaggtgagctagctttacccatggaagatccatggccatgtaaaacttaattaggtgcttcaaaagaagtgcattttgcaacctcaagttgatcactcctatacctcctttattctttggcctgcggaccttatctgaggctgccaaagatttccttttgaaattaggatcaaaacccctccttaggcaatgttttctagctagatcaattgtttctattacagttactgtaagcattatagactatagtagttgtgaagagaggacataactgaatttataggttagagcatagttttttttttcttttttgctctcaagctctcgcaaaaagagcgctatattaaaaaattccccacttcagccccttttccttctagactccgatggcttgcagccgatgtagggaatgagaggggtcgagcttctcttttctcctgtgtcaggttgttcctgtttctcaagttagtctcgtagtattgtaaagataaagggaaccactgtcatacagttgcccttattcctcttgcttcgaatatggatgaaatcgttggtctttgttccaaaattcttttcctgctcaaagtctattaggtattacttcgatgccttctatgggagtgcgccaaatctccccaggaacaggttgtgctggccatggatctgcttctgcatcgatcttcctcgttgactccggtggtagacatacaagatatggttggtttttttcttttcttgctgaggcctcaaccccccttgtgaggccctgtttgggttcgtgccaaggcatgatcttctacaacttgccatgatatccctgctttcaccgtcattgtgtgcatcgacggcctggttgcttttcctatttcttgttaaatccttctttgcataattctgggcctatatgtaacttacccatcttcactgggcttttatgtaaaactggttgtaccccaaggttctttacatataaatcctcagccagtagcgtcagcttgtccctaaagaaaatactaaggttgttcttcctccataattcaagaaaataacacttgttatgagccttctctccatgctgtctgtcaaatgagcatgatccactacccatgaccttgggaagatgatcctttgacttacttccctcagactttaagtcactgacataaaggtctactgggtagagggcccatatgtcagtaacacaggttagagagaaataggttagatgattttaatcccttgaccttgtagtacaaggtaagggtatagatatgtaaatggaatagttcctactacacgcccaaaagtaccagctagttgttccaccttttacttctagtacattacgaggtattacactttgacttatgaaaattcagtttgaggccagtgggctgagcaaaatattcaacaaagctttaaggcaaaaaaaaagttcattatgtgaagccctcatcaggattatagtatcacgagtatattgactaattggtaatccgcctccatcaggctcattgataggtttgcatatcagtcccatttgacatgccttgttgataatgcttaggagcaaatcagctcccaggacaaaaaaacaggggcgacagtggatggatctccccatgtggccaccttactcctcttctacactaaaggttgtgttcgttggagtgagttgggaactaatccctccagcatgtaaaacgaagtgactcattagcgcatgattaattaagtattagctattttttgaaaaatggattaatatgatttttttaaagcaacttttgtatataaattttttgtaaaaacacataatttagcagtttgggaacatgcgcggaaaacaaaagggctgagttgggaaagccagcaaaagaacacactataaggagtttggaactccattgagaagcactgagttagaggcagttacaataatgaaaatgctatatgccaattagaaccatttggatggaaaccccatatgcttcataatctccaaaacaacttcatgctcaatggtgtcaaagggtttttcaaaatccaacttaagattacaatcaaattggtaaaaagaaaaataaaactaggccagcgcatatgacatgtggctcactataaaaaaaaggcctaacacaacttgtatcacgtacatccgcatgagaagagtatgggtgaagtatgcgcccacagttatgtggatgatttggtggcacgcgatataagcgtagcatttagttatggaatcttcaatgttccatccaaaaaagtagggttaattggatccatgccattgcaaatttgtcatattagaaaaataccaaaactatttgcaatattgactgggtactagtacaattttgtaaaattagatccatgccattggtgtcacgttttccatcttcatatagaccaaaatacccttagacattggacctacatatcagtttcatcttccttctccatcctcccctcttccctatctctctcctagctcaaatcccccatggcagccgccgtcgaccaccgcttcaagatcttcgcggttgccaacgccttcaaccatccgctcaaggacgttgtcgttgcgcacctccgtgcgaccgcgccaacttgtccgtcgccgaagtcgtcaaccttggagtcgacaagtactacgccgccactgccatcgccacctcctcctccgatgccgaccccatgctagaggcatgcggcatggctgcgggggtcaccatccttgccaacaagtacctgcaatgtcctcatgctccccggcgtggccagccaccgcctggctcgccatcctgttccgcgccccatgccctatctccggcgatgccccctagctccgcctatgccatctgactccgctcctgactctgcttgcgccatctgcctccgtccctgactccgcctatgccatcagctgccttaggaaggggatggagttgaagctggtggggatcatggccaacggtgagatgcggatcatgcgggagagcgtggagcgtggttcaaggccgggagcgtggagctagcacggtggtgcaccaccgcatgttccagatgtgggggaggagaagggggcgcggccgaccggcgtggaagaagaaaagaattaaaggaagaagagaacgtgacgacaatggcatggatccaattttgtaaaatttcagtggcatccagccaatatcgtgaatagtagtggtatttttctaatatgataaatttgcaatgtcatgtgtccaattaacccaaaaaagtatgcttggttgaatttcattgctaaattttagagccttctcagaccactcggtcagcgacaaattctattcaagatcccaagcatttcaaaatttgtcatctcacttggctagatttcagaattgcaaacaccaagtgaagtgagcatatctcaactgtttaggttcctcagtggaacctggccactcgggtataggtcatatccgtcgacagtgaaacctctgcgtttacttggttaatcttaaaatatgcacataaggtaggtgtctgtgtaaaaattcataaaagtatttacacgttaggagcgcgtgcgtttctactttattttgaaacaagaaattgcaaacacccatcgtaagcacgaaatctctaatgcgcgatcggtcgctggaatctcagcgcggcgatcagttttcattcatttttttttgcgaggctcgtgcacctgctctcgtcttttccaccgcttttttttttgtttcctcacgtggtttcctttttggcaccgcattactttcctattttagtaaatttttgcacctaaagtttttacatcttaaatttacacatctaaagtttatacacctagagtttatagatccaaagtttataagttaaaagtttatatacccgattcaaatttgaatttaaatttaaatattttttatatatagtacacgtaaagtttacacatctaaagtttatagatccaaagtttataaggcaaaagtttacatatccgattcaaatttgaatttgaatttaaatttgaatcggatatgtaaacttgtgacttataaatttttaaatgtataaactttagatgtatagaaatactatatatagaaaatatttgaattcaaattcaaattcaaatttgaatcggatataattcaaattcaaatttgaaacgggtatataaacttttcacttataaactttaggtctatagactttaggtgtatagaaatactatatatagaaaatagttgaattcaaattcaaattcaaatttgaatcagatataattcaaattcaaatttgaaacgggtatataaactttaggtgtataaactttagatgtatagaaattctatatataaaaaatatttgaattcaaattcaaattcaaatttgaatcggatatataaacttttgacttataaacttttagtatctaaactttagatgcgtaaacttgaggtgtat

SEQ ID NO: 27277 - DNA, 3983 bp, Oryza sativa
tggcgtcgccgtccggttgcagggcggtagcggggcccaccacggccgccgcggcggtgcccccgaacttgttgcggtggtccaacccaaacgggcgcaacttgccttggcggcgccccgcgaaccccccgtcgggaaccggaaccggccccggcgaagaacaaagggcgtaccccggtgtgggtgtcgaagtggatgctgcagcagacgcgggtacccgtggtggtcgactactactcccggtggatggcccgctggcccaccgtggacagcctcgccgccgccacgcaggaggtgagattagggaaagatctctcctccactatcgctggaaaaaaaatgcaatgtttgatgaggtgtgtgcgagagtggtaatgaagttgtggatttgtggttgccgccgattgttgcaggaggtgaacgagatgtgggcggggctcgggtattaccggagggctcgatttctgctcgaggtgagtagcgagttgattgatcacgaattcatggtcgaaacgacggggattgggatgaggttcacttgttcagtgcgttctgtggagcgcccatgaaccgtttgatgttttgtccaaaggagagattttatttggaacccgttttgtgtctgacagaggaggggattattgctactagttcgtgatgtctgctgcattgttttcgctggcaatctcatgtgaagttatcagttcatctggtgaagatttggctagtttgggtggaagaactgacaagaacattagcagaaatgttttttccttgaaagatgaaatgaatgaataagtgcctatgcatctatgtgcatggtgctgagcaactaatagaaatgttgctacggagcaaagcattattctgggcatgcatttttggttcaatttctttatagctcaataatatttaaccttttgttgcaaagtagggagcaaaacaaattgttgaaaaaggcgagttcccttgcacagcatcaacactccgtgaagttcgtggcattggggattacacagcaggagccattgcttccatagccttcaatgaggttgtgctccacataatttatatctgattcaaatcaccatgggtgtgatcctttacatactcacatgattatgtaactttcttgctaatgtaggttgtccctgttgtggacggaaatgttgttcgagttattagcaggttttatgctattcctgataacccaaaggagtcctcaacggtgaagagattctggtaggcaactacctctgttgatcacctataagacataggccatggcttgcactaaaatagcactgagtttggtaattcatctcactgcattatcattattttgcacagcactggcattatactgatatacaatttcaatcgaaatgtgtatgttcatacaaccaatttgcattacaatttacaagctcaatttgcagttctgtgatccccatccaagtgcaaatgttatctgtatatggctgtatttcgaactgtcctatcgtaccactttccatacagctctttctgaattagaagctttatactgaaatagaacttccaaattgtatggcctttgaacatcatttccttgatcacaggcagctcactggtgaactggttgacccttcaaggccaggagacttcaaccaagcaatgatggaactaggagcaacactctgcagcaagacgaagcctggttgctctcagtgccctgtctctagccactgccaagcgctcgcactttccagccaaaatgcttcagtcaaagttacagacttcccacgagtagtcccaaaagccaaaccacggtctgattttgctgctgtctgtgttgttcaaatttcacaaggctttggtgaaggtatagcagaggcagagggcaaagataatctttttctactgatcaagaggccagaagagggccttctcgctgggctctgggagttcccatctgttcttgtgaacgaagggaagactgatacgctgaataggagaaaagagatggacaaatatttgaagcagcttcttagcatagatgttacaaggagatccagtgtgatcctcagggaagatgttggccaacatgttcacattttctcacacattcggctgacgatgtttgttgagctgatgattttgaacctcaaaggtaatcatttgttgtccatactagcagttattcatttctgtttagctacattctattattaatttccacatgtagttgcctaatttctttactgtagatgatggggaggaattatgcaaggagggacaagatagcaccaaactgagattgattaacgaaaatgcagtccagtcgatgggattgacatcaggaatccggaaggtacgcacaaattcaatgtggtaaaaatatttttcctcagagttgattaaatttttagatgaattttcacttcaggtgtacaacatggtcaaggtcttcaaggagaaaaggctgaaagagcagagccaagtgccgacgaggaaaaggagtagacggctgaaataacagtttttcaagagattatagtgcaaatgctagtaatataactgagaagcaactagttaaccactgaatgctgatattatcttgtagtagtatgtaattgtgctgctcactcaatttggcagcatactgctgtattttggcaaagctgaccagaagttggcagtgttatctaaacacctactagcagtcgctgctgaaaaactcaacccattttggttgatcaggctaagttctgaatattcctagtctaatttattgctcagccattttgcacattaagacttgacaaccctttttttaacctgacattaattatatcaagaagatttctataccgctgatatttacatggtactatgatttgattttctgacactacaaattgtgcttcgattatttggcaccttggatccactaagaacctaagatggttttacgtgtcattgttactagcgtaacatgttgtgcattcgcatggctttaacctctctttttattgtttatgtattgttgatagtaagtagctgaaattttttataacaattaacaatgtaaatgaagaattacgttaagcgaagttgaaaagtcaatgatagagtgaaattagcagcttgtttagtgagaatacaaaccgatttttttattacatacatgaaaaacgtgcacgcacacatcactacattcattttttgagaactcacgtcactagcacaccttctaacgtacgctcatcgatgctgttgtgttttcatcgtactcaccattgaatggccccccatattatccctttatattttgttggcatacatcgtgtaggtaaattttaagctaataagtttattttgatcatccaattaaaagtaagaattacgaccaaatgaaatcagcaaaataagttgtattatcccctaaagaaataaagttgtactacatataaataatgttaactaggaatggtgagtgcaatgcagatttgatggcaagcgcaatagtgttgtgttatagtaatatttgttgtaccatttcgcaatttagcattaatatacttttttttggcagaatgacttgaatttaaggttaggcttggttggctggttgtcctttcgacctgtttaacatgttcaataacgcggaggcgtagtgtgctagagtacaacccaacaccccagcggaatgaaccggtgactggaggcgattaccgattagggttgcctctcaagtttctactataattgatttcctctcatccacccatataaaaagcacggtagcatagagataaagaaaatcaaatgagcctaatctgggttaatttatatgttaatctgaatttgaaagatgcgtctatcacttaaataaaagaattatagtagccatttgaatatagtctaccaaagttgtttgtaagtaattttatgcatagtttagtataattttaggtaaactaaaaggtaggatatttaaa

SEQ ID NO: 27278 - DNA, 5685 bp, Oryza sativa
  unsure (1)..(5685): unsure at all n locations
atgaagatgcaaaaatggtaggacattgtctgatgaccttgccttatgcacaatcagctcatggaaggttctcgaataatttttggacctttcaacattcttttactgagacttacctatggtctaacggtatgtatgatatcaactattgtatccaatggcccatattttcagttgacgtggcttaatgagacgttgcattttgagttttaccgttcacttttggctgtgttcttttctcccctttcacaactcacttctctcgttttccgcacgcacgcttttcaaattgctaaacggtgtattttttgcgaaagttttctatatgaaagttgttttaaaaattatattaatctatttttcaaatttgtttaggctaaaacttaattaatcttactataattgtgtgcttggttttctatgttgggaggcaaggttgccaaccttgtctaccgaacacagccgaggatatagtgtcactgtaattaaaacaataactaacagaggatcaaattatcaatttttactacatacccttccattacttttatttagatgacactgtctagtttaatataataaataaataaaaaaagatcagaggtagtaatataataactgatatttctttttgggccattctttaaccaatattttcactttcgactagataatttaaactttgtttgtactttggactacctatactctcgattcgagtatatcaatttctatttgttaataaactctcactgtatatgaaccgtttctttcacgtagaatgacgagttagatgtagatgaataaaagagtggatggtggtccaaaataacacagaggtaaaaacccggtttaaattgaaaacattggataaaagatagtccaaaacgaaacatcattaataaaatttgacccaagataaaattctctctctaataaataccaccaatttatatatgtccatacacgcaattcaccgtcggttgctattaaagctgattcaacggatgggaactaatcccttccgcatggaaaatagagtggtccattagcacatgattaattaagtattagctatttttttcaaaaataaattaatttgatttttttaagcaactttcgtataaaaactttttataaaaaacacaatggttagtggtttgaaaaacgtgcgtgtggaaaactagggagaggggctgggaacacagcctaaaatgggagaaatctgcaaattgctcccacccacacgcactgcacaggcacacacaccgagggtccgtggcgctcgccggcgacggatgcggggggaggggaaggaacgtcgatggggacgtactcgtcgccgccacgcagcaggtaatcacgggagaggtgagcgagagatcagagatgtgtgtggaccatgatttggcgccttgatgctgtctgtgacccccctcgtttgcagcttgctgcaggtgacttggggaatgagattgtggtgtgggctgcgccttggatgcgatctgatgacccggatgaatcgtcttcttcgtaaaggcgtgtgagttggcgggagtaagattgatcggtcacacttgctttggtttaacgttgacaagcttcactgtggaggcaccctgttcgacgttttgcctaagagagcctggagagtttcatccagtgtttacacatgaatgccatcctgtgatgtggtgacgaacaaagccagtgttcaggacagcttaggtcagtggctaaggatggttctttctttttttttttcttttgggagtacattctccttaaaaactggccttctcatgattntaaagtgatgattgttctgatctaacccgtgtgaacttgtgatcatacagctcttagcggcaagaaagttataaaacagggcaaaaactcgaagtgcagatcacctaatgctgatattggtatatgttatcatcaccaaagcacacaattggaacaaaggagagttcacattttggtatggttttctacatatttttcaatgatttatgttgtgaagtttgcagaattaaagtacttgatcaacatataccatagacgtgtccaacttgtccagcagcacatgattacaagaacctagtggactagctaccacgtgataaatgcgagctcattttattacataccattgagcctgcattaaagcacaatttacaaaatgttggcctctctcaacactgctggagttgtatacatactgacatacacaaagtactctcagcgttgctttctcatgcaccttccccataaaattaggattgtcattgcataggaaacaccaaatcccaatgcagtgaagaggactagtacaacatctgtggatttctccgaagtgtatgtcataacaatgggctcttttgggttgtcacattgtttggataacggtggtccacacaaaccaatgtttccaagaaaagaattgttggaaaaggtggaaaactgatatgagtttggtattcttccaaccaacatgttgtaggacaaattcagtgttgaaaggaagttgagtgatgctagctccttggggatccccccagtgagctcattcgaggagaggtccaatgactcaagttgattcaacctgccaaactgagttggaattgatcctgtaagggcattgtgagacatgttgagcccgtgaagcagtacaagccccccgacagtctcaggaatggtaccatggaatgcattatttgagaaatcaatcagcataagggtcctcaatatcttggaaattgtcgtgtcactccctttgtatgtaactgaggcagtaaactggtatgtttgcccatggtaatatttattttccatgactagtgtatcattttgagtcatggcaatcatggacttgagcatcttaaaccatgcttctggcaatgttccattgaagttgtttgaggccatgtcagcaattctgagctgcgtaaatgcacagctgttcctgtcaactgtatatgaaggatccattacttgtccagtgaacttgttagacttgaggacaaggacttgaagtttacgaagtttactcatccaacatggaaaggagtcactaatctgattgtttccaacgtcaaggatctccaagttcctgcaagaaactagagatctgggtatctttccgtcaatcaaattgccacttaaatctattgcctcaagtgaacagccttccttgatgctatcaggtaaatttccaacaagtttattttcttttagacttaatacttgtaattcaatggcatcctccattaagcaggatgggatcgaaccactcaagttattgtaagagagatcaaagagttgcaaattcgtagcagcggtacatattgatggtggaatatctccagagagtttgtttctggaggccttgaaagtgagagtttccccaaggtaagttaagtaatgaagaggaatagatgagaattggttgctcgagtaatctaatgtgctgctaccttcttgtggtatcggtatggcccttcaatactgttgaaactgaggtcaaggaattctatatgaagaggaagcaaaggatcagatccaagacttgtaaagttattgtgcgacatgttcaagaggagaaattgcaagcctttccatgtcttccatgcccactgtggtatagctccttggatctggttatgtgaaatgtcaagactaaacatcttatcgagatgcttcaagatattgggaaaagtagacatgctgcaagatgctaaacttaagaactccaaattggggaatgacaccagtgatgaaatattttctccatctaccactactagtttattgtttgagagattcaggacggataggtttttcagttttgagaatgaggtgagttctattgtgccgtcaaaattgttcgaatggagcacgagagtttccaaatgagtcaaatttaagatctgcggaggcaccttccctgaaaacttgcagttgtacagtgctaacttaatcaattcccttaagtttcctattgaagaaggtacatgtccagacaatccgcagttggagaactggagaacagtaagagaagttaggttggatatccatgacggcatggatcctactatctggaacccagacacttctagcaaatccaagtataggaagctacctaacgaagagggcagtgttccagagaaaccacttgcaccaatgcccaacttcttcagagatctgagattgctgatggagctcggaatcatacctgtgaagtttgttctactgacggacaaattctccaagctactgtcctgtgagaaatttggcagattaccagatatgccaggattcttagaaagatcaattgttctcaacttcttgtgctggaagatgatgggaggaaaccatccttgaaacttgtttgtggatagctgaagaacagtgaggttggaaaagccagccaagaactctggcactgaacctgacaataaattgtaatgaagctcgatcgtggtgagcgatcgcatggcagcaaatgatgcgcatacgggacctgacagtgagcagtaaggtaaactaagaacttgaagcttaggtgtgtacttggctatgtggtcacaccacaattcgccattattggacatatccaccattcccatatggagctcctccaggttagtgaggtttgtgagcaaggtctccatgtttggtgctgagagctgcccaatggagtctacagcgtactgtgtgatgctgttttcgtcatcgtaagacacgatgacgaagctcgtggagaggtcgaggtagaccaggctcacgaggcgcccaatgccagccggcaccttgccggcgatgttggtgtccgagaggtcaaggtgtgtgagctcggtgagctgctcgaatccagtggccgggagctgggacatggtgaagatgttaccagagaggttgaggtgcttgagtgaggttaacctgaacagtgcatggtcgaggccgccggcttgcaggttgtggcctcccaagtcgagtgaggtgacacggccatcggcgccgtcgcagtggacgccctcccagcgacagcagtctgcaccagggacccatgatcgaaaggtggtggagtagtcgccggccgtcgcgttgaaggagtgcttcagccggagcagcgcggaagcctggtctggaaggcacattgccggcgtcgtttcggaggaggtcgtcgtaaggtcgtcgagcgtggtggcctggactagctggaggatgagcatcattgctaggagtgatgccacatggtgagggactctcttggagaacgacgacatggtggtgaaggtattttcgcaagtgctgtgctttatccacttaaaaagacacgacacggtgaaatcagtagagggtggtagatttcttgaattttagacgactgtcagaaggactggggtcatgtatcattggttgaaagggctgctggctgttgcctaaacattgtagtgggaatggaagacgtgtagtacatgataactgcagaataccccccaagttggcacacatgtatagtaattgctccagttctgacgacctttgagaagacccgcaaattggacatgttacacatgtataagggtgtgtttagttcatgaactaattagaagtttggttgaaattggaacgatctgacgaaaaagttgaaagtttgtgtgtagaaaagttttgatg

SEQ ID NO: 27279 - DNA, 19009 bp, Oryza sativa
aatctctttttgaaaagaatcctttctcatcaaaagaattaccactttctttggtttgaaaaaaaaactatatctagactctatactactttatactgagtataatgctagtgatggtgtttgagtctgtcttcaatgccacaagctaacatgtgaggctatgtccacacgtatatgattccttaccaaggcttggtttagttcccaactttttctttaaactttcaattttttcatcacatcaaaactttcctacacacaaacttctaacttttccgccacatcgttccaattttaatcaaactttcaattttggcgtgaactaaacacaccccgagtataactttgttgttgtcatttcagaattgttgaaccaacgtaagtacaagtctaagacttcaccgctttttatttgttaattctatatttagaatttaaaattagggtagtagaaactatcagaaaatgtactatgatagaagatgcatactcacaaatcattaatttcgaatttgatatttattttattaagaaagtactccctccattgatagtcatatttcatcttgggacacagaccaaggataaataattctacttatcatccatttaaatatgctactagttattcctcgtaaacaagcgattcattaatatttacattacttgatgcccatgtagttaatcttgtgtggaagaatagagagtcacgcatgaaatctgagaaagtcattaagaggatatgttgttggattgaaatatgcctatcaaaaataaatttttcagatttggaaaaatatcaatcaaaagtagatggagggagtactatattgtggctggttgcatatatgttgtcttaattatttttcatatataatgagttatcttccatacgatcactaacatatcgtaggagtgtatatagaccatatttttctgtattactccaactgactagcaatcatatttgtggggtcagaatctcaaggtagaattatttctagattgtaagtgaatagaaagttggttgttagcttgctggatgtatggtaggtcgatcgttattagtagctgaaaaagaaaatagctggataacacggcaggggaaaaaaaggcatatctgcttatttctatgggaaacactcgttagaagcatttatttctttggatgagttatcatcagtaagaaattatgtagtagtctttatggcatgttcaatggcaatgataaataccgtctcttaaacaatactaccttcgtctcaaagtaattataattctaaattgtttagcatatattaaggtttaagaagaaaaactataatatccatcgttaaataatggtttataggtaaaaatgaaagggcagttgagggtaaaatagaaagaaatttggatgagaagtgattaatcgaatcattagtactttattgtgacaaatattttgggataaatttaaattctagatatacaattattatgggacataggtagtacagtattatttacagaccgcattgttacaacagttgagatcatagaggctctaaccattaactcaatccaaagatattcttttattattattcttaatttctatttttttcacccgcatgcaaccatgtttctattttataggggttatagagtcgttgttgagccgttattatctataacaatgatgttttgtctttcctttttctctctcttctatgttaacaatttatactatctatatagttgatgcccactaatttttaaaagcttaacatgcaagtattctatatcatcacccactagcaatttttatctagagtattgtatatcacatgtaagtgtgcaatatcatcatccactagcaattattatctatagcattttaaatatcatgcaaacatgacatatcatttacaattttgttgtatttttagaacacacactagtagagaaatcatatttaataccgattgaaaatctccattaatcccgattatagcaatcgtgatcaataaatcaagactaaagatctcgacctttattaccgagtcaaaaaaaatatgtgggatgtgggattcgaattcaagatctctcatctcagcccttacgcgcattagcatcccacatactctacacatctaacttaaatagagatgtttttcttttgaactaactctggtggcatcttaagtaataccaaccggtacttaaaaatatctttagtatgggttggtgttatcgaaaaaatacatctttagtactggttgataacatcaaccgggactaaagatccaccaacattagtctcggttggtggtaccaatcggtactaaaaatacatttttaataccggttgaaagatgagtttgtgtgtttgggacattagataaaagatgagttctctagtattgtcaatatgcaagcaatgtaaccattatctccacatcatttttacattatttaaacatatatatctatcatttctataacgtataatatgtagccatccatgtatcccgcaacaatgcgcgaagtatcaactagttatttctaattagcaacactaaaggagcactattgatgaccattatacatctttattgaatgtatgtgtcctcgatcttagcttggacttgacatagaatcttggacccaatgtaacgttagcatggactacacttttggactaaacaagtctatataacacatgtatatgtaaagatcaggatgcatgcatatgtgcagactttgaagtcaattcgttggaaaagatgtactaacgaatctaaatcagtttgcaataacgtgtgttcaaccaccactatgaaaattaattacataaagctagccaagttagaaagaatgtaatcggaaattacgatattaatttaactaccgcttcaattggatgagcgctgaaaaatttgagagacaaagctaccacatcatcgttttcttcaagcccatttagtttgaaataattaaggaaagttagagaaaagtaggtggcttttgtaccagcttaaactggtttgttgttcccgtgacagcatctactaataacacatagccggccgaagcctggtccggaatgcacttgatgttcatcacggctaagcagtgacgccacatgctgagcaaactcccttcgagaacgacaacgtatggatggtgacggattaattttcgcaagtgcggcactttaatcacttaaaatgaagaacgacgacactgttaattagcatggaagatttttggattttagatcgaggctgtcatataaggacagtactcagggtaacatgcatcatatttgttcaagggaattaattgttgcctgaacattgtagtgggaatggaagacatacatggtaacatgatgactgcaaatttaaatctacagttagaggaaattcaattctagattggttttttataggacggatagagtacaggtctacgatctacaagaagaagaccaagctggttttgaaaaagaaaactttctgtttgatgaaaatcctttcagatcaaaagagttaccgctttctctcgtgtgaaaagaattttttttcttaaacttgtgcccacagaccacagtgtaaaatgcaattggaatatcgatcggcactcaagaatcagttgtaagctacaaaagattgtacgatgtctgcgatttttcatcaagtaacgcactcctacgaaaacaatttttctgtgcgggtaaaaactgtttttacgtgtggaggtggcgcccgtttgcctgaaagtgtttgcaaaaatctggtttctctgtgcgggtggcgcacccgatcgcaaaaaatcagattttcgcgtgcgggtgcttctgtcgcccacacgtgaaaaaaaaatccaaaaaacaaaataaaaatagcgaaaaaaatcgaaaccctagttgccgccgcaactcgtctcgccgtcgccgtcgctcgtcgtcattgtcgctgttgtgcgggggagggtgggagagaggtgccaccacggggagaacgtggggacggccaccatcctcctccgctccggccaccttctcctcgtcggtggaaagacgccgtcacggggagagcgcagggacggccgtcgtccgcctccgctccggccacctcctcctccttgtcggtggagaggcgccgccgctgggatggccagcgtccgcctccactgggacggccggcgtccgcctccactccggccacctcgtcgtcatcgtcggcggcggcgggggcggtcgaggcctcactcctcccgccgtcgcctgctgccaagccgcccgcctgccgccgcgtgagtgcgtgagaggagaggagagaaagttggaggtgaggataaggataaggaggtgagagagttggagggaggatataaggatggaatttttgaagtgttgggagggaaaaaggaggcagggtatttttgtgtgggaaaaagtacgagttacccccataaactatcgcggtcgaccgaattacccccctgaacctgaaaaccagacattactcaccttaaacttttaatagcggataaattaccccccctcaacactgttttgagtggttttgacttaagtttgcatacgtgacgccaatgtggcaatccagtcagctaataaaaataaaaatacctcccctgggcccaactgtcatacccctctctctttctccccagtcgcactctctctcccgcgtatgcgcttgggcaggtggctccgcagacggagacaagagcagaggcttgcggcggctgcccgacgtgcgtcctcggccgacgatggcaatgggaccgatggcgatgaggcagaccgagcaatgcagggtcgtcaatgaagatggcttgttcctagcgatagcggcgtcgagggacgtgtcccctgtgcggcgtgcttggccggcgaccggtgagcactgcgcacggaagaggttgggtgagccggtgacctccggatcccagcgacggtggagatgagccgagacggagagggcagccgaaaatgggattcggggggacctatgcggccggaggacgacagacgcgccagcggcgcgacgacgtggaggaccgagacggaggcagcggcggcgcgagatgatgagacatcgatgcccccctactcagctcggtgggacggagatcggcatagccttctcagcccaccgccagcaaccgccttcacccccgcccgtcgcctgtcgcctgccgctgcctccgccccaacccgctgccggcagacgccttcgcgcccgcccacgcccaccactggcagccgcctccgccaccatccgctgtcggcagccgcctccgccctcgcacactgcctgccagccgcctctgcccctgcccgtcccggcctggctcctcgcctgccgctcaccagctagagagagagaaagagagagaggggttgagagaaggggagagagagagggagagaaggagagaaaaaagcgctgacaggtgggcagcaaagagccggcacctttatcctcaaataggtgccaatttttaaaaagaactagcacctattactgttgtaggagaaagatgccggtttttattgaccattcggcaccttgtagtataaatccatcggagtagttgggacgggacccatccaagaaccggcatttcttttaaaaggaatatgtgccggttttgtttaaaaatccgacacccgtaaaccgagccgagccgcacctaaggagctctctcaaacccgtaaaacgtttttatccatctacgtactctatctccctcgttcttatcggatcagttctctctctctctcactctctctctcgtctcttcctccttttctctgcctcctctcttgcctcttcgtcctcggcggctgcgggcggaaaggtgacagcagcgagcgacgccctcccctccgccagatccggcaggaggggaggcagcgacagcggtgatggcgggaggcagcggcgggcacccacttgtgtgttcatgttcatgttgttcttgtgtgttcttgattgttaactatgtgttcatgttcatgttcttgtgtgttcttgattgttcgggggtgaaagggagttgctcggagccgatgcatcgagccggctttttttattcctgaaatcttaaaggtgccggttctaaaacataaaaaaaccgacatctttatccatatagatgcctgttctagaagcagctctgattcatcagtgccgcctctgtggtgccggtacctaagggggtttcccaaccggcactgaaggccttttctgtattagtgtatttaaagaaagggcttccaaatgcaacaagagcactgcaacaatggtaaaccttgcggaacagggagattagacggagctcgattagtttccgctagacgaggaataaagaacataaccaaaatggggaacaagggaatactggaccatatctgcttttgcgccacgacaaaacaaaatgctagttgctagcttcccagtaacgcatacgtctggagcgtttgtcccatcgacgagggccaatgagactactatacgcgtttactctttttgtttttaacattgcctaaactgtaatttactcattttcgttagacattgtgccaagaggatgccacttttcaattaacaagaaagatattacaatatagtcatactacaaaagaggaaaagggaaaaaaaatacaacaaggccacacaaggacaaaaccaccccttctagtttaccctaatgtactccatagaaatgaatgcgtatggatcattgtatccctagctagataggggcagtttatttatttgtgtatttgtatttgtaagacaacgtagatcactataaattgttcacaagcactcatggacgaccacctccgtgtcgataagggtgcccgcatattattcctggctcttgatttgagcaccagttcagcaacctcgcggcggaggccatcaagtgtccctcttgcagcgctgtcgtcaagatgagcagcgtgaggagcacgagcagcaggtgccggccgccggtgatcctgatgagcgccaccatcgtcgtctgcttgcttaattaagttaacactgcgatgccgtgtagccgtttatataatagagcgggacgagctgatgaggtaggtagctagcttggaggccaactgctccccggctgaccagtcaagtgtgtggcctcgcgagtccaataattggggtattcctctttcaccagcataagcaaaaaccgattacaattgaaatctaaacgtgtattcggattaattaattagtacaaagttaaaaagtagatttgaaacattataataaattcatatgtagaatttcttttcacaaaaatatcatgtgttagcttttcggaaagcatgcagagtgtagtcaagaaatctagtcatgcatataggagaccaagctagtatagtatagatactaaactgaggtacttattagatagtttaattggtattaatttataatttcaaaattattatatttggaaaatactaagtacatactacctgagtacaatttggtatgcttattatttattattccgaatttcataatctgtatattaccaaaaaggcataattgggactccttatcgatttcactttgtcatttcagaattgttaaaccaagataaacaagtctaagacttcccaactttatgtttgttaattcagaatttaaaattttaaattaggataatagatatataatgtccgaaagggtaccacgatttaaaatcattagttttaaattttgtaattattctattaagaaagtactatattgtggctcaaataaacccgttctgtgttttgtcttcattttcttttatatataatgatttgtcttccataccatcactaggtaatgtaggagtgtatatggaccataattttctttatcagtcaacttggctagcaactatgcatatatgtctggtcagaatctctatgtagaacactatttgtagattttagagaatgggaagttggttgttagcttgttgggtgaaggataggttggtagtaattgccaaagaagatagataaatcgggaggtaggcagtgtttagttcccttcaaacttccaaaaattccgtcacatcaaatatttggacacatgcatagaacattaaatatggacgaaaaaaaccaattacacagtttacatgtaaattgtgagacgaatcttttgagcctaattacgtcatgatttgacaatatggtgctatagtaaacatttgctaatgacgtattaattagccttaatagattcatctcgcagtttacaggtggaatctgtaatttgttttggtattagtatacgtttaatacttcaaatgtatgtccgtatacgtcagaattaaaaattttggccaaacaactaaacacggctgtaatataaaaggccaacattagaaatttcaagtcatatcaacatttttggtgggcagcattcgtttgattcatccatcctgtccttaaaaagaaaaaggctaggtatgttaatatcaaataaattatttagataatggaatagaatcccaacctttactcaacgagatacaaccaattattacacaaatttatgcaaactagcgcacatatacaagttttttttaaaaaaaaacaccaacaaattaagctgaaggaaattaacacaagctaattaataatcgcccacacaaaacaaagactctccattaattctaaattttaagatgtattagcttttcggataggagagtagtgaataaatctagtcatgcatataggcaagaccaaagttatcacaggacacattaaactaaggtccatgttagatagcttataaatagttattaatttataatttcaaaattattatatcaggaaaaaatagtaaatagatactagttacttatcgattcgaaatttaatactctatattaccaaaaaggcataacttagacttcttaccaaataaaattttgtctttgtcatttttcagaattcttaaaccaagatcgataaacaagtctaagactatgtaactttttatctgttaattctgattttaaaattttaaattaggataatagaaagcattcgaaaaaggtactacgatggaatatgaatactcaaatatcattaatttcgatttttttaattattctattaggagtatactatcaacccatctttccgcttatgcttatacttatgaaccaaaatttgaattctcaacctttaatttgaagttgactttggggttttttcatcgaaatttacttttcagtctttgattttagatcgctaaaaacacatacataaaagttttattcacaaattatttctcgtttgcaaatatgttacaatgggagcgtatattgtatcttactccctccattccataatataaggcacaactaatttttatagttgttacataatataaggcatatatgcatgcatgccattaactaaaatattattatttaaattctccactatcaagatccctaattttattgggtgcatgcattgcatttattagattaatccaaactatgaggtgataataattttttttagtctttgggttaaagttgtttgtgccttatattttggaatggagggagtaataaacccgttgtctaagtgatttgtcttcaatactatcgctagataatgttgtagtatgtaggacagtgggagtgtatgtggaccataattttctgtattacactgacatgtatatgtgccggtgctaaaccttggaaattggggtgtcagacgcggaatagatcagggggatagaatctcttggggttaggttaggtgtctctcggcggtggaggcagcgactgctttgagtggaaaccttgcctgtactatgagcgcgggttctgaaaaaacggcaacagctaaaaggaatacaaatctctatctctatctctactacttaaaaaataaaataagaggtgcttccatcgtttgtaaaaaaaacggacgaaaaaaatctgtccgatcaaaaacaaaacggacgaaaaaaccagacaaaaaaccgggcgaaaaaaaagaaaaaccaaatcgtgaaaaaaaggaaaagaaaattgaatccaattccgcgctaaaaaagggtgaaaagaaattaaaaaggaatatgtccgattcctaaaaaacaggcgaaaaataaccatgtgaaaaaaagaccggataatagcgagtaacacataagatcggaaaaaaaaaagtccgactcctccggtggaaaaaagagagaaaaaaaacgaagagaaaaaaactgccatcgcaaaaaaaaatctccgactctaaaaaaaatccgactcctcgggggagaaaaataaaggcgagaaaaaccaggaaaaagagaaaaaaaaacttctatatagtcctccgtccctgtacgcccgatgaaaccccagccaaagaaaaaaaacgaaattaagcaaagggataaactagattgaagttcccaaaattaaaagaggataaacgatattgaaactcccctaactcgaaaaaagggaataaaatatattaaaatttcccgacaaaattctctaaacttgaagaaccctaatttcgggtaagaaccataagagtcaaatccaaatcaattaagctaagggttcgggttacttaccggacttgaagcccctgagctcaccgaagctttccgggaagcggcaccgccgcaccttcacctcctcgcagtcgtgttgggttccctgcacgcgctgtcctagagcacccctccaccgtcctttgccgaagacgggaagcgtcggcttggcgtcgccctaccgccgacgaggtccaggccgctcggcgctcgtcaccgtttgcacgcccacctagccggaccgccgacgtcgtggcacggctttgcgccgccctcgggtgcgcccccccagccggcaaagcaggagccgctcagcggttgtcgctgcacgcgcgcaccagcttgccggaccaccgtcattccgctcgctcgtcgccggagagaaatgggatcaagagagagggatttgggagctagggttttgcccctctccccggtcggcgcttcatccggcgggaggatgattggagccatccattagatcggacgactcagattcgaccagcgtcaggccgtcaccgccgttgattacgctgcgcccaatgggccgcggaagtgcatcggaccgtccccgtatatgtcggccgagctcagctgctcagcttgcgggcagtcgaattgactcaactcgccgaagatgcgccagcccaagtttgggccggcttgggaagacctaggccgaaagcaaatttgatcaaacaatgtggctcacatttttcaaattaaagtccgttggataaactcttaagtaggctcgaaaaataaatctaaaactaaatcctaaattctatgctaattgatcaaattagactctgttctacctatttgttaatatatcaaattaaacttgatttttacagatttgaggttttcaaggtgtcacactatcaaacggtgtttttcccgttgcaacgcacgggcactattgctagtattacaaatgactaaatatcaaataaatataaggagtgagtcttcgaacctagatcagctaacccaccatcttgtagagctagccggaagaccgctggatgtttctcaagaacaacggtagctgcaggttcgtacgacaccgccgccgctctgacggggcccgcgtacttgggggctgaaaagacgaacagcaagctggcctgcactggcctgcagggggccatccatgtcgttaacctgttgcgtgatcggcgtggcccgcgctttcgctttcgattcgcggaatcacgagcttgcatacgacttcgggtgcccgcggcccttgcatccccaaacagcgcgagcggcagcctcccgacgcgaccatggtatatcaatgcagtttctttccaaaccagtgtactcgtgcaaattcacaaaaaaaaacatatatttccgaatttcttttcttgctcaaattggctggcaaatcataactgtgtggtcagaaaccaattgttgaattatttctttattttaagtgaatagaaagtttgtctactagcttgttgagtatttgataggtcagcagtagccgcctatcaaggtaacattagtgaagaaatggactttaataccggttggaaactctctttagtaacgattattaagcaaatcaggactaaagatctcgatctttactaaatatgcataccaagtaaaaaaatgtgtgaaatgtgataatcgaactcaagatctctcatctcaaccctcatgcatgttaccatcccaccttctacacacatctaacttagatagatatactttcttttcaaactaaccctaaaatatcttaagtctcaattggtaacaccaaccggtattaaaaatatctttagttttggtgttaccaatcggtattaaaaataaatttttagtccggtttaatattactaaccggaactaaagatcctccagcattaatttcagttggtgttactaattggtactaaagatgtatttttagtactagttggtaactccaaccgagactaaaaatattttcagagatttggacttttagaccctacacttgctttagtaccgactcttaatctagccaagatatttgtgattttggataccacgacgaaagattagttctccagtagtgtaacatggctggagaaattatcgatctactgaaatttaaatcatatgttcaaatccagttgggctgtgtacatctattgtgaatgtagaggccggattttaatccattttctaaaaaaaaaagttcaaatccagttgttctcgatgggaagcattcgttggatgcatatgttactttggctgagttctcatcaattagttcgaaaagtctttaggctgagaacccttatcggttttatttggttcttatgtgtttgtctctttgtttaatgtggataagggttgagtgcttcataagagcgttgttttggagtagagtgcctaaaaattgtgttgttctttagttgtctgtcaatcgctttacgatatagtatgacatttttatatcaaatgtagactgtgtgcatctccccgcaaaataaaaataaactctgtgcatctgatatatgtatatatacatatagtctgctagtagtaattatatttcttagcggatttttttccattaataaatactacatagctgctaatccaatgtaacattagcatagactactgttttggtgcaaacaggtcagcattggtatgcgcagactttgaattagtcttctcgttggaaaagatatatgtagtacgaaagtaagtttcataaagctagctacggtcttgtttagttcccaaaacaaaaacttttcattcatcacatcgaatatttagacacatacatagagtattaaatatagaaaaaaaacaattacacaatttatgtgtaaattgcgagacgaatcttttaagcctatttgtgtcatgatttgataatgtggtgctatagtaaatatttggtaatgacggattaattggtttaataaattcatcttgcagtttcctagcggaatctgtaatttgttttgttattagattacgtttaatacttcaaatatgtgtccgtatatccgatgtgataaccaaacatacactttttcaccaactaaacaagccctatgtttctctaaaatccttttggcacagacaacgagaaaaaaatgatacacgtaatgtaggatgatacaaatcacatattatatgtactatcattttctttttagggtacccacatatatactcgtaaggtaggatggataccaagcataaaaaaatgtattatacatacttattatcttcttttcagcacgcccaatcagatacatgtaaggtaggatggataccaagcacctaaaaactgtattatacgtacttatcattttcttttcattgcacccacaccgatatatgtaaggtaggatggataccaagcacctaaaaactgtattatacatacttattattttcttttcagcacgcccacatagatacatgtaaggtaggatggatatcaagcacctaaaaactatattatacgtattaatcattttgttttcatcgcgcccacacatatatatgtaaggtataggatggataccaagcacctaaaaacggtattatacgtatttatttattagtttctttttagcgcccctacataggtacacgtaaggtcagatggataccaagcaccttgtattatacgtacttattgatgtgaccattaagtatatgcatataaccaagcatgagaaatatagaacattgccaaagaatgcatcagatgaatggaggatctacaagatattaaagtacaatgagttttggaatccagttcggtctccggagacagcattgactttaaacagatttagcgttttcatgccaactctgattcgggtgatcttggacttgatggatagtttatctcattacctttcaaacgcatctggtctcatatccaaattcatcttgagtcaatggaaatcatcaaaacaagacatgatattgctgaaatcgaacttgggccttgtaataaactagactcatctcagaagtgtctccctccacctccacgaattagcacttaaccctaaatctatttttctctataaatgtctatgtacacccactagaacaattgggatttggtttaggtataagtttgccaagtgctattcaacttgtctatagtcctcgctcgattagtcggtgactataaattcagatccctcaatagtttgtgcgttgatttgccaggtcgattagatctaccacttcaatcacaactatttctttgtgcttaattacctattcgcaatatttagattgtattttatcttgttcttgcagtgttctcttgtttgcatttaagggatcatcaaccgcgcatcccggttggtacgacatcgtttgtggtgtagcgattgcacgacgttctgaacttgttctggttggtagccacatcgcaaacgtcacactcgatctgatagttatcccctcaccggaaaatcgggccacaagagagagcatcatcagttggtatcagagcacctaaattagctcatgctcaactggaccaaggtaaaaaagattgtgatattctacaattgtccactaattatgctatgttagagctacctgtagtggaacagatttctaatttccctttatcgcaagctaaaaatttagattgtgttgatattgataattcttgtaatgagaaagagttgtgcaatgcttcacttatatacatgccacaacttgtgaaagaacatgttacttctatttctaaatatttggtttccactcaaaataaatgtgtctttgctattgctgaagaccaagaagagctgaaattattgttttctttatgtactttaggttatatcgtatttgatgtcctttcttggaacaattatcatgtcattggtaaatataataatagaggagattatatggtgcatcgtgtgtatatatgttcagatatgagtactcttttaaatatgtgaaaatgtgagaaattaaatggatcatacaacattgatgctattgggataaattcacctaaccttgttttgaagatcgacaacaatattcaagaaggggagtgttgtgcaccattagattcaatggtcaagtctcgctatcattttaggacttgttcattaagtgaggtgagttggttttccctttatataaattggatttatgaggaacaaatgatactactcaatgactgcttgtttggtatttctttgtgtgatctctcctatgacgacaattgcagtaagaaactaaggacggtttccagacaagaaggagaggatgatgtgaccatcaagtatatgcatataatcaagcatgaaaagtatacaacattgccaaagaatgcatcaaacgaatggaggatctacaagatattaaagtccagtgagttttggaatccagttcggccttcggagacagcactgatcttggatttgatggaaagcttacctcattgcccttcaaacgcatccgacctcatataccacttcaaacgcaactatttatttatgcttaatcacctattcacattatttagattgcattttatattgttcttgcaatgttctcttgtttgctttacagggatcatcaaccgcgtgtcacagttggcacgacatcgtttgtggtgtagcgattgcacggcgttttggacttgttctggttggtagccacatcgcaaacgtcgtacttgatcaaagcgatagttatcccctcaccagaagatcgggccacaggagagcgcatcatcacttatcatgttcttttcagtgagagtcagacaatgataagggagtcatcagaatcaaacaatgatagtgagaggccatttgtttctggcgtcacaaaacttccgtttacgtcggtcaaccggatggaaattttgtgtttcatgtattttatagtagtaagcactcctttggaaccagtccaaagaaaaagtgaaagaaactttgaagaatcgaaatctatagaaaattatttctgcatggccctttcataaaggaatgacacaaggaaaatcatttaaaactcctatgaaataattaatatcataagaacattggagggatgccatgtatactcttccttgtaattaatatcgaaggaagaacactctctacgttctttatacgcttggctcccttttcatcaaaggatttgttataaggaacaattctataggattttttttctatttttttgccctttcaacaaatgattgatgacttcaaaatcctgtgaaattcttttggagtggattagattaatacatgttttttttcaaaaaaagttagcatgcatggggtctaatatcttggaaaatgttatttcaatcgacctctcatccaattctcatgtatttctcgtagcttatccaaacaattcacctgtacagaaaccatcataggtgtcggtttcccaactagccactattgatcggcaacaatgctcatagacattaggtgccagattcagaatcagcacctatagagaatataggttccggttcttcacccacaaccagcacatatattatttaaaaaattaaaaaaaaatccccgatggagctgatccggcaaccgcgccatcacctcgccatgccgcactggctgccaccccacgctgcactgggggactagctggagaggggttcaacgagatccaggcggccccagccactacctcacgggatggataaatgtgggtgttggctgcctctgagtataggtattgattttacaaaatcagtaatcggtatctaaaataaactataggtactgatttattagttaaaccgacacctataggtactaacattataggtgtcatttttttatctagaatcagcacctataatattaatatagataccaattttttttaaataaactagcacctataatataaatatatatataggtaccaactttttttaaaaaaaaaaaactggcacctatatacaataggtgttggtttttatctatattttttaatatgtagaggtgggaaatgatattaggtgccggttttaaataaaccgacacctataagcctatccctatgtgaggttgtttgtagtagtgattgtttctttatgttccctttgttgtatgattccccatttctgtttaattttcttttgttgtacgattcataggggacgctctcaaagaacacaacaaagtggagtgcaacttactttcatactttgctacactttagtagtgttgagaaaataagtaaagattgatgggaagttctgggggagtgccagagttgtcggtactctctcctctcttgtacctcgacagaagcttctttaataaaataagtgttccttttggtgtttaattacttaagatatattatccttattgcgggttcatcgcatagtatttatactccctccgtcccaaattatagggcgccccctttttaagaaaaataaaactcggtagctttcgactaataatcatactaactatatctatactaagtattatgtatgttatatcactagatttatattttgaagtactttcatgtgatgctaatttcatatttgttgagatcataaaatagaataaaatactggtcaaagtatattatttaagaccgtgtaaaaaaagggcttataatttgggacagagggagtattaagtactctggacctagaatttggataaagaaaaagttcctacgcgaagctagagtagtattcaataagttaggcgtagtggtgtctagattagcagttagctttgtttgttgtgtgctccacagaaaatgaggtaggcaacacatggtgatagccatgtccgtcttttgtgtcccttcacgttcgggtacatcatagagctatagactgaactcagcttggcagaccaggggagagtcagtgctcaaagcaatcgatagagttttaccttaacttaagtttagttaattaatccatgggaatcctctctagcataagcctacaattcgttgttgttcttggttgaagtctattcttagattattcacgcatgttttctgtgattcgatacccttagaatactctgaggtaaagtgttgtagtagtatctatgcgcttgtgaatttatctgcgaccgtaacaaatgccaacaagcattatgtttctaaaaaataattctctgtctttcaactctcttttgattcaaacatttcctccaacccatggttcgcacactaacaccctagccgaatctcaaggaaggtgcctttcctcccctctacagaagcttgggctctcacaaaaaccatatatttgtatgacttatgttactccctccgtcctataatataagggattttgtatgggg

SEQ ID NO: 27280 - DNA, 1316 bp, Oryza sativa
cctaaaatcccttatattatgggacagagggagtacataactagctagcaacgggtttttgtatatggaccataatttctatattactcaacttgtctggcaatcatatatttgtggtcgaatctcaatgtagaattatttatagattttggtgaatataaagatggttttttagtttgttgggcgaaggtaggttggtagtaaccaccaaagaacatataacatgggtgagaaaaaggctaacattcaaaatttcaagtcatatctacacatggttgttttcggtggacagattctttgattcattcattttttaaaagaccaagcccaggtatatatatcaaataaatagtagttgggtatgttaattaacaaatactttaattttgggaaaggtcatgtagcctagtggttacaagagcctagcaccttaggtcctaggttcgactcctcgtgggagcgaattttccagaatttaacggctttgtgctttcagtggtagatgacatacccgtcgacagtgaggtgcttaattcgtcaatctccaacatggatttgccggcttagtcttcgaagatgctcatagggtagggtttgcgtgcgtgcgatcataggggtgagtgtgcgtgcattgtgagtatctacgttgtactgtgtaattctaaaaaaaatacttcaattctaaaatttaagatgtattggctttttaaatggcaaatttatattttaaccattgaatttttctataacatattattagctactaatgaatcaatatcatataaaaatattttcaaatacgaatctgatgataactatgtgcatgacactaaagactgatatttttagtttaattattagtaaaaggtttcaaataaatattgactttactgaccaaggacacctcataaatttagccatgcatatagtccggaccaagttatacatgatagtttagattaaactagggttcgtgttagctagataaaataattattaatttagaatatcagattttattgtattatgacaaatatttaaaagagatcgactagctaagtataatttgggatttgccggctcagtcttcgaagatacttagaggggtagggtttgcgtgcgtgcgatcataagggtgagtatgcgtgtgttgtgagtatctgcgtgtactgtgtaattctaaaaaatactttaattctaaaatttaagatgtattggctttttaaatggcaaatttatatcttaaccattgaatttttctataacatattattagctactaacgaatcaatatcatgtaaaaatattttcaaata

SEQ ID NO: 27281 - DNA, 4636 bp, Oryza sativa
tttgcgtgcgtgcgtcataagggtgagtgtgcgtatgttatgagtttctgcggtttactgtgtaattctaaaaaaaatacttcaaatctaaaatttaagatgtattggctttttaaatggcaaatttatatcttaaccattgaatttttctataacatattattagctactaacgaatcaatatcatgtaaaaatattttcaaatacgaatctgatgatacctacgtgcatgacactaaagactgatatttttagtttaattattagtaaaatgtttcaaattaatattgactttactgacaaggacgcctcataaatctagccatgtatatagtccggaccaagttatacatgatagtttagattaaattaagagttcgtgttgttaggaaacgataggcgaacaaacgagaaaaaacaatagatcaatcataaaagacacgagatttaacgtggaaaaccctcccaaaacaagagagaaaaaaccacgggcgccagccagcaaaatatcttcactatatctgaggtgaggttacatcgccgcacggcggcttacaagaggtatatatagggtggaaccctaaaagggatgacgagaagatggcctttattaagtgcaaatgaatttggatcacaactcaacaaactccaccttgagacaaattccttcttgtagcatgaattaatccttcaccctgaatacaacaaagacaaaaaaacactttcggcgccaaatagcctctcgggctaaaccactataccaactaagcttgagcaaagctcaaacttagcaacaggaacatgctttgtcatcatattagcaggattatcatgagtacttatcttgcatacctttagcttaccttgcgcgactacatcgcgaacataatggtacttgatatcaatgtgctttgtcctctcatgaaacatcttatctttggtgaggcatatagcactttgactgtcacaaaacaagttaatgcaagaatcaactccacaaagctcagcaaacaatcctttcaaccaaactgattctttacatgcttcagcaatagccatgtattctgcttcagtggtagactgggcaacaacagactgcaatgttgccttccaactcacagcacaactcccaatggtaaacacataacctatgagtgaccttctcttatccaaatctgcagcaaaatcagaatccacatatccaacaagccccttatcagtcctgccaaacttcaagcaagcatcagctgtgcctctgaggtacctgaaaatccactgaatagctttccagtgttctttaccaggattagccaggtatctactaaccaaactcatagcatgagataaatctggacaggagcaaaccatggcatacatcaaagaaccaacagcacagaatatggaagtctagacatgtattctacatcctcatcagtactagcacattgtaaagctgataatttaaaatgaggtgcaataggagtactaacaggctttgcatcatgcatgttaaaacgctgaagaaccttcttaatgtagctttgctgactaagaaataacaaaccagaatttctgtctctagtgatttccatacctagaattttcttagtagcaccaagatccttcatatcaaactcactactcaattgtttcttcaatgtagtgatttgttccttgctcttggcagcaatcagcatatcatcaacatgtaacagcaagtatataggtgatccattaataaatttaatatacacacagctatcaaattcagacctcttaaagccatgtgacaacataaatgaatcaaaccttttataccattgacgaggagactgtttcaaaccatccaaagatcttttcaacttgcaaacataatcctccttaccaggtacaatgaacccttctggctggtccatgtatatcttcacctcaagctctccatgtaaaaatgttgtcttcacatctaactgctcaagctcaagatcatgcatagcaacaatactgaagaatgtgcgaattgaactatgctttacaactggagagaacacatcattataatcaacaccagcaatttgactgaaaccttttgctactaacgttgccttaaacctcggaggctcgctaggagataaaccctcctttctcttgaagatccatttacaacgaacaggcttcttctgttttggcaagtgcacaagctcccatgtgccattcttctcaagaggctgcatctccccctgcatagctgagatccacttctcacgatctccagaaacaacagcttcagtgtatgtggctagctcaagagtattctccacctgttcagcacaactaaaagcataataaactatatcacattcctcaataaggcggactagagctccacaactcctctttgttctgcgatgggcaataggttcatcttgtggctgcaaaacaagaggtgagtgctgaacaatatcattaacatcattaccaacaatttcagtttcctgatcatccatgtgctccacctgcacgctaacatattactgctcctcatctgaaccacctggtatgacatctgtgggcaagctgtcattaaacataacagattcattgaaaacaacactcctgctcatgaaggtcttgttggtttcaggattccataacttatatccttttactcctgaaccataaccaagaaatagacacttaatagctctaggctctaattttccattatcaacatgagcataagcagtgcatccaaaaactctcaactgtgaataatcagcaggcataccagaccatacctcaatgggagttttcttattaagtgggatagaaggcgacttgttgatcaagtagcaggcggtgttagcagcctctgcccaaaaacgcttgttcatgcgagcgttggacagcatgcaacgagccttggagatgatggttctgttcatgcgctcagctacaccattctgctgtggagtgtacgggatggtgtgatgcctaacgatgccttccttctgcagtaatcatcaaaagcatccgaacaaaattcaccaccattgtcagtgcgaagtacttttacctccttttcagtttgcctttctatcataactttccactccttaaaagtagcaaatgtatcatctttatgtttcaggaaataaggccacacttttgtagagtaatcatcaataatggtaagcatataacgagcaccaccaagagagggcttacgagaaggcccccacaaatcagcatgtacataatcaagtatacctttggtgcgatgaactgaggtattgaattttaccctcttgtgcttaccaaaaacacagtgctcacagaacttcatgttaccctgagtgtagccatccagcaggttccttttcatcaattctgccataccaagttcactcatatgtccaagacgcatgtgccacaggttagtcttactaggttcatctttagaaacagcagcagcggtaacagaaccatgtaatgtacttcctctaaggacatataagtttgcagaattcatatcactaatcatgtaaacaagagaacctttcgatacctttacaactccacctaaaccggagtatttgtatccttctgcatcaagtgtgctgagagagatgagatttctcgccatccctggtatgtatctcacatctttcagtgtgcgtgtcatgccatcatgagtcttgatctgaacggagccaatgcccacgatctcatgtgggttatcatctcccatgcgcacaacatctccattctgcacagacttgtaagaactaaaccaatctctgttaatgcagatatgaaacgaacatgcagtatcaagtatccattcatcatgactagcaacacaaccagcaaaaacaacaagacaatctcctgaatcagagttttcagcactggtaacaacagaggccttaccatcagatttccttttctccttattctgcaacttccaacattcttcaatgaagtgatttttctttttgcaatacttacagaactttttacctctggacttagaacggcctctactctaactcttgtcacgatcattgctgtcgttgtaggttctctgctcagatctgcctctgacctgcaatgcttcgcccttagaggacgacggatcagactgaaccatacctttcatcttctccctattttggagcgcctcataaacttccgctagggttagttcatcacggcttaacagtatggtgtcacgaaaatttgcatatgaactaggcagtgagcataacagtaaaagacctaaatcttcatcatcaaactgtacctccatcgacactaggtcggcaacgatctccttgaagaccgatatgtggttcaacacagaaccactctcctgcaacttgtgtgagaataacttcatcttgatatgcatcttactggttagatctttagacatgcagatcgattccagtttgagccaaagttcttcagcagtcttttcctgcaacacttcttgcaaaatatcattagatagaagaagttggatcagcgacagagccttacgatctttctgcttctcctcagcggtccactcagtcgttttcttcttcccgaggctttccggcgcctcatcaagatccgaagtttgcgccagaac

SEQ ID NO: 27282 - DNA, 6515 bp, Oryza sativa
ttctatcaataaacaaatattctagctcaaaaaaacctgctgtatgtttcgcgtataatgatttgtcttattttcttcagtactatcactagagaacatatgataacataggagtgtatatggaccataattaattttctgtactacacaaattggctagcaatcatatttgggtggtagaatctcaatgtagaatagaaagctggttgttagctagttgggtgaaagataggtcggcagaagccgccaaacgagatagataacgcgggaggaagaaggccaatgcaacatttgaaacttcaagtcctatctacatatccggttgatttttcaatgggaagcattcattggaagcgcatgctggtttggatgaattctcgtcaatcagatatagcttgtctggttcatttgggtctaactattttgatgcttatatgtcatctctttgttgaatataatgtgtcatctttgacttcatataaacatcttctatttttggatgacaatgacggataagacattagatatggtagtccttcctaagaatgcagtttttgagtattgactagaaatttgtgttgtcttcggttgttttatttgtgagtccttgtttaattaagttttcttttttcttttttataacactgtgtgcatctgatagatatgtaggccgggtgtaattttattttttaatgaaatattttcgattagaaaaaagaactacatagttgctgacccaatggaacgtcaatatagtctactcttttggacaaaacatgtcagcatgcgtgcagactttgaagtcttcacgttggaaaggatgcacgaacctagatttagatcagtggcaataacgtgttcaactacaactataacagtacataatagagccatgttcatagccaatggtatttatctaaaatgcattggcacagataaggacgggtaccaaccacccaaaaaacgtaccctctccgtcaaaaaaaaaaaaagaccaactctacgaatgaatctggacacgcatgtatccagattcgtagctaggattaggttttttatgagacggagtagtactgtctttatatatgaatttgaatatatatttaactttatgattaagagttactatatattttatatattttggattaaatgtacactattggagaaatgatctttgctctgctcggtggtccgaaaaccacaatagtcccggttcaaataggaaccgagactaaagatcatttgttgtcccggttaaaaagtgcaacggaaatggatgatcattagtcccggttggtgttatcatctttagtcctgtttggtcctctgacaaggtttgtcaggggccgaggatctttagtctttgttggtattaccaaccgggactaaagcttgtcacatttttatattccttcctcctccagcccgagccattgctgcaaattggaggtggaagggagggaggtgctgtccaaattttttgtgaatgtgttttggtgataatatacaaatcagagggatcgaaaatgttagtaactccattctctaatgatgtatgcttagcatattacatttatagctttgtgttctatacattattgtctctaacaaggtttatgggcaggggtagacgagggcgacgaggacctcactgctccctagtcctacccacctaaccatggccaccgacaagtatagagagtaagagatgagatagggtagagggggatgtcaatgccacgtgggctacatgccacgtaggcgtcacgtcaaaaaaaccagcctccgtagtgccttaggatctgttttgcattgtttttgcaagttggggggggaggatcaagatttcttgtattgcgatttagggatgcaaaattaaatttgacgggaatgataagggacgtaaaatgaacttcttcctccttcccctcccttacttccttcactctcgccaccgcctcctctccttccttgcctcctccggcctcgccgccgcctcctctcctccctccccaccgctgtaggggttggtggcgttgtggtcctaagcgagggcatctccatcggatgggttgatgacagtgtcgacggcagcgggtgggtggaggaggaggtgaggtgagggcgttcggcgtgggtggcggtggttgcctcctcctccctcagtgagttttctccggccacaccttctctacaaaaccctgacatgtggggtccacgtgctggttcaaccagtcaacggggtcaaagatgtcacgtcgaacgaaactgccttccaaaccgtctgaggagtcgatttacaatggttttgtgagttggaggacatgttatacctggttttgttgttgagggatgcaattcaaccaggggcatgagataaggaacgcaaaatagacttatcttcttactaataagtgttggcccatcagctagactacacaccaactgaagccttaacttgaaactggccgactccgatcaaatgccgattcagcacgaattaggccctgtttagttctcaaacaaaattttttatgctgtcatattgaatgtttagacatatgcatatatagagtattaattgtagaaaaaaaactaattacacaattcgctagaaaattgctacattctatttatttctccctgaaaataattacacagttcaacttaaaaaaaactaatgacacagttcgttacgttctttttattttcgggcaaaaaatcgcccacctgtaaatagctaagagcaatgcaagtttttttttattaggatttgtgccatatatgtatcattgccatatgaaccagaaccaaccaaggcttcatgcatgtgtcaattgtcggggcaaaaccttgccatatgaacaaaaaatattttttttctttcaattgattttatggccgttgaatttgcacggaaattgggatttgtatcgaccacagccagcacttttagcagtgattacgactccttagagggcacctgtaagttgatgatctacctgtcttttttgttttttttctttgctttggatttcttgttctaacttcactaaatcagctaggaagaatatttatgcaaatttatatactcctgcctctaccctataccaccgtcatccggttgcccttatcctgcttgcttcgaagatggatgaaattgtcagtctttgctacaaagttctcttcctgctcgaagcatatcaggtactacgatgcctttgtatgggagtgcgccaagtctcccaagaacaggttgtgccggccatttgttcttctctggccatggatctgcttctgcattgatcttactcgttggctccggtggtgaacatacaaggtgtggttggttttttatttttcttgctgaggcctcaactttcctcgcgaggtcccatttgggttcgtgccgaggcatgatcttttggagctcgccatgacatccttgctttcatcgtcattgtgtgcatcgaccaggtagtcgactgtcgtcgactaaacatagcaaaggattcgattgctttttctatttcttgttaggtccttctttgcataattctaggtctatttgtaacttactgatcttcacggggcttttatgtaaaacaggttatactccaagattctttacatataaatcctgaggctgtaccctcagcttgtcctaaaagaaattattgaggttattcttcataattcaagaaaataacatttgctatgagccttctctcaattttatctgtcaaatgagcaagatccactacctttgaccttgtagttcccattggaagtcctagatatgtaaatgtaatagttcctactacacaccaaaaacaccggctagttgttacacctttttttctagtacatttagagatattaaacttcggcttatgaaaattcagtttgaggccggtggactaagcaaagtatttaataaagcttcaaggaaaaaacaagttcattctgtgaagcccacattaggattatagtatcacgagcatattgaataattgggaatccgcctccattattctcattgatatgtttgcatatcattcccatttgaatgccttgttaacaatgctttggagcaaataaactcccaggacttggagcaaataagctccccggacagtggatttccccgccttactcctcttctacactttaaggagtttggaactccatcgagaagcattgaggtataggcagttataaaaataaaaatgatatataccaattacaaccatttggttggaaaccccatatgcttcataatctctaaaacaacttcatgctcaataatggtgtcaaaggtattttcaaaatccaactttaagattacaatcaaattggttaaaaaaaatgaaactaggccagcacatatggcatgtagctcactataagaaaaaggcctaacacaacttgtatcatgtacatccgcacgagacgagtatgggtgaaatatgtgcccatagttacgtaggtgatttggtggctcgcaatataagcgtggcatctagttaatggaatcttcaatgttccatccaaaaaagtatgcttttggttgaatttcattgctaaatttttgagccttcctagaccactcggtcttcgacaatttctactcaagattctaggcatttcaaaatttgtcatctcattttttttaccgggaatttgtcatctcatttggctagatttcaaaattgcaaacaccaagtgaagtgagcatagctcaattgtttaagttcctaagtggaacctggccactcagtgaaaatatctatgttgacttgattaatcttaaaatataatggtccaatcttcgaatgtactcataaagatttgctaatgatagattaattaggcttaataaattcgtctcgcaattttctagcgatatctataatttgttttattattagactacgtttaatacttcaaatgtataaatgtatatccgtatatccgatgtgacaaccaaacctaaaacttttccctaactaaacgaagcctatatttcgaaaaaaaaaaaacttgcaaacacccatcgtaagtaggccctcccgaaatacttatttcatttctttcctcgataagttttttttttctcgctggcgccaagctcgtcaattcaaaaaattcaaaaataaaaaatccgccctttcgcatccatggccaagaaccccaaggcggccaagaaccgccgccccacgacgcggagacctcgcgccgccgccgccgccgccaccgcctccgcctccgcggacatcgaggacctggcgccgccgtccgggtgcagggcagcagtggggctcaccacggccgccgcggcggtgcgcgcggagctgctgcggtggtacgacgccaaccggcgcgacctgccatggcggcgcgccgcggagccggcggggagcgggagcgggagcgggcgcggcgaggagaagagggcgtacgcggtgtgggtgtcggaggtgatgctgcagcagacgcgggtgcccgtggtggtcgactactactcccggtggatggcccgctggcccaccgtggacagcctcgccgctgccacgcaggaggtgagacaagagaaattatctctcctccaccatcgctggaaaaggaaatgtaaagtttgatgctgtgtgtgggagagtggtaatcgagttcttgatttgtggttgccgccgattgttgcaggaggtgaacgagatgtgggcggggctcgggtattaccggagggctcgatttcttctcgaggtgagtagtgagttgattgatcacgaattcactgtcgaaacgacggggattgggatggggttcacttgttcagtgcgttctgcggaagaatttttcagcttttgacagcgcccacgaaccgtttgatgttttgtctataggagagattttatttggaatccgttttgtgtctgataaaggaggggattattgctactagtttgtgatgtttgctgcattgttttcgctgccaatctcatgtgaagttatcagttcatctggtgaagatttggctagtttgggtggaagaactgacaagaacatcagcagaaatcatcctttttcttcacatttgtattcagtttacaattagcacttcatggtcatagtaagttaaaaatacttaagagtaaagtccatcaccggtccctaaacttgtaccgctgtgtcatcccggtccttaaactctcaaatcgaccgttcaggtccttaaacttgttcgattgtgttatcccggtccctaaacttgcatatcactcgtttaggtcctccaacttgttcagctgtgtcaccccggtccctaaacttggatttgaatatgatctgggtcaaataggatggtctaaagactttacattaaaaataattcataactttttcatgtgaactctaatgaagacaaactttatatgaaacttgtagccatcgacgcaatctacaactttgtagttgatttttttttattttaagtcattttttgtcccaaaatg

SEQ ID NO: 27283 - DNA, 6295 bp, Oryza sativa
ttcctgtaggctaaacatctcttgttccaccccttcccaagctcggttgagctctcagccagcagcagcagcagcaccagttgctcctccttcccctttcccttcctcctctccacgcagcagccccccggaggtgcaccatgtccgacgctcggtctcgccgttcggttgcctcgagcactcggcgtcagcaggacgccgagctcgccgcagcagaagagcgcaggcgagcaacggctcggaccggtgcagcagcagcgagggcggccagactggcggcagcggagttggcagcagccagggcggaggcggaggcggaggcggcggaagatgcggcacgtgcggcggaggtagaggttgagaccttgcgcagcagcatcaacggctccatcgccggcgacatcaccgccgacagggagcttgaggagctggcaagaggaagggcacgggagcgagcagagcggtgggtagcagcccacctccatggcggcggcggcggcccaagggaccgcgcgcccgccgacgggaacccaaacgggcgcgagcgtgctggcggtagcccggagcccgcacgcggccctcgcaggcagcacggctctctctcccctgaccggcgccatggtcaccacggcgtccagacggtggtcagggactttggtcccggcggtgggtggcctaccctcaccaaaaccaactacatcgagtgggccgcggtgatgagggtgaggctccaggtgcggcatgtgggaggcagtccggtacggtgacgtcgactacgatgaggatcggcgggcactggatgccctcatcgctgcagtcccgcccgagatgcagttctcgctttcccagaagcggactgccaaggaggcctgggacgccatcgctgcggcacgcatcggcagcgaccgcgcccgcaagtccacactgcaggcactccgcaaggagtgggagaacctggccttcaagccaggtgaggatgttgatgactttgctctccgtctcaacactctcttgcagaaaatggtgcagtacggtgacgacacctacgacgaggagagagctgtcgagaagctcttccgctgcgtccctgagaagtacaggcagatcgctcgctcgatcgaatctctgttggacctctccacgatgtcgatcgaggaggcgttaggtcgcctcaaggtcgtcgatggtgatgagccacagcctctctcggggcccatcaccatcggcgggaagctccatctcactcgggagcagtgggaggcctctcaaggtgacaggaggaagggggagtcatcttccccgacaggcggccgtaagccgcgcaaggcgcggggaggtgtccagctacggtgggcgcgaagacgtgcccgagggtggcgcccgcagaggtgcccagggcgttgccaccggcaaccacaagccggcacgagacgacgcctgccgcaactgtggcaagcttggccattgggccaaagactgtcaacagccacgacgtggccaggcccacgtcgcacgggtggagaagagccggctctgctcttggctcacgcaagcatcgagctacctccagcggcaccggccgcagcggctttcctccaccttgatgagccgaaggtactcgtctccctctgcaacggctccagcaacgacaaggctgatgggtggtacctcgacaccggcgccacccatcacatgaccggccgacgggagttcttcaccgagttcgactctagcgtccgaggctccgtcaagttcggggacgcctccggcgtggagatcaagggtgttggctccgtcaccttcaccgccaagtccggtgagcacaggctgctcactggagtctactacatccccgcattgaggaattctatcatcagcgtgggacagctggatgagaacggctcacgcgtgatggtcgaggacggactcatgaggatttgggatcgccgtcgtcgccttcttgccaaggtaaccagaggcactaatcgactctacatcctcagcgcgcaggtcgcacaaccagtttgcctcgccgctcgtcgggacgacgaggcgtggcagtggcacgagcgcttcgggcacctccacttcgaggccctgaagcagctcagtgccaaggagatggtgcgaggcatgccgtgccttgaccacgtggagcagctctgcgacgtctgcgtggtgacgaagcagcggcggctcccctttccccagcagacgagcttccgagccaaaaagcggctcgagctcgtgcacgaggacttgtgtggcccagtgacaccggccacaccaggaggacgacgttacttcctactgctcgtcgacgacctctcccgctacatgtgggtgatggtcctcggcagcaagggagaggctgcggacgccatcaggcatgcgcaggctgctgcagaggcagagtgcggccgcaagctgcgcgtgctgcgcaccgacaacggcggcgaattcacagcggctgaattcgcgtcgtactgcgctgatgagggcattcagcgccactacaccacgccgtacagcccgcagcagaacggcgtcgtcgagcggcgcaaccagacggttgtggggatggctcgggccctcctcaagcagagggggatgccggccatcttctggggggaggtggtggtgacggccgcctacatcctcaaccgctcgcctaccaaggccctcgatggcaggacaccgtacgaggcttggcatgggcgcaagccggcggtctcccacctgcgggtcttcggctgcctcgcgttcgctaaggagcttggccacatcggcaagctcgacgacaggagcaccccaggggtgttcatcggctatgcagagggctcgaaggcctaccgcatcctcgacccggagacacagcgtgtgcgcactgcgcgtgacgttgtgttcgatgaagggcgagggtgggtatgggacaaggcggtggacgatggttcgattccgacgtacgacgacttcaccgtcgagtacgtccacttcgagggagctgggggagtaggcagctcttcttcacctagcgtgtctaccctagcccctgaatctccaccgactccaacaccaacacaccctcgggccacgacttcgactacgacgagctcttcgtcgacaccaccccagccagtgactccacatgctccagtaccaacagccactcctccaagcacgtctactctgacgccagctcgtgttgagcgtagcccggtggagttcgctactccgctctcccacgacggggagcgcatcgacgcgtacaacgacggcgagcagctacggtaccgtacgatggaggatcttctcggcgaccagccggtgccgggactggtgcctcgcgacctagaggcgcagttgcaccttgcgtgcgacgacggtgagcctcggtcttttgcagaggccgagaaacacgcggcatggcgtgccgcgatgcagtcggagatggacgcggttcaggagaaccgcacctgggagcttgctgacctccctcgtggtcaccgcgcgatcacccttaagtgggtgttcaagctaaagagggatgaagccggagccatcatcaagcacaaggctcgcttggtggcacgcggtttcgtgcagcaggaggggatcgactacgacgatgccttcgctcccgtggcacggatggagtccgtgcgactccttcttgcgctggctgctcaggaaggctggggcgtccatcacatggacgtcaagtcggcgtttctaaacggcgacttgaaggaggaggtctacgtgcaccagccgccgggatttgtgatccccggcaaggagggcaaggtgctacgcctgcacaaggccctctacggcttgcagcaggcaccgagggcgtggaatgccaagttggattccacgctcaaggggatgggcttcgagcaaagcccgcacgaggcggccatctaccggcggggcaatggaggaaatgccttgctggtgggtgtctacgtcgacgacttagtgatcaccggcaccaaggatgcggaggtcgcggcgttcaaggaggagatgaaggccaccttccagatgagtgatcaggggcctctctccttctacctggggatcgaagtgcacaaggacaactccgggatcacgcttcgacagaccgcctacgccaagcgcgtcgttgagctggctgggctcaccgattgcaacccagctctcactccgatggaggagagactgaagctgagccgcgacagcacggcggaggaggtggatgctacacagtaccgacgtcttgtggggagccttcgctacctcacccacacacggccggacttggccttctccgtcggctacgtcagtcggttcatgcagcgaccgacgacggagcaccagcaggctgtgaagaggatcatccgctacgttgcggggactctcgaccacggtctctactacccaaggtgtcctggcaaggcacacttcgtcgggtacagcgacagcgaccacgccggcgacatcgacaccagcaagagcacgagcgggattctcttcttcctcggcaagtgcctcgttagctggcagtcggtcaagcagcaggtggtggccctgtccagctgcgaggccgagtacatggcggcctccgccgcttcgacccaggcgctctggcttgctcgactgcttagtgatctcctcggcagagacactggaacggtggagctcagggtggatagcaagtctgctctagccctggcaaaaaaccccgttttcacgaacggagcaagcacatccgggtgaggtaccacttcatccgaagctacttggaggaagggagcatcaaggcgagctacatcaacaccaaggaccagcttgcggacttgctcaccaaagcctcttgggaggatcaagttcctcgagctctgctccaggatcgggatggcccaactttccccacaagacgacgcacaagacttagggggagaatgttggataagtctttgtggtccttggtcatgattcttctttttgcttttgggtagtttcacctttttcaggacagcatctaccctttagcatatttttcagttgctaggacagctgcggttagtaggacagcagcagttagcatctcctttatgcctcctttatgctttattcagtttggatgccctctaggacagcatcccattcaaatttcgaattttagactaggagggtgcagcaataggctagcagccagctatggctatatatatatatgtatccaacctctctcgggtaggtatgacttttgtgtttagtgaataaagaaaaccagaaaatcgcccccatctcgagtgccatcctcttctcaatgagagtaaccattgaaattctaacagcactacgatttacaagctcaatttacagttccctgatccccattcaagtgcaaaccttatctgtaaatggctgtattttgaacttccatatgataccgttttcccatacagctttttcagaattagaagctttatattgatctgaaaacttccaaattgcatagactttgaacatcatttccttgatcacaggcagctcactggtgaactggtcgacccttctaggccaggagacttcaaccaagcaattatggaactaggagcaacactctgcagaaagacgaagcccggttgctcccagtgccctgtctccaaccactgccaagcactcacactttccaaccaaagtgcttccgtaaaagttacagactacccacgagtggttccaaaagccaagccacggtctgattttgctgctgtttgtgttgttcaaatcaatgataatctctttctattgatcaagaggccagaagagggcctgctcgctgggctctgggagttcccatctgttcttgtgagcgaagagaagactgatgtgctgaataggagaaaagagatggacaaatatttgaagcaggtccttagcatagatgttaaaaggagatccagtgtgatcctcagggaagatgttggccaacatgttcacattttctctcacattcgcctgacgatgtttgttgagctgatgattttgaacctcaaaggtaatcatttgttgtccatactagcagttattcatttttgtttagctacactctattattcattcaggcaaaattggttatatagcatcgaaagttcacgttttttgttttatagcaccgaaagataccggttcactttaatagcacccaaagttcaccatattcccatttttaacacttccgtcaattctcggtcgtttttcgttcgtcttgatcgagccacacacacgatatgacgtttct

SEQ ID NO: 27284 - DNA, 3327 bp, Oryza sativa
tgctgtttgtgttgttcaaatcaatgataatctctttctattgatcaaaaaggcaaaaaaaggccctgttcgttggcttttggaagtccccatttgtttttgtgaccaaaaaaaaaactgatgtgctcaatagaagaaaagaaatggccaaatatttgaagcaggtccttagcataaatgttaaaaggagatccagtgtgatcctcaggtaagatgttggccaacatgttcacattttctctcacattcgcctgacgatgtttgttgagctgatgattttgaacctcaaaggtaatcatttgttgtccatactagcagttattcatttttgtttagctacactctattattcattcaggcaaaattgcctaatttcttcactgtagatgatggggataaattatgcatggagggacaagataacagcaaactgagattcattgacgaaaatgcagtcgactcaataggattgatatcagggatccggaaggtacgcacaaattcaatgtggtaaaaatatttcctcagagtttggttaaaattgtaagatgaatgctcacttcaggtgtacaacatggtcaaggccttcaaggagaagaggccgaaagagcagagccaagtaccatcgaggaaaaggagtagacggctgaagtagcaaatcttcagaactaaatgcagaagtaacataactgcagaagcaactagtcaataactgaatgctgatattatcttgtaactgtactgtgtatttgtgctgctcactcaactaaattggccgcatattgctgcattttggcaaagctgaccgtgagttagtagtttatcttaggtggaggggagcacgggaaaaaaagagaagggagaaaaaaaaatccatatcatcgtctacgtggcgtgtcacgtagataagaccacggtcaaacggggatttagatcggaatgattcaataaaccaaatttaggggtcctgatgtatgctttgcaagttcgtggaactaagtgaaatctcataacaagtttaaggatcgctggtgtattttactctttaactgaacccctggtagtcactgctgaaaaagtaaacccattttcgttcatgaatatccggttcctcgtccaatttactcggccatttttgcacattaagacttgacaactttttttaacctgacatgatatgaagaaaattatatccattacgctgatacttacatggtactaagatttgatttttattttttacaatacaaactgtgctttgattatttgacatcccaggttgtgtttggatatacaagttcccatcttctactttttggttttgtgtgcgcatttcctaaattgctactccctctgtcccaaaatataggtatttttatacatcgatacggtcttcgagatgctactttaatcaataatatctataaaagcaagatttttaaataaaaagagttgcatattataattatttgttcaatgataaatctagtaacatcaaatttacatgattgatcttttttatttctttgctattaatagtcaaaattttaaaattttgacttgataaaatgcttatattttaggagggagggagtaaacgatgtgtttttttttaaaaaaaaatctatatgaaagctattttggaaaattatattaatccagttttcatgtagaaggaataagtcaaaaaccactaggttcgaacacaccctagaaactaagatgttttcacgtgtcatgagtgtagatcatcgaattttacccaaattcgaataacaataccaccaaattttacatctccgttgtgtaccacaaggtggacgcaattcaacgtcaaagggagagactaggcaaacaaattgtccccaccagccgggaactcccacacaccgagggtccgtggccaccgtggtgcgcgcgccgccgccggcgatcggagatcggcgaccggcgaccgatgcgggggaggggaaggaacgtcgagagggacgtactcgtcgccgccaccacgcagcaggtaatttggggggagttgaggtgagcgagagatgtgtgcgaccatgacttggcaccatgacgcgtgtatgtgaccctctcgtttgctgcttgctgcaggtggggaatgagatgcgggctgcgcttggatacgacctgatgaccagagaaatcgttcctagaggtgtgttagtaggggagattgatcggttgtgctcaggatgctggggtttggtaattagtatccattctacactaattttgctttggcaaatcttcactgtgactgtgcaggcaacctgttcgacgttttgcctacgagagccttcagagtacgatccagtgtttacacatgaatgctatcctgcgatgtgatgatgaccaaagctaatcttcggaacagctagggtcagtggctagtactgatccttttttttatgattcttttgaaaattaactggctcattcatgatcgtaagtgatggttactctgatatggctgttatggtgatattagcagcaagagtgtgcaaaaacatgctaactactcaaagtgcataccacccaaggctgatgttggtatatgttaacatcagtacatcacccaaaccactataaaatgtaacaaatgacaaaatacagttctgtttgtttccctaccaatgttttcagtgatttatggcgagaaatttggtaatgaaatacccagtcatacatatatcctttatgagaatgattttttcaagacatgattacaagaaccaaatgcactagataactgtcaattacagatcaattttatttagtatggtgtctgcattattgttctaatccaaaagttcataacttaaattacaaaaactggctgtctcaatactgctatagttgtatacatacacaaagtaccctcagtgttgctttctcatctggcttccccacacaatcaggatcatcattgcaaaagaaatgaaaaatcccgatgcagtgaagaggagaagtacaacatctatggatttctctaaagtgtatggcatcgcaattggctcttttgggttgttacattgtctagataacggtggtccacacaaacctgtgtttccaagaaaagagttgttggaaaatgtggaaaactgatatgagtttggaattcttccaaccagcatgttgtatgacaaattcagtgttgaaaggaagttgagtgatgctaactcctcggggatctccccagagaactcattcgaggagaggtccagtgactcaagtggattcaatctgccaaactgagttggaattgatcctgtaagggcattgtgagacctgttgagcccatga

SEQ ID NO: 27285 - DNA, 1093 bp, Oryza sativa
ccatgccggcgctagccccttgcctctgctccaccatcgcgggtggcggcatttacaggggtgcagaggtcggccttcatcgagtcgacgacgttcttgcggagcttcatcatgtagagggcctcgtcgatgatcgatcccgttctcagcgttggcgccggccccgagtaaagcatgcgaaggccgccgcggcggacgcgcacgatgttgccgcgcatgatgcggagaggcggcgcgccggccggcaatagcggcgtcgccgccccttctctgtgtctcctctctcacggtgttctctaagttgataaggggcaattttgtctcaacacctagtagaggagagaaaatcttttcgaaaatgaataaaatggtgaaaatagcaaagtggtggtagacgcacgcttcatattggtattttatcgaatcacgttttcggaatggcattctagcgaaaccgtgttttgaacatggcaaaatggccattttttcttccgctcccccccagtcgtcgttacccgccggcccccacgccgccgtctcccggcctgtagccaggtcatcgagctctcagccaccgtctccacccccatggcgaagatcttggcagcacattggcgcctccccacagcagcgctcggcggcgtcacgcatcccgacgagctcaaaggtgagttggtgactagttccgcttgcgatggccagatgtgctagtacgtggggcttctccctcaggccagatccagggcggtgctcccctcggttcaacagctatgttcctttaccagtccttctcttcccctactcctcagacctcaactctctctctctctctaatctccaacccgtaaactaatctcagcaatttttgttttgtgtatgacgagatttggcctttggttgcaaccaaagggggaacacaaatattcctagctataacagaaggtgaagttgtctgttcttcattggttttggttcttggttttttgttgctagattaataccagctcagtttatataatgatatgctagttaagtgggtagacaagaagcgaaatttcaaagtttatatgtagcgattagatcattggttatt

SEQ ID NO: 27286 - DNA, 1396 bp, Oryza sativa
cgggactacagatattttcccactatttccaaattctttttacacccggttatggttaagaaccgggactaaagataatagcactgaatattgaatttcgttgcatatgtgtttctaaaatagtaaataatacattattgttgtctgtagtaaattaagtggataatatataataagcacgtgaatgatttaaaattgttaaaaattctaataatcatatataattagcatatgcatgatattaaattgttaaaaattctaattaacctatgtaaataccacatgcatgatttaaaattaataaaaattctaataatcatatataattagcatatgcatgatattaaattgttaaaaattctaattaacctatgtaaataccatatgcatgatttaaaacttttaaaaattctaataatcatatataattagcatatgcatgatattaaattgttaaaaattctaattaacatatgtaaataccacatgcatgatttaaaacttttaaaaattctaataattatatatacctagcatatgcatgatttaaatttgttaataatcatatataactagcatattcaatacatccaaaatagtttacaacaattacggcaatacatcggcggtgacggttgtccgcacgtactttctcctcactattgttccttccttgtgatcgctacgtgagtaaggggtatcttcatttgataggaggatgctagggtcaatcgtcaccgtgaaagggggttgcccatcaaactgatcgtaatcctcgtcagtcttgtcctttactccgacgatttttcttttgcctgggagaaccacgtggcgcttcggctcgtcaggccctttgcccttctttcctttgctagacatgtccttcacgtaaaaaacttgcgttacatcattggcaaggacaaaaggttcgtccgagtatccaaccttgttaaggtcaaccgttgtcatcccactatcatcaatcgttatgcctccaccagtcaacctaacccattggcaccggaacagagggaccttgagaggtccatagtcaagttcccatatctccttgatggcaccgtaatacgtgccagttgtaccatcgtgtcccatggcatcgatacgaacaacactgttctggttcatgctcttaatttatcccttaatttatgcctagaataattaaaatccttgtgaaagcctccaacaattaaaatgtgcaaagttaaaagtcaaataaggcttggaggatttttgtaaatttcctaaaagcctaaaatgcgtaaataaattttagtggaattttcagacacaaataataattattaagaaataaacaaagttaaaatgattttataaaaagaaaaaccctaaaagtcccccttccctcccttgg

SEQ ID NO: 27287 - DNA, 14694 bp, Oryza sativa
atcactgttttatctagccatgcttatgtacttttgttatgaccttattattgttattgttattatggccttgttcaccttagaataaacaaaaccccaactagtggacactctactcatggtaccactagtatgattttaggtagatgcttcgctggttaattaggcaacattaggtggttttataactctagactttgggaatattttcatcacctggacactatagaatggttggattattgtggaattggattcacacctccccctctattcaaaacccttaaaatggttttaggctgggctcggggtgcatggttttgatagtagcacctcggccatataaggaccggtcttcgggcctctgttgcaaagcactaccgtacttccacatgtctagtgggtaaggcttagtttgtggctcagtctggttataaacaaaagtacacggatggagatggacgaagtcgggggtcgatggatatctctagggcaaatgaaggctacacgagctacggcccggtagtcgagatgtgatggcacagggccggtgtcctgctgctaggggctccgtcctgcctacctgtcccgggggttccggccgtaggtggggttgggtcggtactcttgtttatggctaggatgggttggaaactatgtcatgtcttccgtccgtataccgtggtggtatgtggcacgtggttacacgtgaggaagatgtgtcttgtgggtaaagatgtacacctctgatcagagtataacctattcgaatagccgcgccctcggttatgggcaagccgagcaatgtacccaagttagtgttttaattcttaaaacctgcttaactactaaaatgtggaatggttggcctgggttggcttgggacgagctgggacccagggtcgggttgccagttcggtctgaatcatcgtaggccttgggttaaggcaggttcgtgtgggttcacggccttggttaataatattgtatagctctaggaccgtgtttacaaaatagctttgagcaactaagtgtcttttaatgctgtttactgcaaaccctaaccccctatattatggctcccttgtactcccttgcatttattctgcacttatggatgtgtcttgttgagtacggtggttgtactcagtcttgctcaatttttcccacacccagaagaggagcccctggatgatgaaggctttggtgtctagctcgtgcctgccgtcaagcgcctgtggtcgtcgccctagtcttccgctgtttttcgtttgtcttcttgtgtgctgggtcttcgccgcccatgtaataaattaattaattacgcttccgcttgataaactctgaaatgtatcaacttttggtgtaccttgcctcctgggacaaggaataatacacgcacgtaaggaacgcccgttgggttatttccggtcgtgacaggacccctcgccaggaaggccagttgctggttaatcgtctcgttacccatgagatgttgtcgcagccatgcggggaaagtatcaatgtgatgtcgtgtaatccatgcatcggacttaccgatgtttctggcgcgaactagagccaagtgctcctcgatgtaaggagccaccaatgaagattcttgtaaaaccgtgaaatgggctttacggaataaattgttgtctaccgtcattattgctttccttccgagagtcctctttccctgtagtctcccttcatggcgtgattcaagtaccccgattaggcgaaggtcttcaataaattctacgcaaaattcaatgacctcctctgttccataccccttggcgatgcttgcctctagatgagcacggttacgaacatacttcttcagaacgcccatgtacctctcgaaaggaaacatgttgtgtatgaacacaggcccgagaataccgatctctttgactaggtgacaaagcagatgcgtcattatattgaagaatgaaggtggaaatatcaactcaaagctgacaagacattgcaccacatcattctgaagggcttctaacctatccggatcgatgaccttctgcaaaattgtgttcatgaaagaacatagctttgttattgttgcccggacattgtctgggaggataccccttattataactggtagcagttgtgtcatcaacatgtgacagtcatgagactttaggtttgtgaacttcttctccttcgtgcttattactcgctttatattcgtggagtatccagatggtaccttgatgctctccaagcattgaaacatactttccttctctgccttgctaagagtgtagctggctggactcaagtaatggctgcctttctcctttggttctgggtgaaggtcgccgcgttgttccatatgcttcagatcattacgtgcttccagtgtatctttcgactttccatatacacctaggaagtcaagaaggtttacgcaaaggttcttagtgaggtgcatcacgtcgattgcgttgcggacgtccaagaattccgaatagggtaactcccaaaatatggagttttttttccacatcgccgcgtgaccatcttcgctctctataggctggctgccaggcccctttccaaacactactttaagatctttcaccatagcaaacattgttttcccgctgcgatgtttggccttcgtacggtggtccgccttatgttcaaagtgcttgcctttcttccgtactgggtggtttgcagcaagaaatcgacgatgacccatgtacacaaccttcctacagtgcttaagatacgtactttctgtttcatccatacagtgagtgcaagccttgtaccccttgttggactgtccggataggttgctatgtgtaggccaatcgttgatggttacaaacagcagcgctcgtaagttaaactcctcctgtttgtcttcgtcccacacggggacaccttccttctttcacaacagtctaagatcttcgaccagtggtcttaggaacacatcgatgtcgttaccaggttgcttggggccttgaataataatcggcatcattatgtacttcctcttcatgcatagccaaggggggaggttatagatacacatcgtaacgggccaagtgctatggccgctactcatctctccaaaaggattcatgccatccgtacttaaaccaaaccgtatgtttcgtgcgtcctttccaaagtctttaaattttctgtcgatgtttcgccattgcgaaccatctgcggggtgtctcaacatcccgtcctgttgacgttcttcagcgtgccaacgcatcattctagcattccccttgttcctgaacaaacgccttagccatggtattatagggaaataccacatcaccttagcaggaattctcttcttcgttagctgcccgtcaacctcacctggatcatctcgtctaatcttgtatcgtagtgctttacaaacagggcatgcttctaggtctcgtactcctcaccacgatataggatacaatcattcggacatgcgtgaatcttctgaacttccagtcctagagggcagactatgttcttagcctcgtacgttgtctcgggcaatttgtttccctccggaagaatgttcttgacgagtttcaataaattgccaaatgccttgtcactaacaccattttttgccttccattgcaagaactccagagtggtatccaactttttgtgcccctactcgcaacctgggtacaacatcttgtccaatttatgggcccccttttcactttcgcagtcctccttggcatcctgcaacatctgaccaagatcatccgcaacgtcgttataatcagcatctctatcctcctcgcccgtttgatttccttcaaatctagcgtactgagcaaagtctagaatattgtcgtcttccacttcatcttcttccatttcaaccccttgctctccgtgggatgtccaacaattatagcttggcatgaaccccgactcaaacaagtggaaatgaatagtcctggatgcagaatactccttctgattcttacacttattgcatggacaacatttaaaactcttctgcttgttagtttcggccactctcaagaaataatgcacgccgtcaataaactctttggaccgccggtcagcgtacatccattgccgatccatctacatgaaatgaaaaaaaaatcgtacacaaataatcattcgtacaataatgacagtcatacaataatgataaaataatcacaaactctttcaacagtcatacaataatgacatcattattcatgcaaaaattataaaatattccaccaaaaaattcttatttattatttttgaagttttaaattcttttaattttcaatttagtttgttttcttttatttaagattaactttcactatattttcctactcaactattttataaaaccttatttagcaaataaacaaaatttctatatattctttcttttcccacacaaattttctctctcatcaacttattacaacaaaattttggagacaaaaaagtgtgcaaaacatagctccaaatgtaatatgaccaaaaaaacattggatgatggagttgctaaccttttaggcacctccgatttgtatataatcaccaaagtaaattcactataaattttagcatgacctcccctcttttttgaagaaattttgaagcttgctcgggctggaggaggaagaagacatatataaaggggtgggactcaccgggatctttagtcccggttggtaacgatctttagtaccggttggtaacaccaaccgggactaaagatcccgggagggcataacaagccctgacagcatttgaaccgggactaaagatgaccaaccgggactaaagatcaaatatgcccgttaccctttttattgcaaccgggactattgtggaaataggccgaccgacgaaagatggtttctccaccagtgctactcaaagtaggtgtaaaactcctagttcaactaggactcaatctacaaattccaaaccaaatacaatttaccaaaatttgcagccacaaccacagtcggactctcctcgccgtcccagcagcaacacatcctcctgttctcctgagccaagtcggcttgccacagccccaagccaacctttcagattaacacacatgcaagcagtcacatgcacatgtacatgcatccatatacatgcatacacgccacaatgtggagaaagctacgcatcggacgtccggagatttgcaatctccggacgatgtttcactggaggttaaatgaatgttgcaatgtctcatcgctcgaaaaaaaatgtttcaccatgaaatctctggacgatgtttcacagtttgttgaataaatgttgcaatgtttcaccactcggaaaaaaaatgtttcaacaggaattgtttgttgatgtttcatcgctcgaaaaaaaatgtttcaccgcattatcgaagatgtttcaatcgaatgcaacactcgataatgttgtctgcaacaaaaaaaaccaatatatgcaacatccgaagaaaccaaatacaacatccattaccgatttaagaaacatccagagaaaaaacagattgcaacatcacaaacacactatatgcaacaaaataaacatgtagtgtgcaacaatcctcgctaactagttagacgttgccacaagcctcctcaccttcatcgccgagctcagaaccctctcaggtgatggcgtctcaagcttttccgtcgtgctgccccgttgccgccaacgtggttgccggtgctcaccgcaccctaccgctggaactgctgcaccggccgccgctcaagcgcatggtagtcctcgccggcgacgagcaccaccccacgcttcctccctctcttccatctgtcgtcgccatcgacgccacccggaacacagccaccgtgcctgccacacgatgccgctgacgaacatcactggtggcgccataatctggccacccgcacaggaagccccgccgtcggcggcggcagcggcgcctgcgccccctgatgacgccgcggccgcgtgtgcagcatggagagttggagacgccgaggagaagaagttgaacgagaggttggggatgagaaggaatgaggataagattggggaaaggtgggtcccgtcgactgtccggagtttgtcttgtatcggacgctcgatacaaagcgttttcgcatacatgcacaatacagtaacaccgctacagtacctagagtactgtagaactatatacttatgctccaatttctcaaccaatctcctccgtgaacaccgacgcttgcacgtacaccttgtgaagcccgttgcgaagatcactcccacacggtgtccatccactgtgtgccatctcgtatccaacttcatcacccggtatccttaaccgtctggacctcaactcctccctgagtctagtcccgatccccaccgttgaccgaagttgacctccaagaatcctgactctagtcgccttctcacatggtatcccgaccgtactagacctctgctccaccctgagtatagtcctggtcctcaccattgaccaaggttgacctcaagttacctgtacacaatcagataaaacaactgttcctgagcacaaatatcacaacctgacccacattagtcacacgcactcccaccaacatccacaaatcttttaaaaccaattcattgattaaatcatttacaaaaccaattgttcatcataaatattaatcatgacaatgatttcacaaccgtcgttgtcaggtccttccgcctcgaccgctgtcttcatcaagctccaccagacgtcggcatccccatccgcctctactgccgcccgggggatagacccacgtcttcaccgcctctccgcctgcctcctccctcgtggcaggcaagacgccgctggcccgtcgtctctggcgcgggccgacacctcgccaccaggatctgcaccattgtcgccgcttgcggcctcgacgccctccgccggtcagcccctacgcatccgcgtctgtcttgcctctcgctccctgtattgtctggttgtccgtcactttgctagtcatcttgcacgtgattagcaagggagaggagagagagacaagatggttgcagagagtttgttggctggctggctatggacttgtggagggaatgcatgtgtcgctgctgctggtacagttgggcagagaggttgctggacgtggacttggtctatggaccatgtgtgagtgggtaagcttgcaactgatgctgttctgctgctgcatgtatctgtttttttttcccgattagagatcgagtttgcgtcgcccactgcctcgtcgacatctatgtgtctccgacatcggcatcgactctgcttcgatttcatcgttcagccctgcgcatcttcggcttgatcacccgttcaggtgcccggctacaacgacttctgtaaccaatcgttatcgagcatgcgtctacgccatcaatcttcgggttgccgctgcgttgcccccttgggctgcagtgccgccgcccgtggtccacctccactggttgttggaacacggagaggcgccctcctcagcgtggcctcactaccggtggagttctcgccgctatatcgacatcgggccgcacctgtgtcgccccttcgggtcacagcgtcacccctctcgtcgtcttcatcgccgttcatgcatcgacatcctcgtcgtccgcattggtcatctctagccgtcgggttcttcttcatctactttgagcattactgccgcatctccaagttgccaccgtcgccgctctaggccggtggtccagctacctctacatggctatcgacgttgccatccaggccgttggtcctgctacatcgccttctacttcgtccagcatgattcatcgccagcgtcgccgtatcttccttgactgcacttcgctcttctccgacaaccgcgtgctgctccagcaattctccctctacgccgttctcgtgccacaaccgtcttggaggcttctctgctagtctcctccaacattggcgtatgattcatggtggtcccctgcctcgcctgcacggtattagcaacaccggcgcgcgcattcgtcttgagttatcccggggtttggcaaaccctgtgtgatgtctcgtccttcacggttcgactacatcggctcttcagcatcatcttcctcaacgattgccacgatcatgtcaccgcgttcgtcttcagctcgtcctcgtgcaccttggtccatgacaccctctcgagagtccacgaccattctacagtgtcccatgcgcgccctgcggcacggctacctcgacatcctcgattccccgacttcagctacatcgaccacggctccctcgcacccttcgctttggctacatcgactacggcacaaaagggctatcgtcgatattgagcactctcgccggtttcttctctagtccaagtgtccgcctagtccaagtgtccgcgctgctcacgcttggactgcggggggatgttagagtatatagtagttagagtcatattagaataggattgatttgtgtggactccttccatatctgtaatcattccttatctcctccccatgtaatcctatatataccgcccccctgaggctcaatacaacgtgtcaaatattcaaagtattcctcactccctatactatccaacacatattttgttggatatggcgatccaattttttggtcggtttgtatggatatggtgatccaatttcttgtttggttggagggatatagcatggatgggaaaagccataagttggtgacccatttgtcatatatattttttaatcaaaatataatcatccgagatcttgttttaaacatttaattgtaacaaatataacggtgtaataaaatcataaattagataaacggtttaggagaaagatcatttggagcttgcttaacagaaaatcaagccaccacacccaatcagaataggacacgtcacctagaccaaaactggatggcttcatccagcaaaatcggccggatgcactcatccagcatattgagggaatattcccaattccgggccaccccattcaccctgccctccaaccaaacaccacaaaaaatcgggcggccatctcccatctagactcatccacccaaccaaacacaccctaatacgctcacgtcctctccaaactccatctatatttcggctatataaatctccatcaagcaatgtatatttgaatggtagccacttaatcttgtcgcgtcccaaatcgactctaaaattcatcctcaaaattgtgcaatagaataattaaaattcgatgtgaaagcctccaacaattaaaatgtgcaaagataaaagtcaaatgaggcttggaggatttttgtatatttcctaaaagcctaaaatgcttaaacaaattttagtggaattttcagagcacaaataataattgaaaagaaataagcaaagttaaaaaggtttataaaaagaaaaaccctaaaagaagttcttttcccccccctttttccctcttgggccggctcggcccatttccctctccctctctctctcctctcccgcggcccatcggctcccccgcgcgcgcgcgccgctgacaggcgggcccgcccgccactctcgctgacgggtggggcccacctgtcatctccctcctcccgccgcgtccgtcgccgcccgtgccctagcgccgccgccgccgccgaatccgccgcattccgccttccccgcgcgccttaatgaggggggaattattccccgcaatcccctctcccgattccccctctttcccctctctctctccctcggattcgctcggaatcaatcccgcaaacctcgccggcatattcaatggcggccgagatctccgcgcccgtttcctctctctccggccgccctctctccctcccgttgctatataattgctccccgagctccgctcttccgtttccgccgctcgccgctcgctctcgccgtcggaatcgtgctcgcgccgtgctcctctctctccgccgtcgccgccgagctccgttccgccgccgccgccgctccggacttcctcccgactcggcgacccctccatccgcttcgccgtgttgccgccgaccccgtccgccggtgcggttcgcccgccgaccgtcggagcgccgtcgtcatcgttttcccgagccgcgccgccgtcttcttccgctccggacgccgttttcgtcgacgtcgttgtaccggggtgaaccgtggaccatccccttcgtttcccccttccctcctctttctcgggcgccgctccgccgcgccggtggtcgctgtcggtgaccatcggggtgcgggtgcgcgccgctcccgtcggccgtgccggcgaggccgccctcgggcgcgccctcgcggctgccaagtgggcccggccgtcagccgcccgcgcccgcgggtgcggctgacggcgggacccacggcgccgaccgccgccagccgcgtgcgcccggtccaccgtggaccgagcggctgacgcgtgggccccacctcccgtggacccggtccgcgcgcccgcccctcggctgacgcaataaatgggatttttaattgaaaattaaatgaagaaattcgcaaatatccatttaaagagcatataaacttcaaacggccatatcttggccatttgaactcggaattggaccgttcaagtctctaatttttccttaagatgtaaagaacccatttttgtgctttgtttctgctgttatgtggagttatttagtgttaaagcctttttcttttccgttggtcgtgtagacgctgcagcttcagaagatccgctcttcgtggaagtcgaagccgtcgattgggaaaacgagcaaggcaagacacatcatcttgatcatattgaatcccagtttataaaattatgttgatttaaattattgcattatcgctttatttaaattcccgcgttatcactgttttatttagccatgcctattcacctttgttatgaccatattattatcgttattgttattattattaccttgttcaccctaggcaaacaaaacctcaactagtggactctctactcaagacaccactagtttaattctaggtagatgcttcgcaatttaattaggtaaccttaggtggttttacaactttagacttgggaattatttcatatcacctggacactctggaattgttggtttatggtggaattggacatacacctctcttcctctttcaaaacccctaaaacctgttttcggtggggtttgggtgcatgccagttgtgggaagtagcaccccggccactataaggattaagctcgggcctctgttgcaaagcactaccgtacttccacatgtctagtgggtaaggcttagtttgtggctcagtctagtcataaacaaaagtacacggattggagatggatgaagtcgggggtcgatggacattctccagggcaaatgaaggctacacgagctgcggcccggtagtcgagatgtcaaaaagcacagggttggtgccctgctgtgaggggctcagttccgtctgcctgtcccgggggttccggccgtaggcgggattgggtcggtactcttgtctaaggctaggatgggttggaaactatgtcacgtcttccgtccgtataccgtggtggtatgtggcacgtggttacacgtgaggaagatgtgtcttgtgggtaaagatgtacacctctgatcagagtataatctattcgaatagccgagccctcggatatgggcaagccgagcaatgtacccaagtcagtgttataattcttaaaatttgctcaacaactaaaatgtggaatggttggcctggggttggcttggacgaactgggccccagggtcgggttgcagttcgggtctgatcatcatagccctggggttaggcaaggttcgtgtgggttcccgcccttgattaataatactgtttagttctaggatcgtgtttccaaaatggccttgagcaactaaatgtctttaaatcttgttactgcaacccttaccctttatgtataattccctcgtactccatggcatttattctgcatttgtgggtgtgtcttgttgagtacggtggttgtactcagtcttgcttaattttcccaagcccagatgaggagttccctgaagatgaaggcttcggtgtctagctcgtgcctgccgtcaagcgcctgtggtcgtcgccctagtcttccgctgtttttcgttgtctctgagtgtgctgggccttcgtcgcccatgtaataattttatatacgcttccgcttgttaaactctgtattgtatcaacttttggtgtaccatgcctcatgggacaaggaataatacacgcacgtcaggaacgcccgttgggtgatttccggtcgtgacaaatcttccgatcaactttaagtgtaggatctttcaaatatttaatcaaaggaattctccaatcctcttttgttttctgggcgcaaatgtctgaatttacaattaatttggctttgaatcaattgcggcgtgccccccagcgctctatccagaactggtcagaccggctatgcaaggccggtcagaccgcccctggtcaccggtcagaccagccgtgcaacgccagtcagaccacccctggtttgtgattttgccaatttcacacaaaggtttaaaatcgagcaccggctcttccaatatcaaaaatactcctttcttcacattatagctagatgcatgttgtgccaaatcatttgctatagaattatcatgcctagcaatatgtctaatagcaaaattatcaaaattggcaataatatcgaaacatgaatcaagatacctatttagtgatccgtccaagcaattgtaaactccggcaacttgttgcaccaccaattccgaatcaccaaaagcttccacgtgtttagctccaaccaactttatcacttgtaagctgaataataaagcattgtattcggcttgattatttgtacaataatactccaaacgaaccgatgcctcataacacatgccattaggtgaaaacaaaactacccctatgccttgaccttctttgcaagaaccataaaaataaatattccaaggtataacttcaactaagcaaacctcttcctcataagcaatatctacaggatggtctactataaaatcaactacaatttggcctctcatatatttcaatggttcataagccaaatcatattcaatcaaagtgtatgcccacttgccaattctcccacttagaattggcctttgcaacatgtgtttaataacatcagcttgacaaacaactatgcatgtactagataacaaataatgccgcaatttggtacaagcacagtataggcataaacaaagtctccctataaagacatacctcgtttcggcatacaaaagacggcggctcaaatatgtaatgatatattccttgccatcttcctcttgtgccaaaacggcaccactgactttgtcttcggaagcaatatataaccgaaacggcattccaactttagtcgctcgtaccacgggtggagtagataaataccttttcaatctttcaaacgcctcttgttgttttgcaccccaagtaaaattggcttcttttttcaaacgaagtatagggacaaaagcatcgattttacccgctaggttagatataaatctcctcaaataattcaccttacctagtaatttttgaacttcctacttccatgtcggcgctttgaaatcacgaatcttttctatctgcttaggatcaatctcaactcctctttcatgcaccatgaatcctaaaacttccccgccgacacaccaaaagcacatttaagtgggttcatcttcaaaccataccggcgcatcctctcaaaagctaacctcaaatcggctatgtcccacaataccatccgatttgacaacaatactatcaatatagatttctaagataatacctagtaaatcatggaagatcaaattcgttgccctttgatatgttgcctcggcgttcttcaatccaaaagttatgacaacccactcaaatataccaacaaatcccgggcacctaaaagccgtcttgtacatatcctcctccgtcataaagatttgattgtagctggcattaccatccaaaaagctaatcacattatgacccgaggcatcattaatcatcatgtcggctataggcataggatattcatctttgggagtagcttaattcaaatctctaaagtctatgcaaactctaatcttaccactccccttcttctccaccggaactatgctagaaatccactccgcataatgacatggcctaataaaccccgctttcaacaaccgatcaatctcttctttgactcggtcatatagcaaaggattgaaacgacgaggcggttgtttatgaggcctaaaacccggtttaattggaagccgatgctcgacaagatcacggttaagacccggcatctcatgatactgttaatagtgaaatttggtaaagcccgaagtcatcatcggcttaaagtcaatatcagctttagagtattggaatcagccgattggaggaaacagccgatgggagtcatcaagttgccatgctgtcgtggtcttgatggagtcagatcaatcaaaggaatcttatctagaagagttcgagttcaagaaagatgcggcatggcagtctatctattaattag

SEQ ID NO: 27288 - DNA, 12542 bp, Oryza sativa
atatacatataaattggatttagccgatgacaacaaaggtttcactgtttaatctaatcttgtggatttcatgacatcggacctccagccgatgtgtgttttaaccttcggatcggtgattattatatcttgtttctagccgattggtttctactcggttatattgtttttttattacatcatcaacagcagattgcctttatatcattatctacattgcacatatagccgattgcttaatccctatcgctatcggctgatatcggcatcggctattatcggctatcggttggaactactccatcggcttgtcagccgatcgactgttttgatctactatttgcatatcttgtcagttgcaggatcaaactgactggcacaccttcatctcattaatctttggacctgcacaggagttaagcagatctcctaagccggtgtgttcgattttttcgtcaacacagattggcacgccttgtgggactcgagttttgcacccattatgtctgaagagaaagtcaatgccgcgaaggggcaatctactaagccgatattcaacatgtcggctcggggggcaagcacatcagtatcggctcatgaaagccgattacaagaagcaaaacaagatcagtttttgagttatcaagaaaagaaagaagataattttgaagcatgaggtttcatactccaaaactgggggccatgtgttaacagtgaaatttggtaaagcccgaagtcatcatcggcttagagtcaatatcggctttagagtactggaatcagccgattgaaggaatcagccgatgggagtcatcaagttgccatgctgtcgtgttctcggtggaatcaaatcaatcaaaggaagcttattctagaagagttcgagttcaagaaggatgcggcatggcagtttatctattaattaggtatagtttgttagtttccttttatctttaggaaagtatgtttagtgtccgataaggactttatcttttccttttatctttaggatagtttctttcttgtccgacaaggacttgtatcaacccatgggtataaatatgtacacccggggtctatataattatcactcgatcaatacaattcggcgcatcaccaccatttttacttctacttttgtttctacgttccggcggaacttggcacccgacgcggggctgcatcgtcttcaatctccggcgaaggggtaagtccaatgttccgtcggtccattcaattgcatcgtttacgtcggcgtcgttcaaggctgcatcagtacattcgacctcttggattgctctggtttggatgatatatttgcctacctatttatcatatgtctctattaatctagtcttagcacatcaatttagctctatcggctgcttctcgttttagggtttctgccggtatcggctaaatcgcgttgctagattagattaacttagatatctaccaccctgaaaactcagtcaacggtttgatcgtctagatattatgtttcttttcatacttagtgctgcatcagttgagtttgatctactaagtcatgtttagaaccataatctctagcctgctttttgactgccaataagggtttcatcggggttttagtcggtgagttatctggacgttgcatcggctcataaggattgcatatacatataaattggatttagccgatgacaacaaaggtgtcactgtttaatctaatcttgtggatttcatgacatcggacctccagccgatgtgtgttttaaccttcggatcagtgattattatatcttgtttctagccaattggtttctactcggttatattgttattttattacatcatcaacagcagattgcctttatatcattatctacattggacatatagccgattgcttaatccctatcgctatcggctgatatcggcatcggctattattggctatcggctggaactacttcatcggcttgtcagccgatcggctgttttgatttactatttgcatatcttgtcagttgcaggatcaaactgactggcacgcctgcatctcatgaatctttggacctgcacatgagttaagcagatcttccaggccgatgtgttcgattttttcgtcaacagatactccatgcgaagcaatcaacatactccttaagtagctcgattattttagctttataatcgactctcatgtttttgtttacaaaagttggccttggcttagtttcatcacctatgtcaacttcttgcaacggatcggccgatgtgaacccttaaccaagcttctctacttcatcaaaatcttcaatagtttcactaatatcgttctttgtagaccgatattcttgcaccctcttttgcaaccactctaaattagcttctttattcattacataaagtgatatggcctagccgtgctaaactagccggctatacagagataggtacaaatttgccattggcgatactaataaaatcatagctagaaagatccatcccgataagcattgaatattcccataacaccactcaaatgttgcattggccattgcaacctcgggcgatgtatccgcttgaacaatctcaacatcatcgccgtcccattgaattaaacattgatgcaaggtaaaaggcacacaacaaatggcatggatccaacaacgacccaaaataacattgtagttaccttgcacatcgacgatgaagaaagcggttggtagcgtcttgtttcccacggtaagctccactgaaaagatatccttcgcctccgttggttcaccattgaagccattgagaattatgttggtcttcttcaactcatcatctccatgccccaacttcttgaacaacgagtatggcatgaaattcatggcagcacctccatccactagcatcctagagaccggcttcccatcaatatgacctttgaaatagagaggcttcatatgacggtttgactcatcaggcttctcaaaaaccgcatctttaggacctagtgagaattgagcaacctcggcttcatctatagcgtaaaactccataggcaacatacacaccatgttgacatccatgtcctcctttggagatgattcatccttagcaaccgattgttcttccttctccttttgcacaacaaccggttcttcaatctctatggatttatgcctccacatctttgtaggcagtggtcgcaactcattgaaccttctatctctttgctcttcggcctctctctctcttaattcttgggcccaaagatgttgcaaccttctcttttggtacccgtcaaatccttaggcatccacctcggtttcggctctgttccaggaggtaaataatgccctctgttgattttactcgaagacgatgaagcccctgaactaccctttgcaaatctcctgtcgaaccggcgctggagcccggttagaccggacgtagaccattagtcagaccagccagaagcgccggtcataccgacattgggctgacggtcaaaccggcctgatggcccggtcagaccagccttagggctgcggtcagaccggccagagggcctagtcagaccggccgcctgcgatgagctggtcccggcgttggatttattgcttgaagactctccaacttcatctccagaaggtattggctcatcatgagaccccactttgatagtaatcacctccgaagtcctaatctccactttgacacgctttccttcccttttctcctcattggcccggttcttagcataaaactggccattgtttggtaaagataaacgctaacgagctggccccggttgtattgcattggaggcatatgattgaacattgatggtgttgccccccatggcatgtagtaaggaaaaggataacccgacggcagcattggataaggcccccatgacatgttttgagaacgatgatatgtaggtgattccgactgtcttggtgaatgaccaaatcgctccctaggaggtgatcttggtcttttccttttgttgcgagctttctcaccaccttgcttctcatacttattcaaaagcatatcgaaggtcaccttagtcctcttaggagctttagaacttgaaacttcgctcctattctccttccaaacaccaacctccggattctttggcaccatcatctttggcctaggctctccaatgaccactccttgaccaatcaacaccttcttattgttgaaattaattgtattcaccgggaaaggatcatgatcaagcttcatcttggaaccatcggtaaatttcaatcgcccttcatctatggccgattaaacctgtcgtcgaaacacattgcaatcattagtagaatgagagtgagaatcatgccatttacaataagcttgacgcttcaattctacttgagagggtatgacatggcctttaggtaatctaatttgtttttcttgcaaaagataaaaaaaaatcatatcacatttggccacgtcaaaactatacttaaccttactttgccgatctttacgaggagtcggcattaaattagagcaaacaaaaggcttatttttgttagttcatgatcactccgcaacatacatatcatgatcaccctcatcatcactatcactagcttcaggataatcaatcaaattaacattaggctctaacaaattttttgctatccttaacccggctttcctgagccagagccttttgcatgagttgactaacataaaaaaattgttggcaatctaatctttctttaataggagcaattaaaccattaaaagcaagatcagccaaatctctatcagttatattcaagctataacatcggtttctaacatcgctaaatctcttaacataatcaatgactgattcattgtgtttttgcctaaccgatgttaaatcacttagcctaagttcagtttcaccagtataaaaataatcatgaaatctttgttctacttgagtccaagtatgaatagaatttgccggaaaagaagtaaaccatataaaagaagtaccggacaaagataaagaaaacaaacgcaatttaaaagtatcagaactactagcctctccacattgcgctaagaattgacctacatgctctcatgtggtcttactatcctcaccactaaacttggtaaattcgggaactctataaccacgaggatatggtatgttgtcatagtaatcaggatatggcttttggtaaaccttagtatgattcctagctttaattccaaatttatccttaataataccactaatcaattcctccatattatcaggcctattttgatttggtggtgggtttggtggcttaataggttgtggttgcggcgcaatataattatattggccatgcctagtatcgggagtatatcccctagtaggatcattgtaagcattagggatatgtggttgaacttggggaccaatagtggatataggaggattgggtgctggtatatggtataaaaacatgttatttgtcattggatctaccccctgtattgggatgattgcgccggtctgaccggtccaagccccgaactgaccggcatccaaaggcgcggtcagaccggtttggggtccgatctgaccgccggggtaatacccggtctgaccggtctgaccggcggcaaagtcgcggtttaaccgaccatctagcccggtcagaccggctgtatgcgctgaccacccctcgtcagtttgttgggtcttcaccccatcggttttactacttatttgatctatggggcttggctagcactggtagaggctttatctttgaacataaaatcggccatgagagggccaaatttagtcctcataaattcttcacaacgagtttcgatagatgcatctaacttattatttaaagtaaccatagatgaatctatcgtatgcgcaatttgttgttggatagattgtgatacctcttcagcacttaccatgtcgaaagtatgtttaggcaatgatcccggcttgaaaatcacaccttggcgggtcctagcgcacgccttcattagtagatcttgagtatatgccttgagatgttcatctaaagctttgcgtgctccctcatcaagctcctccaatgcgactggtatcacattgaccggttccacctccgccttggttgatggaggctttgtcatggcgatatcgaagttgagatgacgttgagcagatttccctagtggagtcgccaaaaatcatcttggcaactttttgtgacaagttgacaagcacgatcgcagcacgtaaacgccttgcgttgatactagagtcaccaaccatctcaatctagcaaaagctaaaccaagataggttttgataactaaactggctaacggagccgattctagataactacccgtctcgtgggcaaaacggaaggttttcaggacaaacctacaaagagatgtcgcactcttgtaggggcggtggacgatttacggcgcaaatcgacaaagatggacaaactaagagaaaactaaaagcaatatgaaaaacgattcgattgattgattgtagattggtttttacaatgaaccggccttacccccttatataggggttggtcttaccctttacaggccctcctccacgtccaactcgggatagaatccaaaggaaaccagaaacatgccttcctgagcaaggaaacttcgagacccggtgaaacagacctggactcggactctgccggtcagaccggccacacaccaccggtcagaccggcccacacacggcggtcagaccggccccacagaggaaaaccggcagacttccaaactttggcaatttttcttattttactcctaggtgccaaatttgggtgtaaacacattaatcattatatgcatccataataattactaatgttcatgaggttatttgcactccgattttcgccatcaaatttgggggagcagccggagtaatctcgataatgatgcccgtcaggtgatcgggcgggggaggagaaatcgggcgctcccctaccccatgcacgcgcgctcccctcccctgacccaccacgtgtcctcacacacaactctattgcaacaaattacccatatattttggaaactctctattaagagaatttggtttattttttgttccagcaaaaatgtttcatctagtgtactgacaatgtttcactatatatagatctaatgttgcagtgaacgaaacattccattgcaacaaaaacccacatattttggaaaccccctattaaggaaatttggtttattttttgttccaccgaaaaatgtttcacctagtgtactcataatgcttcactatgtatagatctaatgttgtagtgaactaaaacattctttcgctatttgctaaaatattgtttttatataagttgaaacagcacctaatttcaacgagtgaaacattttcgatctacttagtgaaacaattccgatatacctggtggaacatcgtgcaacatttaaaaaaatcaataataagctattttttcatcggaatatatccatgtgtggtcttgttttgaagatttaattgtaacgaatttaatggtgtaatcagatcatgatttggataagtaatttaagagaaacatcagtttaaagtagttttgtacgtaaatcgggcgctgacatcggcatgatgtcgggcgcccgagccgtaggcagccccggctaatctttgatttttcattttatgaacgatatactaatctttggatatttcatgtatcttttattacgtaagatccgaaagaattcttcgctttgatagtttgcccaacctgcttgagttaaggcagtctttatcagtgagatatatgaagtgaaggggtattctcaccagagtgatcacaatagctcatgcaccttacttccttcaactaaaaaaaactgcataaaaaaattcacctttatggctcaaaccaaacataaaattggatcatcccactcacccaaccaaataaaaaagtaaaccttgcatactaaccagggttcaatatatatattgaacgagcactttctattgggggggaggcttgatacgaccgaaatttcggtccgaaataatttcccaatcaattcctcttttttcccttccagtattcctgattacaaattccattgaatttcaaattttagttcagtccaaatttgttgcctaagctctaattcctataccttggataacaatccccaatatccccatgaaccaaatttcataattaaattaaaatctatagtaaaatattcaatttaatttttcctcaaatccattcctacaaaagtccaaaacaataatgtgcacctgcatgcgagctgaacgaagttcagttggttatatatgtttgttatgatagcacctattcatctggtgtcaagttctaaccttgacacatatgcttacatttatgagcaattatttttttatttgtaggcaacgtatcaatcaataataagacataagtggtaacatcatctctctatatattccaacgtaatctctcgggggtaattaaagaggtaggtacgtgtttatgcgtttatatgcatgggtgagtgtgtgggcatgtatataaatatctacgttcgtacagtgtaaaaaaatatagcacctggcaacctgggcatcttttcttctccttctcattattttctagtagatggcacacactgttcatgggccacatgttactgttcatgggccacatgttagggagaaaatagggcaagggaagcagaaaataatgagaaggaagtactgccttcaaaatagggcttccttaacattgcggcacttccttgaagactttttaatttttttaaccttttttatttttattttttaaaataaaccctttcaaaacttatttcaaaactttcaaaacttatttctactctagccacattgtagggtgtatttagtttacaccaaaattagaagtttggttgaaattggaacgatgtgatgaaaaatttggttgtgtgtgttggaaagttttgatgtgatggaaaagttaaaagtttgaagaaaaagtttagaattaagtaagagcgtagtggcaaagcatagtagcaaaacaaaaactgacatgtcgactgtaggtgatgtgacaatattaattcgtactgtcatacggggtggcgtagtaaaaaagtttagatttagaaataattatcgagatggcgtagtaaaaattcccctgatgtactcaattgcactgccgacccatggcctcatgatcgagatctgtgagttatatatagtagcacaattcaatactgctgtaaaatatctctgcacccttcaaataatcatttgcaaaaagctgagtataatgcttcatatgctgtccctaagaatggcacattaaattaaattaagtgatgagggtggagtagagaagtgaggagagagataatgagctacccctaaatcaagaggtaacctccacacaaattttaagaagagtgtgagagtattagagacgttggtatttgtgtactagaggtgttttattgcatgagttatctattagtttatgagtgaatgatatagataaatttgaaggtggtagtcacatcttctataacacctgccctaaacacataaaactcaacgttcaagcatagtatttattggctctcctaaaacctacatgcaagcatgccacatcgacccattaagcacacagagctcaacatgcaagcatataataattatatctataatttatttcaattctaaaactaaacatacacgtgctaaatcatcattctcaaatcattttcataatattacaatccaaatcattttattatttctttactatctaatatatatctcacagcaaagcgcgggttattatctagtatatgagaagaatggtgtcaaaattgaagaactctctatagtacttaaattatactccatccatcctaaattataatttaggtttatatttttttacacggtcttcaataacacactgtgaccattaatttattttatattaggtttcctataaatatgaaattagcataaaaagaaagtacatcaaaatatgaatctaattatataacatgtataatacttagtatatatatggttagtatgatcattagtcaaaagttatcaagtttgatttttctaaaaaaggaggcgccctataatttgggatggaggccttttctctactattaaaaaaaaaattgaagatgtttttgtcaaaattttggtacgtcatccgagtttgttttctaatatttgtctttatcacttccggtttgcttttatttttgtccgtcttctttttttcgtcgtcgatttttttgtcagatttgtatttttttgcacgtggaatttttttgtgcgagtttttttatccatccctttctttggttgccggttcttttgtccaatctcagtagtatccaatctatcttagtagtatccaatcagttgcacacgcgcagcacctctagccgctgcccaggccaaaccctagcatcatcacaacgtcgatctaccttcccacatgtttcctcctaaaattgattgcaaaaattgattccccacttattccttagtattttccccatgattttccctttcaattcagcttcaatttgtcgctccattgttgatggcctaccggcaagcttccccggcctttttacctgattttatgaaaaagggaaagaggagaacgaatggatcaaaagccctcacccaattttaggagaacaagagattcggccaaatttgatgagaagatcggggactgtttttgaaggttgaggacaaacagttggctatgcgagttgcgtctctacttgtgggttgggccgaagagaggcaggacgggcggagggaggtatcagactaggctaagctgaaaagtaaggaagaaatatgcttccgtctaaaaccaatgaaggatattcattattttttaaattacaatgtatagcgattctaatatttttatttattgctcagctcctaatagctattgtgtcactgaaaagatctttacccgtgcgattgcccatcacctaatagttgttgtatcactgaaaacatcttcacccattacaacacatgtattttttctagtaattaataaagtttatgatgaactcctctactcattgtaaattttgcaatttttttcccaccaacacaactcggcgagaccctagggtcaaatccccaaacagctttcaaagcgggacaccacctctttctcaaatttccctctctttcacttccactgggcctaggcacttcaggcagccccaccagtaagcaaatgcctcctgggatgccctccctctctcccctcggtgaagccagcatacgcgaattggccactactgcaggacaggtatattgtaacaaaccctgtaacacatactaggatgtgttacacggcaatatcacaggaacacatactatgtgctacaacatctgcttgtaacacattttcaaaagatgtaaaatatagctctagaaaagtgaggtaggagcacaaaatacgtgttacaaaggatgtgttgccaagacaatggatccaggatcgcacagttgcatgataaccactaattggtggcatagccttttttttaattacttctacatgtcctttgcgtctagtatcatatttcaaccttataaaataaaaatatcaatttatgggcatgataaatggaaataaactatattttgctttgatttttggactaattgtttatatatagatggcaatatttgagatcctactttttttctgagtcaacatttaaatacttaatacttgtttcttcatccgtgttataatcatgtgcgaaaaaaacagagtacacaagtaacaactgaaccatcacaaataagctatttatcatgtaattcaagcttgtgcagagtaaatctcacagtatgaatcagtaagctttagatttagtgattcattatcttattttaaatatttcaacatatatcttgcagttggcttatggtttgcaccaaagaacaatgtatgatacacatgttaggaattaccaactttaaattgtattgaagcgtatatggtgcacctattgaattgcaaaggatagtttccaaatttccaataaaaactgagacatccatgactagtatgaagaagaataaatatatccaaactattcactaaaaaaaatggaaacatcatatttcatcgaaatgtaccaaattgccaaagtaaacatcaattggaaaacacactgatctaattccacaactgatgagtctgagattgtatttttcagtcaaacctcagtgttcttcatttgtaactaaaaacattttcaggaattcagttcatgggttcaggtaagtaaaataaataatgcaaggaagttctgattctgatgtatatataaacaaattgtccgacatagtattgcatacttcatgggctagtttttactagtcaatatctatccaccatcttgctgtcttgctgcacattgtttgaaatattttcagcaaattgtct

SEQ ID NO: 27289 - DNA, 10123 bp, Oryza sativa
tacagtagctcatcatatgattgcttagtagtgattagctcatggctacgcctgtcactaatctcaatgtcacaggaggaaactatgatatggtaagcaataatgggctatacatgctaatatatgcttataacgggctataatatatgcttaaaatagcctgctgcatgcatcctctgattgaaatatccatactgttggaaaaactgagattttctgaagttggtatagttatggtagatacatagtgcaatcagaattggcaatggtgatagcttttcagaacttttctctggtatggtagtatttgcttcacttctaattatttccatgatctatggttgtatattgtttctaacagaaaagggattgtagttcaaggaacagaaaagggattgtagttgaaggaatctagtattctttgtttgtaacttagaaggatttcttcagcattcaagttcagaggttcaggtaaaccgaaaaaaagtagaaaattttatcttcatgcaaatttatgcaaatgtgatatatagaaaaatatgcatcaactttgagttgtatctttatatactaatcattggaaagtttttatttgatttttttcatacattattggactagatcagtatatatattgtgttgaaatttctcatatagaaaaaatagtatgctttattagttcattgtggataaacaattggtgattcttattccaagataaatactggtcttgttgctgaaatcacataatagtattcttatccaatgcaagttttcattgtattatctgtgttagattcattttccttatgcgcagaactgtatgcaccgtccttttatccattggactgcatgctttaattttttcaaagcaacaatagcatttctcatccatcacaatatttgtgctgccaaatttttagaaataaaagcattgaactccaattctgtgtgattatttaggagatctcacaaggcactgttctattcatttacttccgcagtctcaaaatttgtgaattgccggacatgtcaaacttaattgcttatccatgtaagattcaataaaagtagaataacatgaagttttaagtttgtcaaacatatttcagatattgatgttaatatggcatctatccaaattatctgtcacagttacaaacaggtttacttcttattacttaataatgattagcttgattggcaactgttatgtcttagatacttccgttctcgcttaactcattttgtggcgtaatccgtgtttgatctttcatatgtacaattcaatgtaaattttatgggcttaacagggatattttcatcatgatcaactgcaggtacagtttattgtacacattacacatacaagttgatactcagttggaacttaagagcaaagatgcacgttcaggtgcaacaatggatcaagcagcaaataattttatgaagaatatagaaatagacacactttgtaaaatcgtttagaaattgtacttattgttgatatgtggattgatgaaaataacatttgcttcgtatgcaattcaaattgccatgttgatttgtgttatttgagatatgtgatgcctataaaggatattttgaaatattttggcacattcctgaaaattaaaaggcaacaatgtaaaaaaaaagctaattagagcattattggtaatcaaatcattattgttttgctgtactgtgcatttgatgtgttactagtggccaagatatgtgttaccgggacctatagcaaggtgttccaaagtgcaacctgaggttaaaaaatggtgttactgttggtatttcttaacgacattactagaaatataattcccagcaatggcgcataaatacttttggtatattatagttacagagtttatccgcaagcgcacggatataccattatagcatttcacccgagagtattccaagggtattgtatttattttatcccgtgggaagatcatgtagagaggacttgactaataatttatatgttgcttgtaataatcatattctaagtaggagttaagataatccaagggtagagtgacacacaagcattaactactcattttcataatatattatctaagctaagtggaaagaaaagaggaagataatctattcctatacttctaatatacatagtatacatacatcttagttaactgatatactagctaataccctctttccgatgcccttctggtacttcgagaagccacccctgactgctgagttccttacgacagcccatcataaccacacaaccgggctaaatacggaggaataccctccccaggaaattaacttaggattatatataggcgcggaggaatacctgtactgagctgtcaccatcagcggcccacctctcatccgcaatatataaccccaaataatgatatcccgtaatctagacaccacgtctaaactaccagatactactctaatatcatcgtcatgacatagagtaattgcataagcaaacattatacccgcaccaaagcatctcctagataagctagccgtatattcagtataacaagaacataatataaagtaggtactcatatactcggaaagtatttcaataccataaatgtatttagaagagtattctaataaaagtacaaggcttacaaaagagaagagaaaagctgctagagtcatacccgaactcttccgaagactttcggactcctgatttctactctattcctattccactagctagatactactaaactaagcttgagagaaatgagagagctattgcttgaggtgtgtgttgaagtgaagagagtgagctccttatatagaggtagttatgacggttgtggaaggggaattgtccgaagtgccatccaactgtcattgggatgcaatcctggacgtccacgccaaaacctggatccaacggcgcaaggattggttcggccgaaccaccaggttgggccgaacctggggctggcccaatctagcccaatttcggctggtggcctcctctattgctccactttgcagacttgtgaattttgtcccaattcatcgtgtcaattctgagttcttggcccattcatacataagtctgattgtcgacatcgtgcgattgatttatcgtctgtgttgatgtcgattctccttcactttattgtcattctctgcaaaatgttagtatacctaatactagtggaatattattattctaacgtaattatgcattgcaagcatcactagttctcctctattttggcaatattgatggtcgaaactgatcgataacaaccgtcaacagttactagtatatgccttgtaacatctaatatgtgcgactacgatatggttgtaacacctttttctactttgttggaacacttagttatgtgctactaggctttgttgtaacacccttttttataggttggaacactaaatatgtgctactagactatatgcccgtaacataggcagttgcatcacttatattttgtgttactgcggacctcagtaacacctttttgggtatgtagtagcacatagctgtgttacaacagccatgtcctgtagtagtgttaatgccgctgtaaactatctatacgcccttaaaataatcacactagtgcaaaaatgatttttctggacaaatactctaataggtttccataaatgtttgtgtctgtaaaaatcaactcccattttcacatacggctcagagacccgcacacaaaattcaatttttgccaaacagaccacttaaagcgtccgtacgcgaaaataagggtgtatttttgcatgcggggctcttaactcaccagcatgcaaaaatacccctcctcttcccactcttcttgtattctcccctcccctcccctctctctttctctctctcccggcctcacccacttctactctcctctctcccactcctctcctctgtcccggcctcacccactcctcttcctctcccagctcctcttcccgcttctcctccctctcgatggtgagcactagcggcggcggcgacaggcaagggtgcctgcgggtgtgggcgacagtgcacgacagtctcctccttgctcccccacgcgcggcgggtggtggtgggtgcagaatccggcaggcggcggccaacccccgcacagattcagtggcggcaccttcaggagtgcctgctgcgaaggagggcggcgactgcggtgaccgtgagggcggcagatccggcgattgcggcgatggcgggcgtgagcgacagctacaatggtagccccttgggcctcccccacgtggatccggcaataggctcgagtgggaggccaacggcggctctccctagcctcccattccaacgcggatccggcagcaggcagcatgatggcggtaggcacgggctccgcaacatgcgcggacgtcagcgacagtgtggattcggcctccacgcgcgcggattcgcggctggcgatgatggttggtacggaaccgccgacagtggagacgggagaggcagatccgccagcgacgatggtggcggcaaccggctagggttaggtctttgtgttttggaatttttttttgcgattttccattttcacgtgcgcgaaaatccgattttcgtatacgggtgtgccacccgtatgcaaaaatagcaattttcacagaccatttcactactactcatcaaataggtgtctgcattataggtgccggaagtgctaaaaccggcacctataggcctttgctacctccatggtccgaaaataataaaaaccggcacatttaagtgataataggtgtcggttctgtaaaagaaaacaacaccatgttagtttttcagtaaaaactgacaactttataggtgccggttttttaaaaaaccgacacatttattatcgagccgagccgagccggaggagatatttcttctcccggcggggcccacactcagaggagataaggccagctttctccatttctctcgatcttttctccactgctcctctctcgctttccctccctctctatgtggagccgcagcccggcgacgacggcggtaccggcccggcagaggcgggaggtatggcggcgccctcccctccgccaaatccggcaggggcgggaggggaggcgtggtggcggcggatggcatggaggtgcaacagcggcagatggcgggagggtaggaggcggtggcagacggtgggagcgccctccctctgccaactctggaggcctgacggtgggaggagaggcggtggtggcctggtggtggcccggtggcggcggatccttggggcgacggtggcagcggtggcgccctcccctccgccagatccggcgggaggggaggcagcagcggtggcggcggtggcggcgatgttggggggcttcggatccggcggcatctctgtccgcctcccctcgcctacggtgcccgatggtgtcctgttgcttccacctccggtgagaacctgtgctgacttgctgttgattgtctgaacatttatgatgtttgattcaatgatgtgaaaatttgatgaacatttgatgcatgaacttgttgttgagtgtctgatgtgaaaattacatgaacatttgacccatgaacttaattgttgattgtctgattgtggattattttctcttttttttggatttatttttggtgctttgaagcatcggctcggcgagccggattttttttttgtaaatcgtatacctcaaaggtgccggttcctaacggggtttgccaaccggcaccgaaagccctttctgtggtagtgttttgtgcatgcagctagccataccgcacgcaaaaaccccttttggacagtccgcaagaaacatttttgtaccagtgtcatttgcaaaacgttgtaaatggtatacaactttacagatgcttcttcgttgtatctccagtacacttataagttacttatatactctctccgctcttatttttttgaaaatgtatctattgactaataagtacactaataatatctacgccaagtattatataggttatatcattagatttgtgttttaaaatactttcatgtgatactgattttgtagttgttgatgatataatatacatgaaatagtttgatactacgccggaccaggtcatctctgacgggcccaaaccctcacctttgatgggtttggccttggtcagtgattagtggtcactgatgacaaaatcacctgtgacgggtgaaacacccgtcacagataactcatctctgaccggtatataagtcatctctgacgggttaaaacttgtcacccgtcacagataagtcatcagtgacgtgtcataactacctgaccatcactgacgactaatctctgacgggttgaaacttacgacccgtcactgatgacaaagcaagaaatacaatttttaaattttaaacgcaacaaaaaaaacctcaaaaaaatattttgaattttactagccatcctatacatagttacacatcactacctacaaattcacaatttttcacgcaatataacttgcatgctaaacgtgagattcaaacttaagacctcaaccaccatagagagcttccttaccaactcacctactcagcacatattgattactcacccaatgttattattttgtctatgtttgtctgaatcatttaacatatatttaacaccctaaatgacttcaaatgaaaatattatcaactaaatagttatagatctcatcgtgttttataacttttacatagaaaatatcttcatccgatgttgtttgaagaattcaaaatttcatttttcaaaatagatctcactttataacatgtattttgaacatgtaaactttgtcaaatgaaaatattttcaattattaatgttgtagatctggttgagttctatgactttgatatggggcatgtatccatccatgtcatttgaaaaaaaactcaaaattttgtttttaaaagtagatctcatcacttgtaatgcatcttcggggatgtaaacgatctctaatagaaatgttattagttataaagttgtggatatcatcgagagctacaactttacttttatataggacatgtctcaatccgaggttttttgcaaaatttaaaaatttgaattttcactcatcactgacgggtcataactaccacccgtcagacataacgttacctgtgacgtgtgttagttaatgacccatcagagatgagtggtctctttttagttaaagagccatctgtgacgggttacaagtgcaagtcgtcacagatgacctcacatctgtgacgggtcctccctagtagccatatattgaagaggatattttttcggcccgtcagagatgactcatctttgacgagttgcgttggcccgtcacagatgacccgtcactgaagcctggatctgtagtagtaagttaaaatatgttattaaagcttggatcttagagtttgttagagataagagtcgtgtccgacaaggacatattttgtaatctcgggtataaatagaccccgaaccccatgtaattagataacacgtgttcaaatacaatctcggcgcatcgccacccttttactttcgttttgtttcgacgaattcttgctttcgggttgagttgcatcggtctcgatcttcaactagaggtatgacttgttatggcggcttgcgttctcgggattagtgcttccatcattatgatactctaatcttgtctacgtaagttgtcgagctatcatatatcttatataatctctgataatattgctatctaacctccaatcggctaatatctatcactagggagtagtcgattaggttagatatcgatgttggcatagattatataggatatctacccctctatgaagctttcaatagcttgattgtctagatattgtctttcttttcatacttatggctgcattagttgagtttgatctcataagtcgtgcttagaactataatctctagcctgcttcttggttgtcgattagagtagtatcggggtttcagccgatcttacctgatttagctttatattccatgtgcttagttgatatgctagatctgccctttatgttaagatcttattgcttttaggtgtattagactttacgtttgatatattttacttgctttaatatcttaatgtagagtagtatcggagtattagccgatacacactagatctatctgattgactatgctatgaatggttatagtttccttgttaacatatatttcgatctaagtgatttatactgtctcggcatggcgaccgatctatcccaatcacttgatttaagtatatgtcgacatgaaaattatatatcattgatatctacagccgatcgaatagatctagtttctttattattgcctcgcacagccgatcgatacagagatgacatcagctcgagtataaatgatacgtcatcggcggctggccgatcggctataatttatggattaactacggtttatttgtctttgtttcttgttgattgcaggatcaaatcaactggcatgctcatgaacctaaaaggcaagattttggacctgcactggagttaagcagatctctcaggcctcgtgtttttacatcaacacgcttttggcatgcccggtgggacccgagttttcgacgacctcatcccgatggctaaaaaaccaccaccatcacagggaacagggttcaaacctcctgtgaacaaaacaggtgccaaaaatccatcagctgaagtcgactcaaccaatattgtcccaatcacattagataggctgacagctaagcaaagggatgaacttgaacagatgatgagcaacgtgaagggcaagtttatggattcttttcaagagacccgtagagggaccatcgtacaaaagtacaaactgaaggtggttgcagccgatgaggtcggctcgagttcatcttagggtaactaagatactgcaactggctcaggtgacaagggtgacattccccaagatggtacagtggaagaccttggtgcagatggcaaccaagtgcctttgcaattcaataatttccaagataggatcgactatgctgtgcaacatgctttgatcaatcaatttggagtgctagttaatatcttaaccaacatggtgaagactgttgtcgatagctcgatagccgagcaccaagcctcaggaccagtttatctaccaggaggtgtttttccgaattataggcctttggttatagcaaattagcagaatacatctaatgctttgccggcttggccgacggctccagttttagctactgcgcaagttacatcatcagcaccaaggcagatagttaatcccagattattgactagagagtagccacaacatgctgggcaaaatgtcaatcggctgacccaggatcaagttgctgcaatgtttctgccgaatccaacaatagtcgacccaacacagccgttgccgactcagcaagcacagccgaggcagtagacggttcagccaactcagcaccaaaacttgtagcatgtgttggaaggttaaggacacctgacaatcagccaatacagcatcctgtgaaccaagttattcctgaacacttggtccatcacgtacaggccgatcaatcaattatgccctcaaggttattccctaaacatttggtgcataatattcagacgaatctccagaactatcaaagaaggaaatctgaattatcaatatcagcctctgtcacatcatgttcagtatcagcagacaggatcgccaacgtcagtacgctcctcaattcaatcagtttgagccaatgcagcaacaaatacaaggagtaccttagcaaacatcatggactgatatgattgcagatgtaatgagggaacagtttgggctcaagccaaaagatactggaaatttgtatcggcatccttattctgagtggtttgagagggttccattgcctagctgatacaaagtaccagacttctcaaaattctcagggcaggataatatttcaacttatgaacatgtcagccgattcttggatcaatgtggtgaggcatcggctacagaagcttgagtattctatagtatccccgggtaccgagctcgaatt

SEQ ID NO: 27290 - DNA, 9310 bp, Oryza sativa
ttagccagcaccaccagctccctttcatcgcatgcccagttttagcattgtctgtttattaatatttatttttgcaccctctccaaagaaaattatgtttttgattgcttcatgacggttgaattctgttttcattccgacacagatgatctaattgttgatccaaggaattttgagtggctgagagaagctaattgtccagttgtaagtgttagcactttattgttgtgcagaagcagaactgcgtaatctacctgatgacttctgtgttgatttgtcctgcttgcttctgattgatgaaattggctgatggaataatatttggaaaaatcaacctaggattttacaaggaacctatgtttagtagttttattattctcttttcagtattcaccagaattccttgaggaatgtatgtttggattctgtacattcctaacaccaacagaattcaaggaataatagaaaaaaaaaaggaaacatgggacataacaggcaatcgaagatgcagacttcttcaattgagtagatttttgttatctttttcatcagaaagtaactgcatttctatcttattatgctttgtgaaatatgtttaaatttgtcatacattcatgtgttattctcatactaaaccaattttgtcatgcatttattttttttaattctcttaacccaataatttcatagacctttgaattagctttatcaactatggtatagtacgtggaccattgatggatattacatttcaggtagctgatgtaacgcatgctctacaacagcctgctggaaaaaaggtatatttaccaattgcaatgcacttctgctggtttaggcaagattcctagtttaatggccgactttggtgctactcaaatcctatattgaccaacaaaggaatcaacattatggggatgtccatattttaacaactatctatagcttatatctgatgtaaatttgcaacaactcgtgttcatagttttttgaacaccatgttaccggcccttcctcaaatatctatgtatttgtgcaacgtagacggttgtgaaattgtgcatatttggcttcttttgtaagcttgatggtggaggtgttgcatgtgggggcttacgagaactaataccatgcatcgcaaggacttctgttgctgtctcagttgatggtattttcatggaggtaaaacctaacaggaagctataatgttgccttttgtttcttacattgctttcccagtgacactccacaaataatgatgatattgtactcttgggacttaatttgatatataatcctacaacaggtacatgatgatcccttgaacgcaccttgtgatggcccaactcaatgggtaaacttctacatgtttgtcaagaaagttcatccatgcaatattttctttagtatgttgcaacattcacgctgatcttggtacgctcacttgttataatattgtctattgtgtttttgttagccactgcgcaatttggaggagctattataggagctgattgcaattgctgtaagttacaccgacattcaaattttttcgaacacaaatatttaggctaaaggtctttattgttctttctttgaagcgagtcaccaagggaaagaagccactcaagatcgatctcacccccttcaaagaataatctggtccagttggtaggaaataatgggcacacttgcttggttgatagttttgaccagcatatatttacctgtttggatgaattgctcgttgtatgtcatacattcgtttatcggtgactgttgtctgtattgtactgcctatacaataaagatcattgttttacccaaaatatgcttccctgcttttacatatatactagaaaaatgcacgtccattacaacgggaaaaagtgtatgataaagtacagtagatggctaactttcatttgagcaagttgggccgaggaaattggcaacagcaacagactatctggtcaatttatagccgctagctcgacttcatacaatatgatttcttgagtatatgtactccaagactggtatttatagcaagttcagcagtattccttaagtaggagggcgactcgtgtcttcatcatgatgctatcgtgcagtttcctacactaaaaaactgtttttacaagcagctacagcctcatttttagcttatgcttatgcttataagctaaaatttaaattttcaaccttaaatttagagttgattttggtgctttttcatcgtagtttatttttcagcctttgcttttagatcgctaataacatgtatataaaagttttatttacaaattattttccatttttaaatatgccgtttcgcttattacgatggagtccttaacatatttttacaaacggtcaaatgctccgcctaccatttaaggtttacaaaaatcgacaattttcacaggaaggcctatgatagagatggaaatgggatggagaacctgggagagagggggctgagggagaagaggagataaggatttagtcacagggctctccaaatttcaaaatttagtagcaccttcacattttgtaggcaaatcatttaaggtgccatctccaaaaatcgatttttacaagcaagatcttaaggcttctttttctccctcggtgcgccacccgaaactccaaatcccccccccccccccactaaatattgcggccatctctgccaccataccgctggggggactagagcatcgtcctcatcaccggtggcaccacgtactccactgcctccacccaagatgcatcgcaaggtagctgggggattggagctccatcctcatcgccggcacccccacgctctccagccgctgctgttagcttctcggctccaagctccaagctccgctctccggccaccgctgccgaacgggcgtcgcgaggccatgccattgtcgctcgcccccgcttcagagaggaaggggaagagagaagtgggatgtgccactgacaattgggatccatcacttttaaatttatttttggtaactgaaatgccacgtaggatcaaaccgccatcaaaaccgctttagggatgtaaattgatctgattttaatagtttggatactctatatccggtactgtgatttaagaatgaaactcaaactcaacatgagaaacctagaatgaacttattcccagatttaatgctagagtatttccagtcctagcaatgcgaggcaaggtagttatggaattttttttatttttaatttttttattaaaatatttacaaaagtaattttgtgtttcaaaattttacaaaactagtcgcctgccgccctctgggagggcgatgtttaaaaatcgccctcccagagggcgattttcgtgacgtggctaaccaccggtagcgtacgtctaacggccggctacagggggcctgccttttgcaggcggcccccttgccgcccttacggagggcggtttagtactgtgcggagggccgcctgcaaaagggcggcgaggaccctggttttttttgcaggcggcccccttgccgcccttacggagggcggtttagtactgtgcggggggccgctgcaaaaggcggcgaggaccctgtttttttgcaggcggccccattgccgcccttacggagggcggtttggtactgtgctggttgccgccagctttaagagcagcccccaggtgtttagttcggtgcatttagaaaatttagtaaatcatcacttctaaaattgtgaaacaagaaaaaacattattagaattgaattgtacgttgtttcggcggtttggagcccaacaaggggtgtttttacaccgaaatatttaattgttactgtaaaaactacataaatcattgtttcaaagtcaaaggaggaatagtttcaaactacataaatctaactattttgcaattaaaattttaagaaataggtattttacataaacctgatttttagcacttaaaattaggtaaagtatcgttttgaaacgaacaaagtacgtgcattttgacaaaattttaataatttaatttttcatataaattggagggctatgagggggtttgttacctataaattgtaagttacgcataattctcgtgtatgttgaatcatgtacacaattgaaggtggaagttataaaaatataagcaggtacatataaattataaggatacaacgtatcatggcgtcaaagaaactgtagaaatcggaacgatacagtcacattaaattataattcatgacgcatacaacagcacaacatagtaattaaacattataatgacaagatagcatggataaaagatacaaatttgtcggtcctaacaaatcgagcctgagcttatctaccgaccccttccgcgtcgttcaacatgtattgcattttgatggtccttctctcactggtactctacctgtgtttcagactcagttatcttttggccatcatatgtaggattgacattgtcgatccataaagtgaatgcgcacctccttggattgccctgagaaacaaacatagttcagataggatagtaataataagcagattctacttaaatttggaatttgttatacatacaacgaaattgtcgtctacattggggcagacaatgtagccacctggcaattgtttgttctgcaaacgaggtagccacctggcagcgatctctacaaccacactttggatgctccgaccatttaggtaaacctaatagattgttcctccagtctaagcttgcaatttgtacctgacgttcgtactccatccatgcctgaatgaattgcgtggtcgtctcaggttgcgttatcgtttgaccaatggaagtaactctgaccgtatcgatccattgtatgaattgacatttcctaacctcctcctatttgaaaatttgtgtaaatagaggtaagtgcatgaaagtagtgattagtggtacccaaaaaaaaagatacttacgacgaaatcatcgtcgtcaatgttaggacacacgaagcatctttgtcctcgagttcgttgtcttacggaccttatcacctgacaacggtcaccacaacgacactctggatgttcccgccatgtggggagtcttagggggtttacctgccattctaaagcttctgcagcaatccgacgttcatgctcatccttccgcctgaggtagtccgatcttgattcactacgtgcatatgaacgtgttccgtcgttttgtgggttctctgtatctacccactcaatgtagttgcacaatttacggtatgtctgcgtaagatgttatgatggagtagaaatctgttagcttttgatgtgttcagtatagttaattgaacttgtaacgaatgaatgatacctgatcaaggtttgcacattggaagaatctcctgccccgagtttctaccatgaggcttgacttaagtatgcatcgatccccacaagtgcataacggccggtcacaccatggtggaaacctaccggcgaaaggatcgcttcgccagttgagacgctcaagaaatggagcttccattctctctagatgtgtgggaagatgaaagatgatatgaagagcttgtattcggcttgtctattatatagggccgcaactagtgctataactagacttaattttgttcatctggcgcacttgatgtgacaacacgcgcacgcgtgagcatcattcactttatctccgagaacagggccgaaagatgatagtgacaactcgaactaccaaggtatatgtgtactgtggtctgctgcgctacctaaatgagccaatcttcacgcgccgaaagtttgttgtcgtatgcgtaagtagttttaatatgcagtgtattgatgacacgagcacatgtgggcagtaattaattcacgtgcggaatctatggtgcaaagttgatcctgacaactcgacgaaacgctttgtctataatggactggaccatcacgcgccgaaagttaggcttcgtatgcatggaatagttgtagcagtggacatgtggaaggaacaaaatatcagagcgtcaaggcaatggtaccttagtactaacagcaaaagtaatactggtctacacagcaaaagtaagccaaaagaaaagtgcacacaaccactcaataggtggaccactactgccgaggactcttaccccggtccctcctgccctgcgccctaacgtgtccctgggaatacgtcagacggtccggtggtacggcacggcctgctcgaccctcctgcactggtgtgaccagtggctgctcctgggtgtgcgcctccagagctccgccaagctgtgaggacccaagtatctcgtggtctggcgccccgtgaaagtcgtcgtcgtagaaccgggcagtaggacctgtgccaccggcgtgtgaggaagaggctccactagcaaagatccctcgcggctgcgtgtcaggacgagggatcggcaatctctgtgacaaactgctgcctccgacaaagacgccggaaggcagacggggacctgcgcgtaacgtatttagttaggacgtagtcatgttaccgagaataaatcatatatacttgaactaacctctgggcagagcagtaccgtgcgaagaaccagttgtaggtcgcacaactccggtactaggggcgcgtggacgtggtggtactggaccaggtggaggtaccgcgtccatggcgctgcgacaagagaagacgcggatgacagcgcgtatcttctcctgcatccggtcgaaggtaatcctctgctcagcatcactcaagtgtagcccggcgtccaacctcactgttatcgaggtaatatcggcgttcacagctcgtgccgcgtcggcctattcaagacataagatagcatgtcagtaggaaaataattgaaggacctgagtagaaacaattgccagaagtgagtagaagtttgacatacccccatgaagtagtctcggtcacggtgcgtggggtactcatccctgacagtggcaagtcgtggctgtggtgcggctggagtgaaggtcacacggccacgagtgcgaggtaagtaccaccgtaggtagtccctgtaggtgtcctctgagtgtggaacgaacgcgtgtagtgcagtgggtggtgggagatctggacggcgcatcacgggcaaaaagcgctcagtgatatcctcctgccagccagcaccaccgtctactggaccaactgcggctcctgccagtggtagtccgagtaggtacgacacgtcctgtagtgtcggagccatctctccacagggaagatggaacgtgtgcgtctcaggcctccagcgatctgccagagtggcaaggagtgaccggtctgcatcccaccgcctcgcagggtctctctcgtctgcccctgcctcaacaagcctacaaagcggtaggaggcctgccacacgcaacctgcataatggaaagtcaaaaattagtacatcaaattgaaagtcgactcaaatgtgcttaaaaaaaattgaaaataggcgtaccacggaacgtgccgcgggtcgacacgcaacagctggtgtgaaggacgtggacggaaggtgccgagctgcgcaccctgtaccgcagagaggtacgagcggtggctcctgtcaatgccacgactcaagagctcaggtgtgtcgtccgccatagctgcatcaaaaataattatcagaaccataataaatataaataacaacaattcaatgtgcaattacttaaacatatgagtaattaatgatagtataaacttcgatgtcgcatgctacagagattataacaacagtacaatgctatttcacattggtcacaacacaacaacatattgtttaacgattacaacaaaattcattgaaattacaacatatgagtacttggtacgagaacattaggatacaatactcaataattcgcaatacatgactactaatttcatcacattacatgatataaatacttagtctcagtacttattaggatacaatactgaatagttcgcaatacatgactactaatttcatcacattacatgactgaaatacttagtctcagtactaattaggatacaatagtgctcgagttcatggcctaacaatattagaccatcgcatcgcctgccgcacgaggacgcctgggacgtgctcgtctggttgttgttccttccccagctggtcttcttccatcacttgcttctccagatggaccaacatcctcgacgcttggaccctgtgcagtcttcgggcatttcttgtaagtatggccgcgttggtcacacttgctgcagcgtagagtcctcccaccagcttccaactcgtccatgtcatttttgatgcgtctagtctgacgccgcccctttttcacccttaacttcgatggatcaggaatgaaaaaaacttgggacctctgagttgtgtaagatcctgagatcccgaacccatatatctcctcactccaagtatgaaagattgcttccttcctgaaataaggtgacacgtacacatcgggacgtatgccgcaatcacctgctgctgcaagtacgtgagagcaaggcagatgtcgaagcttaggcttcatacaggtgcaactgcatcccccatcagccttcaatacacattcgtgcacaacatgcttacgcatgattccatgcctgctcctatcaacacacattatttcataccgatgaacttttgttccttgaggcacaactctatgcctctgtgcctttgcaattttatcttccatgtacttagtcactacgctgccaaatattatcttgttatctaccattgagggaccaattttcttgtatcgatccctgaagtaggcctgtgtgccgtgaaggataaattcgactataccaaccaacggtagtccttgcactcctcgcattacccagttgtaaacctcggctagattagttgtcattatgccatatcgagaactattggtgtcgaacaatagagaccacttctcctttggttcattctcaatccaatgactgaactttcggatagatgatcctgacctccttctcattgtgggtgggtcatcatgtagtgcaccaagaggtactggaggctcgtcaccttcagcttgtggtcgacgagattgctcgtcagtttgcttgcttgtcaactcatccaacttattccacaactcattaaattttttctcttgattctgtgaacagagcctcttaaaaagatccataagatgcttgttcttgaattgcttgtaaaaatagcacccatgtgacgcatgcaccaccgactccgaacatcgggccacttagctggaattcccttctcctcccaaccattctgcaagtag

SEQ ID NO: 27291 - DNA, 1131 bp, Oryza sativa
ggccgtgtatttggccacctttccggccagagccaactcggcctgctgtttgttgccccagaggaggacaacatggagacgatcgtcgcgcaagatgcgcttgtaatcacgtggaactcgtcgccagacaccgcagatcttgcccgtggcattctgatagacactgagagtgcccgccaaggtggtctccagttgatgctcctccaggattacacccgcatcatcaacgaattgaatggcacgcggacgaccgattcgcgatgaggtgtagaaggagtagtatagattcttcttgtggaacaggaaacgggcggtggccaccacattctgcggattgtaggtggtgtacatggacttcatttcctcacccttgaggaaataggaggtgcggcccgttagcaacgcagcgtaatctataaatagggatcaaatgaaaggtggagataatccaggtgttagataaatacaatagttctcttgttaattaaatgtaggagctggtgaatgggattacaatttcccgcaggatttggcggattctattgggatctgggtgggtgtccggtacttttgtacttacgtttcatgttgcgctcttcctcttcattgggcacgggcacatccaaggctacatccgtatctgaaagatggagggaatacaaatagagaataagatgatgctgggcgataaggtacgaccttaaatggaatttagatagcaacaaatgcttcaaagcaaccgaaccgccgccagccattcaccatccatccagccagccatccagccagccatccagccagccaaccaactatccatccacaatttgtggacacaattccggcattcaaccaaaattccagttgaatgggtgaatggtgaatggctgaatggacgaatgccaggggatcatcatgaatggcaatgcaactatcaggtagagatcccacctccgaactaagaccttccatttccacctctcgcttccacccaggtggcattcattaatcgtgcataaattgagggcaggtagaaggtagagtttctcgaacgggaagtctaacctacatctaactagggaagtgctttgtatttgaggatgtgcggactctggggttctgaattcatgggta

SEQ ID NO: 27292 - DNA, 12813 bp, Oryza sativa
aaaaagaatattcatgcccatcgcatctgctataccttgatccaacccgtgtgcaattcggataacacaagcagctacaaaatcacaccgttttggtttttggaaccagtcgtgggtagtctgtaactctgacttaagcattttggctagaaagtgagagcgcttggcaatggctagagacggggcactgggagcaaccaagcttcaccttgctgcagagtgtttctcctagttccatcattgtttggttgaagtctcctggccttgaaaggttaacaggttgaccagtgagtcccttgtgatcaggaaaacaatgttcaaaagccatgtggaagttttcagatcagtataaagtttccaattcaaaaatatttgtatgaaccgtttcaaaaaaaaaaagctgtatgagaaaaatgacatgattagggcttgcacttggatggggatcagggaactgcaaattgagcttgtaaattgtattgcaaattggctatatgaacatgtgcattttgactgaagttgtatacaggtagttcagtacaatgccaatgatgtgcaaaataatgataatgtaatacaatgtatcaccaaactcagtgctattttagtacaagtcacagcagtaggacggaagaccttggcctggcagactggtggatgcaggtcagactgttttcggaagtgctacaggaccaacttcgaccgcacttgcttgctgatttgctggcaaatatggaaggaacacaatgcacgggtatttgatcaacaatccagaagccctgaccagctagtggaagctataaaagaagagattgtggtgtggaaagaagctggctgtttcacggtatataactcttaattttccagctgcggtgttgtagttgttcctagcttgtgggggctgcggctttgccacagcaccaattcgacagcctactgtcgttataagcaagaaactctttgtaactctattttttctcctatcttaataaaatttggtcgccggttcctttggtcgacccggcaaaaaaagtcaagtcacagcacatagggatatgtatctgcacagatttatcagtgatcaacaaagatagttgcttaccaaatctcttcactgttgagccttggattcttttgggttatcgggaataacgtatagcctgctgataacttgaacaatatttccatccccaacagggacaacctacattagcaagaagttgcgtaatcatgtgaggatgtaaactcttcactgctgagattcttttgggttatcgggaataacgtgtagcctgctgataacttgaacaatatttccatccccaacagggacaacctacattagcaagaagttgcgtaatcatgtgaggatgtaaagtatcttagccatggtgatttgaataggatataaattgtgcttctgctgtgcaagggaactcgcattttcaacaatttgctttgctccctactttgcaacaaaaaaggtaaatcttattaagctacaaagatattcatcccaatatgcatgccgaaaatattgctttgctccctaccaacatttctattagctgtctctcaattcatctttcttgtgcattgattctgtgtccacttcactaaaatacgagcctaactttttttgctgctgccacaataacaacagattctggggatgcaaatcaattgctacatgcccatagacaaacttgataagtccaatgagctaaagaaaacacaccatctgatgagcacgtaagaatgtaatatccaatgttagcaacaagaaccaatatggccccaactacaacacaaacagtaatactatactactgccaatattcccaaaataccatactactgccaatggtaacaaagtgcactgaagagtagagcttacaacactccagccttccaggtaaggtaggtctcccaaagaggttggcaatgcaccagtcaattgattgattgtctcaaggtgactgcagttcagaggaaagcatcctaaggagtaaacaagaagaataaaatttccaaagtatacaaaataatgggagcacacatatactgtaaatcacagcagtaccgcacccagtgaaatcaggattttgaccagataatgagctaccatcagtacttctgaatttgaaaaaaaacaattatgtagatcagataaaatccaactattagcagaggagaggaaataattaacattctgagcttaaattttacaagccccgatagcctcattaatttcctttaatgttcttccctaataatatgctggaaaaaataatccttagatttcaaatacttcaaatgttgaccagaaaaccacattaagagaaggcagatgacatgaccattatacattgaaagtatctggggtcttgcctctgaactgcattcacccaagaccatcatgctcgtaagcaaaggtcaccaccctctttcacccaacccgattcagagtaccgtgagaccaagatggacatggtgcttgctgttaatatttaccacaaaacagaattagaagagagcaggtgaattttcttttcatctattctaaaacacacagacatacaattgccttaccatcttgtattggtagatctccatggaattcaagatagagataggtcgatcagacgaatcatttgtcctcttgaatccaaaccaaaaaaagatggaagtggacatggaacattcgttcattaagcaagaccttccctgagcattctcctgtacatcaacagttggtttactgaattttgtcttgcctgaaatggctagacattcaatatttgcaaaatatgaaactgcccatgcatttcctgggaaatcttccaaataaatatggtaggtagagcacccattttaccaactacagcagtttgcatgaccgaccttttcagatgctactttgtagacactgcaaataggaattttgtagttgatattcattgtccctagagcaacatcgagaaggtaatttgctcgtgacactaaatcaggcttttatattccatcaaatggagtattggatacctgagcaataataaaggaacagaggaggcacaacccttcagctagttgtttacatcaaatgttcttttcttaaaaagtgctatgtgtgttgcagcatgtaataccaattgaagtggatacaaagatcaagcttgttaagcacacattactgtagttcagctacctctctaagacgaccttttcatcacagtagcatgtgcagtcaggtattcctttaacgcaaaattatatatattattgatgttaagttttacaaatgaacaacattttgtaatctactaatattatgggtttctaaacaacttatttcatccaaatgttttgaacccatttaaagctattgacaacgaaagtactaacacaatgctatgcagtagtgcatacctgactgacacattgctttatgcaccaaactttgtgactggacggtccaaaagcccctcctcctcaacaacaccctcaggtaggccagcggagcatcttcttctgtttaatattcaaaatcaactacttttcaaggaaaatatacatactaatgtgaaattttaacacgtattttatgtgcattgtgctcacaagcagttgtattactaatccaaatgagaacattggaagtttgaaatgcctatgatagtatgaatgtatgatgtcaagtaaactgacctctccaaaagcctccatttttaaaataatctttactgattcagtatttatccctgatctacccactgaaatgacttattccttctgcagaaatttagaatgacacactatcaacacaatatgtaattgaagacgattaagttcacacattcggattttcattgcagacatactctatgtaagatgcaccctctaaagacgacaacttgctagtgtcaaactcaattatgtcttcagtatttggttctaaaggaaagcaggggagtcctccacaggctcaatggttgaggtggaaacagcacctcaataggttcaatctcttcgatagtaccccataccccgttcctcagacaaatcatagaactcatttggtataccatttctagcaccatcacaacttttagtacgaactgctgtgtagtagctctgatttccagccaacagaaaaacaacacctggcatttcttgattacttctattttcagattttttttttgagtacgttataacactttctgaaaaggattgcttcagaaacaaacattagcacctcaataccaggaaatgaagagaccaaaatgttgagagtgccattccacaggaagattggaagcagcaaagaaattggttggcggctgctttgttagatgggatctaccatttagatcctcaagctggttagatctgggaggttttacaactgatcaaatatttccacaaaagcaccttgctggatttctttgagcagtatcaacatgtaatgcaggagcctttcccttaaagttagtcaaacaatgaggtatttaggccttcaaaaaggaacattctcatgaaaaatgagaaactcacagaaagaagggaagaatcaaacaagaaatacaaagttgacatattgaaaaagttcataactagaagtgttaaaagctaaattttctccaagcatgagaaataaaatatttacaaactcacatacatttttaccctctaataatttccccatcacctcaggttccacatatgcaattacacatgattattaccttataagttagtgactagcatcttccatatgaatcaggtgccacaattttttccatgcatttttagttaataatttgcaaagattgcttagatgtaaataagaacttaacatggaacagaaatatattaatacttcaaagtatttgaaaaataacatcttatttttcatgctatacgtaaacaagaaacagcatcaatgactatgtacaaaagagcataacagattacctgagcgaaaattccaactggaggtgaagggattccaagtgatggtgacttagcagacattggtgtagggacaacaacagaactgaaggtatggccaagattgttacgccctgcttgcagtcaaaggattcaccgtcgagccgccagaacagtggggatgaattcttttcattatcccgacaacgtttcattagttactgtaactgtctatttaaacagatcaatatcctcacaaaaactgtccccgcacagcatacacatgacattcacatcactagacgatgccttcttcaggatatgcatttccatttcccaccttcccatcgtctcctacctctagctccaggccttgattcttccacctgtaacacaccctgtggtgtgacattgccacccccttgaggcgatgacaaaaaacaagcttacatatcatggtaatcttccaagtagcacaagccgatggcatttctccccattgcaccaacacttgagtgtgaacagtgttaccctttttaacaagacagcaattcagaattgcagatggttccagttctctaatgtgctgttgaaatggagagggcaattgagaaaagatcggaacatgagctggcacaaactgcttgagctgagagacatgaaagacagggtggataaatgaatctccaggaagcctgcaatttgtatgccacttccccaatgcgaaacaagatggaaaaggaccaaaatacttaaaagctaatttgggtaaagctgaagcaactgatttctgatcataggttagaacttcaaatacacttgatctcccacttgaaacaccagcataatgtttcattctatttttggccttagacagctgctgctgaagcatgtcagaaaataattgatgatcttgcaacaaagtggatgcctcgtcatcaccagcacctccagtaaccagctcagaaggaaggaaatggcatacaggatcagtaccgtacagagccttgtgaggagtacagaacaatgaagtatgatagcaggtgttataccagaactgaaccaatgataaccaagaacaccactgagaaggagaagctaatgtcgcatagcagattcgcaacttcaaggtagcctgaaccccagaacatcccacaaaagcagaagaatgataagctgtgatttgactcagtctgcaatgcagaattttcaacaacgcatactttgaccttatgtttgatgagcccatccaccaaagtaaacccttgagaattagtgcctgatgctgccaattcggtgagaagcttctgagcagaaggatcaacaaccctcctactgctccttcctgaccccccccccccccctctccctttttttctcttttcccttaatcctctgcctcttccctgttcgcttgttcattgttctcacgtcgaatgtcttcaagctggccaaactttactagggaagttggtgcaggtgttcgtatggcgttctttacagtgatgccaaatgagactagatgagaaaccaagtgatcacattcttgtttctgcatctgcaaaatgagcgatagaaaaacacctataatttcaatacaccatccatgatgcatgcatgccgttcgaatgatgagagaaaacggagatcttacttgatctcccccttgcacatatcgaacaaaaaaatctggtgctgttgggggtcctccaagcccacctcctaagagaccccgtgctcgctttgaacacatctctgcagttgcagcagaagtacgcttgtgtccacgtccatgtaatgctggctcctgaggtaatcttatgtttgcatcacccaccccggggtcaactggagaccatttcatctctctcggagggggtgcgagactctcatgctcaaacaatcctccattccaagcatcaacatgaaggtaataaaatacctgaatcagatcatccaatgtaaccaatacatcaatgccacagtcatgtggatggtgtgttaaattcgtcaaggaccccatcacttgagcactaattgaactccagttcttgataaaactattgacatagtctctacccaactccggtgtgatcacctcaaggattgcatggcaatgacgcctatggatttcacgagatttggattccataatcagcacaacaaaaagaccaatccacactggcaagtcctttgggtcctgacacttgcttggaacaaatgtacacaatccgtggaagcattttctaatgaattgcaaattaacagtagtgtttcctgtcccattgggcgatatggtatggtgatttcctttgaatctgagaaggtggctgtggacactatccatataaaggcccatcaaatcttcaaattccatttggaaaaatccatttgtagtacaaaaaccaattagccatgccatcctggctaatactacgagtatgacatagcgaccttcatgttgcaggacatagtaaaatgtcccatccaaaggggtagtgtatataacttggtccccaaaacgtatgcggaagggtgaattcatgagaagccaatattgaaaatgagcctggcatctgttgaaattttccaagaactcttcctcagtaccttcaagacgtaatgtcactgtgttctgtgagcaaaaagaagaaagtttaaattaatgccatagaaactataaagagaaacataaattagtgaataaatccaaaatataggaaaacctcatattaatgagacaaaagaaaaaaactgtccaatctaatttcattctagaggtataacagaccaaagaggcaaagaacacttgggactacatgatccaaagaactctcctatacagtaaatcataaaaaaccaattcttgataaaacttactcaaatgaacatactaattgaaagtttagaggctcccaaaagctcacactgccggaccacaaacactggcaacagcggcatcctatcttacccccagtggcagacatcgcacaccccatgaccgctcctagtaccaatactgcacactgcctacaaggggtcgatgagacaagtccccttcccgttgttatgacccaagctcgtgagagatcaaatcacatgaactggtgacagtgttatgggtagaatttgggagaatttgggggagaaaacaaagtaggtcaaggggaacaggggaacacaggagagaagagaacacaggaattgtactcctgaactcctcactggaatcaaaaactttcacatcaccataatatccttgtaattatcaaagccaagagtatgcaattattcaagccattaaatctcatcaagtgttcctctgcatctagtttatgtgcattgccatccacaagcacacacgatatttcttaaaacacttgatctgctgcctctgcaaacaatgaaactccaccgacatgagtgagcacgatgtcctttctcctcagcatggaggatgcaactgatcttcaactacacttattggacttgaggtatagctaataagtgaagtgtctgtaggactgtagctgcagagcctgtcgaggtggcaagtccaatgtccaggattcaacatcaaacacatgggggaatcgctagcttctggttgctggagcacgggctgcacatacttgacatctaacaagcaacaccatctaaccctggagttcatgttgagctcatgctgcgtcttggcatggcgtacttgagtgagacgacagcctccacataagtaaccgcctcaattgcactcatcacccgctctgacaatacggaacaaatacttcgtgaagcacctctgtggtcactggacagagcacatggctcacggtgacgcgaacaacacttgctgtggttagctccttgtttcttggcatttcatcaaacatcttctgggcatcaacactggaggtcacctctggatttgaaacttgaacacgaggaatccgcgcgaggtagaaggccccgcgagaaaggtggtagatcacccagagccatggtcccaagcttggcccccaaactcatcaagcttcgcccagaatcaaaatgccaccacacatggcttccttcctctgttcccctgctgctccagtgagtccaatggcgatggtctccgtcaaccgccgccttcccggcttcccgctggttgcgctcgcgccgccgccgccgccctcagcgccaccgtgtggtgctctctctcgctcgccgcccgcgcgccactgccatgcccctgcggccatgcgcaaccttagattcctcgtcagctgggctgggctgggccgggagctatcggctgacgcccaagaacaaataacccacgccttcccgcccttgatgccgcctcgcccgccattggtgctcctccccggctgcgcgccgcggcgccggtggcggccgccggcgaccaaacgacgacgggcagcggcggtcgatcccaatgcacgcaaagatgatcggggaattcccgcaacggcgcgacatttgcttataccgcttccgatccatctcaacaacaacaaatcgatcatgaaagaaaccctagcaaaaccccccatccgacaaggcaaaggaagaagaagaagaagaagaagaagagcaaatccaacaaggcaagaacaagaaaaaatccaagaagaacaaatctcttctcagaaaaaaagaaaaaaaaaacaagaagaagaacgaatccaagaaggcaagaagaagggaagaaccgatcgatcgagcaagcgatcgatactcacccgggggcgtgggggaggatgaaccgccgctagattcttcttcttcttctccctcttcggcgccattgccggccaagaagctttggctctctcctctgcctccggcggccggcgggttagttaggtggattaattaattatttgccacttttacggatggtgataaatgatttgccattggacccacatgtcatagacacatgagggcccacatgtcatagacagcgagtggcaaataattaattgccacatcttaaaagtggcctagagttaaatgtcccttattaggtgaccgttatgctgagctggcagaaatgctgactcaaatatctaatttcttgtttttttccctaagtgcaaataatatgattggtttccaacctgccaacacatattaatatggagtattttgttacccttgtggaaaatagagacgtgtaaaaaaaatagctcgtaccaagcacaggcaattatcaatttaattcattgacgcatcatgttttactttttttttcggctgaatttttactcctatttggtttgcaaatgattgtggctgcccctcaatttcatattgataaaaaggcagacactctaaatatgcaaattaaatgggctgagaaatggagtaaataaattagatgatgagcttgccgcaatgctgcagtatatctgtatatacacagaatatacagtgctctgctatgtgaacccgccacctgaactcctgaagtactgagcattttttatcaaaactccaatcaatttcttttacaaaaagaaaaggttatatctcccaactttccgaattcctggtgctatgaggttcaaaatcattagctcaacaacacatatcgtcaggtgaattccattgcccattgtttatgaacaacaaacagcagcaaaaacacaccatggtttggcttttggaaccactaagtgcgtaacattgactaaagcattaattttggctggaaataacaagcggctgcattatgttgctcctagtttcaccattgctgtggttgagatctcctggccttcaagagtcgaaccaattgaccagtggatctccctgtgatcaaggaaacaatgttcaaatgccatgtcataaacggacaaagctgaaatttcagagttttccacagattctctggggacaacaccagctttgccagacagggaacagggccaaaacaccggccaccaaccaacttaactgctgcaactctaacagggatctcaggaagagaaacaaaaacaaaacgagtttaggttctggcaaagaacagcaaggctccaaaaccctgctcagcctaaaccagggtaacttctaggatcttcaccgccatcgactccgcttgagcttcttctcctttgcgcatcgacctactccactgccaaaggaagaaaatcacacgaaaaacaagggttagaggtgtggacaagattttgttcgctgcacccagcagctgagcagcataagacccttttcattcattttctggccaggcatcttctatctcagaacaaagaatgcatctctcagatccttcccaattcttcttaaccagataggaggtggattgaatcttatctttccaagcaagccatacaaagtgctttaccttctggggcattggctcttgccaaatatctagtcctctcatatctttcaccccatgaaagtttagcattttgtagcaagactttgtagaaaagcatttgttcttctcaaaaggccaaagcatcatgtcttcctcatcagtaagagatttcagccattcgttgcccaaggttttcccactccacctccaccgggccaaaagaccttttgaaagaaatcccctcaggccaagaggccagagcatcaggcaccagaatctcttgttggttacagatttgttttcaaaggacaggacccagtccaaacatctgaccagaaagagatatgagttccttatcccaatttccattcagagttgttttggacccagaatttaattgagtgcaagcttctacaaaattgtgaccctccctccttttcagattggaaaaaccccttgatctgtagatattttcttcttaacagctctatacaggggctcatgtcccctgattccagcttccaaatccatttggataacagagcgtgttatacttcattgtttctgtgaaccccatgcccccaaactctttatgactgcataaatggtcccatttcatcatgtattttttttcttggagccattacctgcccattaaaacctgctcctaactgtgttgatcttgcgatgaatgcattctggcaaaagatagaaacccattgtataggagggaatggatgataggcaagaattgataaggatatctctccccccagatgagaaatttgacttccatgtacccaacctcttttctaacttttttttgacgagaacatcttttctaacttatgtggtaggaattttaactcagagatccctaccttttgtggactgatgggtaaaactagatacttcattgggaagaacctgcagggcagttgagcatgttagcaactctgttcaactcattttactccaaccccacagcaaacaccttgcctttatcatagttaatctttagaccagacatgtcctcaaagcagtaaagaaggaacttggtcacagcaaggtatgggataaaaatcactgtatcatctgcatttgtaggtgagtcaatcccccagggaagaggtgtgggaccagccctgttaggatattggcgcttttggctgcatcaaatagctggatcaacgcatcactcacataattgaagagcagcggagagataggatcctcctgcctgaggcctctgtaagtgctgaaaaaaattagatctctacccatttatgttgatacagacttttccaccttctatacagcttttcacccagtgaatccatttttcatgaaaatgctctgtccaacaccccataacgaatccccatctcactctgtcaagccttctcaaaatctagtttcagaatcactgtcaaacaccccataaacgaatccccatctcactctgtcataagccttctcaaaatctagtttcagaatcacgcctcttt

SEQ ID NO: 27293 - DNA, 509 bp, Oryza sativa
tgacgacgcttgggttctgtttgatgccatgccagagaggaatgttgtttcttggaatgccatgatctctgggtatgcacgaaaccacaggattgaggaagcacttgatttgttcacgaagatgcctattagggatgttgcttcttggaacattatgatcactggctttatccagaacaaagacttgaagagtgcacggcaactttttgatgagatgcctaaaaggaatgtgatcacttggaccaccatgatgaatggttacttacaatgcatgcagagtgaaatggcactaaaattatttactgtatgcttgttcaaggaatccaaccaaatcaagtgacatttctaggttctcttgatgcgtgcagcaaccttgctgcactctgtgaagggcagcaggttcatcagatgatatgcaaaacaccatctcagtttgatacttttgtggaatccactctaatgaacttatatgccaagtgtggtgaaattaggctggcaagaaatgtgtt

SEQ ID NO: 27294 - DNA, 1916 bp, Oryza sativa
atatatatatatatatatatatatatatatatatatatatatacatgcatgtatagtacaattcatttgctcgctagctatagctacgacttcgacgctggcgttacgtcagaagaggaaggaccgacgttatgaattgtcgatccgtcgtagtagaattcaccatcgggattaaggacttcttcgttgatgaaccccatcagttgttcttgaacagccgtgataaaatccttgtgtgggagattttccctcatgtgaatacgctatcattcgaaaaataatgacatatcaatatatgaaattaataaacaacttaacaaatcgatacgcaatgaaattttgaatggtttatgtatacgtacatcgagctctcgtgtggtgtatatttggtttgataggcagtggtcatactcgcatacgtagtagccgcataagttagtaccctggtcctgcttcgcacactacatgagaaacgatgagagatttaatatactctttatattaactgtaattagagattcaattcaatataattttggatcatgcatgtactcactggaaaataaaacctccgtccaagtttttctttccaagtcccgtggaccaattgacggaaccgatcccaagccctacatgtgcagttgctagctatgattaattaattattacccgagatcaacataatagcaacagagtcccgtgactttggaatagatggcattatattacctgtctatcagttggaagaccttgtcaaaaaccttctcctctttattcattgagtcgtacacagtgacttgcatgcgtccaagtcgaaaaagaacaggaccaagtggaatctggaatatgcgtgagatgagataaatatcagaatgtacatgttatatgtatgggaatgaaatttgttcgaacgacaataaaaactcactctgtgttgtacggcaatagtatgaatgtcttgaaatgctgctgcgttaggagatggacgagattgtcctctgtatctttctcgtacttgtcaatcattttagtgttaatttttcgagggtcgatgaacccagtatcgtaaaccccccgccgtcgggccctttgaatctccattctacaacaataaaaggaaattattattgcttacatatatgccaggagctaattattgaacgaaacaaatcgaactcaaagatacttacaaaatccatgcgcccagaagagagacgtcgagggcgtccagatggtacagatcgaagacatccttgaaatggatccatagaacatcttctccttgcaagaagtcggggtttctgatcctcgctccgaacatctctctacccttggcgctcatttccatgtaccgttcatggaatttgtatatttgtgtcggtagggactgcagctgctcaggcctgacaagtggtttaccgagttcaaacttgtatgccacttccgccttcgggattggtgcgcctccaaccaactgagccacagttaaaccggtgtccgaaataaaatccgttatgccaaagtcttcgccggtcaccaatggctcgaccacttggtttggttgttctccaagctgaggaactggtttggacttcttgtaataggctttcctaagtgttcggtcatagtccgatagctttaaggcctccttgtttgtggtggatattcccttgaagaaattcttcatgctcgggtcaataggtatcttcttttcaggactccgaggcttgagttgcctcttcacttctcctgccacataagcatcaagctcctcttgactgcaatcgtacggcggctccttgtttttggtggtgtcaactttggccttcttcgctgcccttgtgctggcaggaggtggagcttggcgagaccttgtcttgagaggtgcaggcggacacggtggaggtggaggtgga

SEQ ID NO: 27295 - DNA, 2505 bp, Oryza sativa
ggactgtagtggtaagtccctgaaatgtccgttggaatggccattcccgacgccaccttcacgtgatgagaggttatctattagtaatcaacctaagcagcaacgtgcggaacgtacaagttaagaatcatatattacatcgagcataccttgattgataagttcttgaagggaatatgcagctcacatggtgtccgttgcatgatctcatcaacagggcaggtggtttcgtcctgggtttgcatggcgtccatgcactgtgatcctacctgccccgttgaggcgcagctgctacgattgcctgatgggctgaccattggaggaggtatgtgcagctgggatcgtgtgactgatgtgctgccatgcgttcatccaccttccgggccacctcctcttgcatgctgagctcgtagctcgataccctatactcaagatatgcaatcttcgcctcggtatctctcttgcttctcatccgactcctgtacgtgtggatgtcctccttgaatccaatcttccagggaatcacgcctttccctcgtgttcgtcctgaatgctcgggagtctgtagggcgagtgacagctcgtccttctctctgtcgggtcagaaactgccctgagaagaggcttccactgcatccgttagtcgactggcagcctcgcgtatctgattgctgaagaccagggagccatcaactgggttaagcattccaccgtgagcatagtaccagaacttcgattgatccggccatttagcggtggccggttcgatacccctctcaatcattcttgcctccatctcctcccacttcggtattgcgatgctatagccacctgaccccaagtggtgatgatacttcttcttggcagcgttttccttgtttttaccatcatcgcttgcccttgttgtcctgtcttgtaagcaaccaactcgtcccaatgatcccttagctttgagaatacgtcgaagttcggtgttagtcccttcaggatgtatttcttgtacagatctcccttgaagctctggaactgttctaccattttcttaagagtccactgtttcactatgttctccgtacccacagggagcgtgaacgtctcgagcattgtggtccacagcatctctttctctgattccgggacaaagctttcattatccccgcgtgctctagttctgcgccagtacaccttgctgacaggcacgttatctctcacaacccaaccgctgtggcgtacaaaattcttggctgcttctaccggggcactaggtcagccttctgcgtccacctcagttatgatgtgccgaccctctatcttcttcgcggcacctcgttgtccgcgtgccctcttctgtccagcggagggatgacttccactagcctcctcctcgttcccctccgcatccctctccacgttcccctcctcgttcccctccgcatccctctccacgttcccctcctcgttcccctctgcatccctctccacgttcccctcctcgttcaagtactggtttggatcctcgttcccctcttttttgttccagtactggctgcttccctctgcgattgtatcgtacagtatctgttcgtcatcgtgatcagccatctattcatagaagaaatatttgctaagcgtaatattaaaactctactaatcttgtattaaaactcaaataatcatatatgctaagtctaagtgtcgtgtattataaccctagataatcatatatgctaagtctaattaagtttcgaatattacatctctaataatcttatattaaatctctaacaatctctaacaatcaaatatgctaagtctaattaagttccgtatattaaacctctaataatcttatattaaatctctaacaatctctaacacacacatatgctaagtctaattaagtttcatatattaaacctctaataatcttatattaaatctctaacaatctctaacactcacatatgctaagtctaattaagttttgtcacgtcttgataaattcattccgaaataaaaattattttctaaaaggaataatagaattaattaaaattcgagaagaaattggcaatcactaaaatacgtacaagaaaaatttgaatgtggtccggagaatttttgttaaattctccgtggtctaacaagtgccctcaaattttcttgaattttcagagcaccggaaataattattaagcaacaaaaacaattatcaaagtttactaaaaagaaaaactaaaaataaatcctccttcctcctttgggccaagcccagcccaaagtctccctctcctccctctctttccctcctctcccgggcctctcctcctcctcccggcccacctcttccctgcccctcccgggccagctccctcccctcccctctctctcccgggcctcccctcctccactcctcctaggccgggcgcccagcccaagccggtcccaaaccaagccgagccgagccagccgtgcacacgcgcgccgtgcgtgcgctgaccgcgc

SEQ ID NO: 27296 - DNA, 3571 bp, Oryza sativa
tccgacctcccccgtggctggctccctctcctctcctataaaatggaatccccatcctccgttctatcgttttagcctcatcccgagcctccccgtggtcgtatcacctctccccgccgtcgcccttctctttcccccgcgccggccgcctccagccgcctctccctcctcgcccgagcgccgtccggccgtgccgtcacctcctccagcgtcgcagccgcctcctctccaccggcctgccctccgtttcgcgcggtgctccggaggcgcgttcccgctgtcgtccagtggcgttgccgccactgtaccacctccagccgcccctgccgcgtcgctcaggtgcgggccggccgcgccgtctcctccttcggcgtcgccgcgtcgacctccaccccggcctgctctctgattcgtccggagaccgccgtcgcccgcgccggcctctccatcctcttcgtcgccggcgtcccttcggtcgccccttcctcctccccggctcgtcggctcgctgcgccaccaccacccccggcattgcagcggcaaggtcgccctcggcctcgcctcccctttgtccaaacccctccgcgctccatcgtcgtcgtatcgttcgttctcgtcgtcgacgtcccgtcgatcgcccggctcgtcatctggctgcgctgccaccgtcgtgggcatcgctgcggcgtgtcccacgccgtcctcacctccgtgcagctactgccggctgccctcgtcgcctccccgtcggtcgtcgtcttcctccttcctcctcgtcgtggcgttcgtccctccgtcaagccgatcgcgttcgccgcccgcgtttcgtcaagtgtgcagcagccccgtcgtcgtcttcgtcctcggctccgcgtcatcaagccttgtgccagccgcgtctcgccttcgtccaaggatcgccgccgaagtcgttccctcgccgttcgcctccgtcgtccccgagctgtctccaccgcgcccgttcgttgttgtcgttcccacgcctcatcgcgtggtggtaaggatctctctcctttcgctgccccgtcctcgtcctttcggtgtcgcccgtgcccgttgtgcggttgtcgaccccggtgcccgtgtaccggtgtcggtaatcgttcgtgggtgcgtgtggtgaccgtgtttgtgtgcccgctcggtagccgcgtggtttccacgtgtgcagcccgcgtggtgtctagtggagtccgtttgtcggccactcgcctcggttggcacacggggtccgcttccgtcgacccgtgggccgtctctgtgtactcggtctactggggtcccttaggttgacatgtggggtccgcatgtcaacagcgcagccttcctgtcttttccaagctagcgcttgcacatgttttatagttgcaaaacctaattataataatccgcaaatctccatataacagcattaaacttcggatgaccatgtcttggtcatacgagctccgaatcgatccgttcaagtctcctaatgtttgttataatctaaagaaccgtgtgctttctttttatgtattgttatttcttctttataggcttgtagctttgcttgtgtgcttcgcgtagcttctgtcgttccggaggttccagaagcgtggttcgcggtcgtccccgaaggttcggaaggccgttctctctgagcaaggcaagtcacatcatccttgagcatattgaatcccagtttataaaattattttgatttaaattaatgcattaccgctttatttaaattcccgcgttatcactgttttatttagccatgcctatttacctttgttaagatattattattgctattgttattattatcttgttcaccctagaataaacaaaaccccaactagtgggtactctattcatggttccactagtatgaatttaggtagatgcttcgctgattaataggacaacattaggtggtttttataactttagactttgggaatattcatatctcttggatactatggaatggttggcttatggtggaattggacatacccctttcttcctctttcaaaacccctaaaacctgttgtccggtggggtttgggtgcatgccagttgtgggaagtagcaccccggccaatataaggattaagctcgggcctctgttgcaaagcactaccgtacttccacatgtctagtgggtaaggcttcgtttgtggctcagtctggttataaacaaaagtacacggatggagatggacgaagtcgggggtcgatggacatctctaggacaaatgaaggctacacgagctgcggcccggtagtcgagatgtcatggcacagggccggtgtcctgctgctaggggctcagtcctccctacctgtctcggggtttccggccgtaggtggggttgggttggtactcttgtctatggttaggatgggttggaaactatgtcatgtcttccgtccatatgccgtggtggcatgtggcacgtggttgcacgtgaggaagacgtgtcttgtgggtaaagatgtacacctctgatcagagtaaaacctattcgaatagccgcaccctcggttatgggcaagcctagcaatgtacccaagttagtgtttttaattcttaaaacctgcttaacaactaaaatgtggaatggttggcctgggttggcttgggacgagctgggacccagggtcaggttgccagttcggtctgaatcatcgtaggccttgggttacggcaggttcgtgtgggtccacggccttgattaataatactgtgtagctctaggatcgtctttataaaatagctttgggcaactaaatgacttttaaatgctgtttactgcaaaacttaacccctattattatctccttgtactcccttgcattaatcatgcaactcccggtgtgacttgctgagtacggtggttgtactcagtcttgctctatctttccccccttcagtaagggaagctttggagaagaagtcttaggtggagtcctggcttataccccagttgagcgcctatgaagatggagccgtaggcccgcaagtccgctgctgtttatttttgtttgtcaggcctgaagtgcctttgtaataatgtaaatattatcgatataataaagatgtgccttttgtatcatgtttgtttggtgtaccccggcttttcctggaacggggattaatacactagcgttcgggaaaaggtaattttctcggtcgcgacaagtttcgtatattaaacctctaataatcttatattaaatctctaacaatctctaacactcaaatatgctaattctaataatctaataatctttaacactcacatatgctaactctaataatctaataatcttatactagaaatctaccaatcttatattatatctctaacaatcacatctttacatcacctgcctgcgcgaattccttcgatggctagctaccacttcagcttgagggacgacgacgacgacgtcttctctgcaacatgcaaaaaaaatgtgttggtctaaacgcaaaggaatatataatgtatttcacgttttcaagtatatataatcatatatatatgctaatttc

SEQ ID NO: 27297 - DNA, 5021 bp, Oryza sativa
caaatttatataatcaacattgttattagatgaatagtattttctatctttgtgctcaaatattggttggatcatgttctattgacacatagacctaaaacaaatatttgacaagattgactaatattaacctggtggctgaaatgtgcaacatatgtagcatgtcaaacaagtgctgtttttactaattacgctcaagccagtacaacaaaaattcaggttgaacagttttctatgacaaaaatacactaccagatgactaggtgccctcttggtaagaaccacaaattctactttgaatattcagtcaagaagcatgtgaaatattccatgttggttggtgccaatttgacttggctgttcatttagcataataaattctggcagaactacagtggtataagcagcagttacttttttctttgctccaaagcagaagaattagagtagaatagttgcaggaggtgaatgagatgtgggcagggcttgggtactaccggagggcttgatttctgctggtgatgattagtaaatagattgatcatgaattcatggctgatcctgtgcgagatgacgtggatctgcaaggggaatgtttgttgcattctttgtaagaatttttcaacttttgcagttcctgtgcactgttcgatgttttgtctcaaagggagagttatatttagaatctgttttgtgttacagatgagggaattatgactattggttgcacaaattggtgaggtctgtggcattggagattacacagagggagccattgcctcgatagccttcaatgaggttgggctctacataatttatatcctattcagatcactatgggtatcctttacatatactcacatgattgtgcaactttcttgctaatgtgggatgtccctgttgtggatggaaatactattcgagttatcagtgggctctaggattcctggtaagcaactgtctttgttgatcactgataaagccttgtaaacatatctatgacattccacgactttttatatttatgacaaaatagctctggtgaatatcacacttcattgggctgtactcacaaggttctgtatggtactgatcctgtgtatcattttcttcctgctgagctggttactggaggtgttggtgattatgaggcatccactttgttgcaagatcatcaattgttttgtgacatgcttcagcagcagttgtctaaggcccaagtagaatgaagtagtatgttgatgagaaatgctccttggtgttttgagtgggagatcaagtgtattcgaagcttcaatcctatgatcagaaatcagttgcttctcggcttaacccaagttagctgttaagtagtttgatccttccccatcttggttcgcattggggaagtggcatacaaactgcaggtttcctaaagattcattgattcaccatgtttttcatgtctcgcagctcaagcagtttgtgctagatcatgtgttttttttttgctgggacagcttgtccatgaagtgtggcccgttttttttttgtccatggatgtcaatgccatgtgggccacatgccacgtaggcaccacgttaaccaaaactagcctccctagtgtattaggatctcttttgcactgtttttgcaagttggaggttaagatttgttgtattgcggttgagggatgcaaattaaatttgacggaatgataagggacataaagtgaacttattactccctcttgcctccactctcgccactgcctcctctcctctctccctgccgccgcaggggtatagcaggccaaacgggcggcccggcccagcacggcacggcacgccgacggcacggcccactagggcacggcccgttaggcacgactcctgtagcgggccgtgccgtgccggcccacgtgccaaggccacggcccaagcacggcccaagaaggtgctgggccgtgccgggccggcacggctactgtagtggcacgtgggcttgtagccggcccactagtacatgtggcccataaaaattgaaatttgaggggaaaaaaagaaaaaaggcagaaaaaacataatataaaggaaaaaatgataaatataggataaatgtgaggaaaatttaggaaatatatcataaaatatatggtacaaataggataaaatgtggaaaaaaaataaaaaatatgagaaatatatgggaaaaattagaaaatcgtaggaaaaataaatgggccggtgggccgtgccatgccggcacgctacagtaaacgtgccgtgccgtgccagcccacgggctgaggcatcggcccaaacacggcacgggataacgggccgtgccggcacggcccacaggctggcgtgccgtgccgggtctgggccggctacagtactgccgtgctcgggccggcccggcttggcacggcccatttggccaggtctacgcaggggtcagtggcggctgggctgatgtggcgtcggcggtggtgatgggtgggtggaggaggaggtgagatgagggcgttgggcatgggcggtgggtgctgcctcctccctcggtgagttttcaccagccacaccttctctacaagacactaacatgtggggcccgtgtgctggctcagctagtcaacggggtgaaccggtgaaagatgcccatcggacgaaactatctcccaaactgtttgaggagtgatttgcgacggctttgtgagttggagataagtaatacctgattttgcggttgtggcatgagcggagggacgtaaagtagacttattcctcttctaataaagtgctggcccatcaggcctttctaacagcccaagcccacacagccagactacacaccaaccgaagtctgaacttgaaactggccgattccgatcaaatgtcgattcagcacgaaaattaataaaaaggaaaagaaacaaagaagaggcgactcgatgcagttaaacctattcgattcgaatccgatggaaggcggcggcagcgattgccggcggccagcctccgacgatcacgaggggacggcggttgccagtctccctagctccaggaagaggaaggcggctaaggatttagaggaggaggaggaggatttgcagccggaggaggaggcgcgtccgccggcgccgccggcgaagggtcggtcgtgtctgccggcggcgtgccatgaggacggcatcatcccggcatttgtgatcccgggcagcaagcatcgcgacgggtccatctacaggacggatgcgcactactggcacggcctctaccacctcgacgataccagcgaaagtaagcaaagcatcaagcatctccaattccccccaattaatcccactactcctcatctgctctcaaagttttcatcaatttaacagttatctgttctccaccttttgattgataaatctgttctccattttatattacaagtcatttgactttttctttagtcaggcttctttgcgttttaacaagtttatagaaaagtttaccaaacatccaaaacaccaaattaatatcgtaaaatgttgcattgaatattttttgttaatatgtttgttttgtgttggaaatatcgttatattctttcataaacttggtcaaatttaaaaaaattgagtagaaaaaaagtcaaagcgatttataatatgatgaaactgaaacggagggaggagtatatactaatcactggttacttaatcgattcattccatcatcagctcgcctggaaccgatgacaccatcatattcagagcaggactgcaggccatgcgtcaccgattgccagtggcacattggttgctccatgatgcagatcttctccctcgagctagccgaaatctcaaatttcgccaccggagctgctggtgccggtgctattcagctgtatgggttcatggctgcgcgggatcttttggacccgctgcgaaactacgtcttcaaccgcaccagggacgatccgttcaccatccgcgacgtctcctatccgtttatacagatgactggccctaagaggggcatcacgatgaactcccgcgtgatgatcgagtacgacctgaggatcaagaggggagagaatgaacaagatgatctggtgctcatcgacggggctgccaccttcagcgagataacgaatttcataccgtacatttatcgcatccatggggattgcggcatggcggtggacataacgctagcacacttcatccttgcaattgaggcaacgttgcaagttcgaatatatgaactaaaggatggctgtggcagcctaaacttgactataacttgtcgtgttagtcatatgaccccacaaattaagctctttcaaggtcccattgataagctacgtgaccaaaataggtttgtggttgttgcaacactgaacactttgatgattacagagttcaagctaacacatcagcatggctcaatcagtcggagatttgagtccagggttgtaccacatggaagtatgtctcattgcgccaagtttgcggatttagccactataggtgtggagatcttttggtcaatcttacccacttcgctacaagaaggcttttgagccttctactttgttacattctatttattttcaggcaaaaaatcacctacctgtaaatagctaagagcaatgcaagttttttattaggatttgtgccatatatattgccatatgaaccagaaccaaccaaggcttcatgtgtatgtcaattgttgggcaaaccttgccatatgagcaaaaaatatttttttttctttcaattgattttgtggctgttgaatttgcacggagattgggatatcaaccacaacaagcacttttagcagtgattacgactccttccagggcaccagtaagttgatgatgtgatatacctaccttttttgttcttctctttgctttggatttcttgttctaacttcactcaatcagctaggaagaatatttatgcaaatttatattttcctgcctctaccctactccatattgctactagataatactatctccatattttaatg

SEQ ID NO: 27298 - DNA, 6465 bp, Oryza sativa
agtgggaggggatggatctcacctagcatgctccgctagcgcccctcaccccacgcttggtggttgtgagaggaagggggagaaagagagatcgattcatggatatcctgtctctccatccctccacaatcttggttctcactctcacagtagagcggaggaggaggtgaggatgagaaaggaaagaagagtcgagccgatagctgagtaggtcgtgccgtgccaggctggcatgtcatgccgaggaagaggccgaggatgggcctggccatcggtcagagggcccttttgactaactatagtctataggtgagcacacgtgcccgtaatgaaactcgtccatccctaggctgcaggatccgaccgatttagcctgagctgcatatccggattctacactgaaaatatttcttaggtgatgatcatatctcacactaaccctttaaccaaacactctaaaaatagtggcggtcatatcatattcaggtatatcccatcaagtcatcaaccaaacaaaccttatgtttatcaactcagtagttatatgtgcacaggatatgctactttataatgacgttaaatttattaacccttcttttaaaatagtgagtccataaatttattataatgacacatgacggtataagaacgttcatataaaaaattaatgaacttttagtatataatagatctcacattaaactagagggtacgataaatcatattttgctacctcatcataatcattttctttacaaagcaaccattaaattctttttttaagtactgctacgtactactagtttttttttttttttgaaaacacaagtttattatatagattaaagacagagttcacggggaacaagttcccctatacatcgccataactgatacaacttgcagagcaaaaccaacctttcaaaaggtaaagccaaattgtctaaggggacaaactttccaaataaaccaaacagcagtaagagtgtgcactccgcttgacagaccggtgaccctttagctgcctccacaagcctctactaagagtgtgcactccgcttaatagaccggtgaccccttcagctgcctccacaagaacggtacaattcgagattgattgttgagtcaaagattttggttaagcttcactggactcaacatcgattttccaaggagttctccatcaaatctgaggaatgctaactgcaaacctgtcaacaagaatcggacaggaggtctgcactcaacccgaccgaagcactcgacatggttactgctgcagataaaattagaagtcccttaagaccaaccaggcctaatcatgagacaattaggacaatggcgatagaactgctgccttgctacatcccaccagaaccttgcggaaggaaatgatgactgccaagctagagtaagaattaatgaaaggcatctgtaaaaatggtttgcaatacaagaatgacaagtatttatttgctttcataaaataaatggtaacgtgagggccggggagtatttataaacgttagactacgtgtgttcaattatattagatttcagttttttcttcataaaattaattaaggagagtacaattagtacaaaggaaagattaaaatattttactttgtcatgaagaataattgaactcgagaggacctagctgccacttgcatgatgtcttgtcccctgtctattagggtgtgaccggtgatctacctgccctgatcagtgatcctagatccgtacgtagctcgctctttcgtcctataaaaacccaggagcctggctgccaagattaaaccctatctcgcggtgagctcgatacgacccgtctccactctagctagtgtcgtgattaaatttagttagctatggcagctggtggtgcggcgccgctcaggatcaccggtggacggcagctggtggtgctcctcctcctgctgataatcacgctgttcgtcttgacgcagcccatgatcgccatggcctccgccgcgagggctttgggagaaaacgacggcaaccctgactgtgtcatccgtgaccaccctgctggcgaaaatggaataccaccatgcccgccgcgtccctaataaacctgtcggtgatcgatcagctgtctcagcgatttaattagtattgtaatcgtcgtgcgtacgtctacagcagtcagctgatggtaaaaccaaataaattttagtgctagctagctagctcctctccggagaactacgatagatgccgtacgtatatatgcgtatgtttggatgtcatgcatgctttgacctctgcatggcctattccgacatttgctacggtacgtgcgtcctacagctagcagccggctatatatgtgtgtcagtgtgtgtaacaacgtataactgtgccttttatatttcaaataagtgtctcattcacatgatgctgagacagtagttacttctgaatgtatggctctttcttattactatatcacagtaccaataaaaagcaaaaaaaaaaagtattctattaccttttctttttgattacacacgcgcacaaaccactaaatgacaatactacactcacacctgtgcaacactactaggaaaaacgtttttgcaggcggccaaaaacagtcttctcaagcggacggccattccgcctataggcaaaagtcttgcgaaaatcacaggcggccgactggtccacctaggggggaagaaacctaggaagaccattttcctaggcggactgaagcacgatgcgtcacctgggaaaacaggaaggagccgccgtctaagaaaatacgcgccaaaatttaaaatttcccaccaaatttattaataatattttttaattaactaatgcataaataatattaggaactaacaaacatttaatactgacaaacaaacatatattgcattagtgaaaagtatcgtcaatatgttacaatattttttacatttgtcacttcaagtagatcaagaaacaaatgtaatgatcactacatagtaacgatggtgcagttagtcacggatgaaataacacagatgtgtacaaagaaatctattggacttacctaaagttgtatgtggccattatgattcttttatgttgaaatttcaagaaggctcgtccaatgtactgtgtgacagtaagtattttagtcttgtgcaagcccttcttgtattccgctatctctttaggcattttgtccttgagctgctcagagtttggtcatagcgtcacgatatgctgtgtctaatagatccttgttggatccagatatccgataggctccactgtcttctcagcatccatgtattgcatcgtataaaacaagttcgttaataataatcgcatgcttctgtattctattgatttatttgtataataaatgcgcgttcatactcacaggcaccatgcaccgaaaaagtttacatccatctttttccgatgatagatggcgtggagatcagagaaatctaaccacaaggaacctttgttggccatgaaagcatcaggcggtaatcgaacagttaaagacattaggcctttcttgctggcgtctatgtaccatttacgtagctttctcatctcccatggaccctcatcaagtgcataaatctggccaaagtgcttttcaaacttttccaaacaatcaacagttgcaaagaattatgggccggcaagttcagcggccttcttctcatcttctctttgcttggcacattttttaccctctctaaaagcgaataccatccacttctccttttgatcatccttagacttggagttgtgacttctgagcactttaggcacttcagacttgtcggtggcattgtcatcgaccggggttttgtccatgtcatcttttgcaggagatgggtcctcatatacctctggttctattttggctcattccaaacctggtgcgacttcgatttctgttcggaaggatgacaacttgcacttcctgttcttgcacgtccggttcgtttttctggcataatttgcacctctggttctttttccggcacaatcgacattattgccaatgtagatggcccttaagtgcccttaggtagctcatgttcttccgccttatcattcaatggtttctttagaggtctctgtgatttcagcagaacattggtgctagtggcataggttatatcttttttgccataaaattacaagaacgaccgcatccctttatatctttttttcgccacaaaattacgagaacagccgtatccctaaatatggttatacaatcaggagttgggatgtccaggccagactggtgtataatatttaatttatctctattggaattgtcaatgatctgtccaatcagagataatgcttgaatttatgattgcctattcagagttggtagtgtactgctgcataaccatatcgaaaaataaagcaaagtacatcactgctttacttcaatcaaatgctcatccttgtccccttggcattaattattggcccttaattatttaaagtgtgaagcttttcaagtccacgcatatactatacacgcatgtgtttgctcaaactttcggatactgtttttcatacatgaaatcttatattactaaaacagccttggaataagtcaccacatttaatgtggaggctagaaatttctacattaattagaaaaaagaaaagaagagtccaagtagatgtataattaaaaaataactgaaattcggaattaaaagtaagtaatattgaaagaagagtacatataagaacccaatataagattaattaaaattcataataaaaaataaaataaaacccaacattagaaaagaaaaataaaacaagaattcaagtaggaataaaatttaataataactaaaatttgaaattgaaaataagcaatattaaaataagagtccatataataacctaatacgagattaattaaaatttgtaataaaaataaaataaaatctgaaattagaaaaataatagtaataaagagttcaagtcggaatagaattttaaatcaactgaaattgaaaataaaaaataaggaatattaatccatataaaacacaatatgatattaagtaaaattcgaaataaaaaataacataaattctgaaattagaaaaagagaaataagagttcaaattggattacagtttataaataaccaaaattaataataaagaataaggacggttgaaaataagagatcatctagaacacaagacaagattaattaatttttttagtaaatattaattaaaattaggaataacaaataaaatgaattctgaaaatagaaaaataattataagagttcaagtaggagtacaatttataaataaaataatatcggaatgaaaaatgtggaattttcaaaaacaaatctagaacacaaacgatgacaaatgacaacaaagaggggagaatcaacatgccattaaaggaatagagtgatcacgattgttgggacatctcaaaactattaacaagacctcagaaaaaatcccaatgatgactaaaaagagggaccacggacaagctattaaacaacacagtcattgtggttggcgggcttctaaaaattataaaatgaaaccaaacgagacaataaacactaaaacctacaaggtctaatttttaaaggtttcagagagaatgaatagaagccatgataaatcgaggaagcaaataaaagagaggtgacaaataagtaaggaactattggcgtgacttttaaaaactataaaattaggaacactgggatgataaggtttggtcttttgaagtcttaagacaacaggtatttcacaaattttaagaaaaaacatgataaaaaatagataattttgtatgggtgctagtcgtgcaattgcgcgggccacccggctagcaaataaaataaattctaaacatagaaaaaataattataagagtttaaatagaaatatgatttataagtaaaagaatatcagaatgaaaaatatggaattttaaaaaaaaagttcatctagaacacagcgataacatataacaataaagaggggagaaacaacaagcctatgaaggaatagagtgttggcggctgatgggacatctaagaactattaacaaaaccccgaatagtatcccaatgatgattaaaagaagggacgttagacagactgttaaacagcacgatcacggcggttggcgggacttctaaaaagtaaaaaagtaaacccaatgataaccatgttcgatttttaaaatctccatgacaacaaagagtgaagcagcgggcgagccatagaggagtacaacggtgacggagcgtggggctcctcaccaggagaccgcgcaggcccccctttgccggttcggccggggacgctaagtgaagttctaagctctcaatctgtggaatgttcgctaaagtggaaacgcgcaagacacgggcgatgtatacaggttcgggcc

SEQ ID NO: 27299 - DNA, 1908 bp, Oryza sativa
ttgtctgccgacgacataaccagtgtcagaccggtcgcaaaccagtcactcttgtccaccacgcgtcagattagcaatctgcatgttcgcccttcttcatacaatgtcttgcttgtaatggttgcgatgaagcctggcatatatctgaccgggaccaacgtgccatctccaggagctagcacgctggctccggctagggacgagtgcctggaggctctcatcctgacgggatggggcgaggcgtgtgtcagaccgcctgttgccacctatcccgcgatctgaccggtctgtgaccggtcacagaccggataaacgagcgcgctgcactgcgttacatgcggcatgacgcgctcgtccaaaccgcaataaatgcggttaggtgagccccgctgtgctcatctaacccatacacgcggcgcaaaacccacaaggggtcggggcgcctcggccctcggggccgaaacgggagcggtccgacccctcggggagacaagagaggggcggccatatcaccctcgggcccgacccccccgagggggtcaggccacgtgggtgatcgcgtctgcccaagcctctagtcatgatactcccggtcccatgtcaccgacaaatggcaaaatcgctaatggtttggcaggacttctagaaagtaaacatgaacccaaacaataattatgttcgattttttaaattccaatgataataaagagatgaggtagagaagtatggtgacagtgtttgacgtgacttgtaaaaattatataaacgaaatccaatgagaccataaactctaaaaactagaagatccaatttttaaatgtttcaaggaaaataaatagaagtagtggtagatcggggaagcttaaaaaaatttaagtaagaccgtattaaaaaatagataactttgtattggtgctagccgcgcaattacacgggccacccaactagttctgtctaagcgatcgaatttcccatagtttaagtagattcttcaatggtattgatgctaaccaaatctattattgatgctatcgttaaagaaaattctagttaagagttctttctgatctcccaacacactataaaaaaaccattttttaagacatcccggtttcattttccgaagtggatcataagaaaatctaattgtgattacggtgagagggccaatggtctaaaacctcatgtggaaatcaattttcacaggattttcaatggtggttcattgagagaatggctggtggaaacggggtaatttttaaggtgattttattaaggaaatgtatgtaaaattgatggtttctgatcgaaactgaaaattttgaatgtcaaacgttaactggcagcgatattactatcgctcaacatggtgactctagattaatcattttatatgaagctataatagaaatgtaaaacaggctacgtttgcttataggcggacggccgccctgcctgtgaagaccggtttccaccgccggcgataatgcttttcttagtagtgtactatgagttcatgagcccgctccacatggggctgagcctaatgcggattctatagacaaattgttacctgcatcatgagctaagagataagatgaattcctagacgatgtaccattttgtacgacctgtagcatggcggccgcttgtggagtggtggatgcttcagggtcccaggacatgccacaagcgcttaaatccagtggtttgtattatatggtctatgcacctgaaagcgctcatgtgaaaaaaaaaatatgacaaaaaaaccttcagtcaaaaaatctaacaaaaaccttatgcctctaagggccagttcttttctccaacttaaaacttcaacttcctcgttttctgttagcacgctttttaaactgttaaatgatgtgttttttaagaaaaatt

SEQ ID NO: 27300 - DNA, 1687 bp, Oryza sativa
gcaaattgttcattgagtgcttgcaaatgtgcgtctgacttgttctcaccgtaaatggatatatagtaggggacatcaatattgactgacaccaattgcagtcaggttttcctattgcactacaatcgatgtttacacaacaccaaccctttaaccacatgcatgcatatattaatatcgaactacctcaattgcaacaaactcaagtcattgtagtgaagaaagaatagagcttgtgaaaataccttcaccatgtcgtccttctccaagagagtagctcatcatctcacatcactgctaactgtgatgcacatcctcctgcaagttcaggccacccccacgcttgctgacagaactacgacctccatcgtaacgacaccggttctctgccttccggaacaggcctcggcactgctccagctaaagggctcgttcaacgtgacggccggtgactactccaccgtctttcgatcatgggtcgccggtgcagactgctgccactgggagggcgtccactgcgatggtgccgatggtcgtgtaacctcactcgacttgggcggccaccacctgcaagctgacagcgtccaccctgcattgttcaggttaacctcactcaaacaccttgatctctctggtacaacttcagcatgtccaagctcccgttcactgggttccaggagctcactgagctcatgcaccttgacctctccaacaccaatatcgctggtgaggtgccggcaggcatcgggagcattatgaacctcgtgtatcttgacctctccaccaaattctatgctctcgtttacgatgacgaaaacaacatcatgaagttcaccttggattcattttggcagctcaaagcgccaaacatggagacctttctcacaaacctcaccaacctagagcagctccatatgggaatgatggacatgtccagggaaggtgaacggtggtgtgaccacatagccaagtccacacctaagcttcaggttttaagtttgccttggtgctcactgtcaggtcccatctgcgcatcgttgtcggccatgcaatcactgaatactattgagcttcaccgcaatcacttgtcaggttcaataccagagttcttcgctagcttctccaacctctctgttcttcagctatccaaaaacgactttcaaggatggtttcctcccatcatcttccagcacaagaagttgagaatgattgatctttctaagaatcctggcatatctggtaatctgccgaatttctcacaggaaagtagcttggagaatctgtttgtcagtagcacaaacttcacaggtacgattacaagatccatcagcaatctcaaatctttgaagaagttagaccttggtgcaagtggcttctctggaacgcttccttcttcgttaggtagcctcaaatatttggatttgctagaagtgtctggattacagctagtaggatccataccttcatggatctcaaacctaacttctcttacagctctccagttctctaactgtggattgtctggacaagtaccttcttcaataggaaacttaaggaaattgactaaattagcattgtacaactgcaacttttcagggaaggtgcctccacagatctttaatttgactcagttgcaatctctgcagctccattcgaacaatttggccggcacggtagaactcacatc

SEQ ID NO: 27301 - DNA, 1487 bp, Oryza sativa
atggaaatgatacatacatggcacaaatcctaaaaaagaaacttgcattgctctagctatttacaggtaggtgattgtttgccagaaaataaatagaatgtaacaaagtagaaggctcgaaagctttcttgtagctaaatgggtaaaattgaccaaaagatctccacgcctatagttgctaaatccgctaacttggcatagtggaacttacttccatgtggcataaccatggactcaaatctctgactgattgagtcgtgctgatgaacaagcttgaactctgtaatcatcagagtattcagctttgcagcaactacaaacctattttggtcacctagcttatcaattggaccttgaaagagcttaatttgtgggggcatataactaacgtgacaagttatagtcaagtttaggctgccacagccatcctttagtttatatacccaaacttgcgccgtggcctcaattgcacgggagaagtgtgctagccttatgtccaccgccatgccgcaatcaccattgatgcgataaatgtatggtatgaaattcgttatctcgctgaaggtggcagccccgtcgacaagcaacagatcatcttgctcactctcccccatcttgatcctcatgtcgtactcgatcatcacgcgagcgttcatcgcgatgcccctcttagggccagtcatctgtatgaacggataggagacgtcgccgatggtgaacggattgtccctggtgcggttgaagacgtagtttcgcaatgggtccaagagattccggacagccatgaacccatacagctgaatagcaccggcaccaggagctctggtggcgaaattagagatttcagctagcttaagggagaagatctgcatcatggagccaccaatgtgccactggcaatcggcgacgcatggcttgcagtcctgctctgaatacgatggcgtcatcggttccaggcgagctgatgatggaatggatcgattaagcaaacagtgattagtatatactacttgacaaaagatgaaaaatctatcaatcgaaaggtggagaagttgcacaaaaccacatggattttgccacatggcacataacctaagatattatggtcctaaagttttttacaaaaccacaccgttaaacaaattggtataatcctatattaattgaaaaaagctttacttagaagaatgtagcattgtggaaaaaactcataaatctgatatgtgattgtagaactcaaaagaatgataaatcaaagtcaaaatgattgataaagtggttttgtgaaactttatagccataataatacccagggttatgtgccacgtgctaaaacctctatggttttgtataatttagaccatataatacctggcgttaagtgaaatttactcttgttaaattgatgaaaactttgacagtcgaaatggggggtaaaactaagagaaataatattaacttgacagcagatgaggagtagtgggatt

SEQ ID NO: 27302 - DNA, 46999 bp, Oryza sativa
  unsure (1)..(46999): unsure at all n locations
tttagtcaaatatgtattgcaaaagtttgggctgcacatacacggttactaatttttactaatcagtaaaatctaataatattgatatgaattccatatttaacatccatcctaatgcagcaaatcatttaaagtataattttcaaggcaatcagacaaatatcctagtctaggtttgaattgtttgatcatgtcaaggtttttctactatcatactatatacatgggatacatggcccaaaacttcataaacatgaatactatgattgcggtcattatccaactgttttttattggctatcctttctgatgtgtcaagcagtccaaaatatataattagaatactaaatagaatacaaatttaaccataactgaattcaaaagcacatatttaacccatgatgtttgtgctacaaataaaccttcttcgtacctcccacggacaacaggtgtttccaaccaattattcacatcttataatcatggccatatcacacttatctcaatacacaagaacccacagccagtttactggagtaaatagccacaaccctgcaagttactcggtctagtacgatccataatagggaggcatggttgtacggtattacatgagcgaacatcccaaccaaccgtccttaatcaactcagatggtgctacgtgcatccgaaataagttccataattagccagatcatgtatgataatttatgtttattaccattcccaatccaagcatgattcattcccattcacctatctcaatcaaccagctatttccgttaactgcataccattgtcttctctatgcatggctaagcatttattcaagtagtagtcccatagatattacccatctactgtttgacaaggtatacaagatcaataattgaaggcaagatgcaaatagcaataggataataaactctacccgacatatttgcaaatggcgatgcatatatagttttaaatcaaaacatgcttttgcaaattgggttcaacataaccaaaatttagccttgttcctgtgctatttattgaggctcttctggttactccttgagctcatcctgcacatcagaatttagcaagaaaccaagagacaaataagaaccaatagataaataggttacaaaactaggaaaacttctaccacggtaaagaaaatgttgtgagatgaagtggtacactgcacattgacaacattcctgactataggttacatttatgcttaacttcaaattttacttgtttgctcactgaaactgtcctcaattttcattcaatagtagagagagaatattggactaattgcattaatcatctaggacagtgtatatatagatagagtacagagatagaagataaggaaggactctaaacaaatcaatcctatctatgatatcatagtttttttaatatataccaatcgattgtttatctttacaggattttggtcttaacctcatgaaactaaaccatcagaaactaactatagagttttgttgatttcacaaatgcgcttcttcaaaaataccatttatgcccaaaagaaatattccgcaagcatacaaaaaaccattgtacctttcacttgggagtattgtatcgaatccacaaggatcctttggtctaggtttcatgttactacttctaattaaacaagctaactaaagtcataatactatgtttcttgcttcaagtacagtagcaccaccaaagaaagggaagagaaaggggtgctaatatgccaaaacacaccaacttaagtagagctaacgttgccgacttttttttttttgagaaacacagtacaaacgcaggcgctcacaacgtgcgcacactcacccctatgaacgcacacacgcacaccctacccctatgagcaccttcggaagactgggctggcatatcttgagattgacgaagtcaccacaggcgcctcgctgtcgacgggtacgttgcctaccactgaaagaataattagccgtaaatgcgagcacccgtatcaaatctaggatttaaacccgggtgggctggtccaccacaaggaacctaaccagttgagctatgctcactttgctaacgctgccgactttaaacaatggccggtctagtcaccacccaactgactacttcgtccaattctctatcatgtattcctagataaaaacgatgcccaagcacacatacttgtagaaataccactagaattagttgcaacagtgaacagaggaagcaagataaataaagtataaagactttatctaaaatagattaggagccaacaggctcttatagtggtaaataaaataatgaaataaataaaaaagtagagttgacatattaaccgaacaagaagattgaaatgactcttccgggtcacttcattttattttacgataagagtggtcacttcttatatagtggaaattggaacacacttaaattcttcctctcatgttttcttcgattgtcgcatttcctacttgccatccaatagactcttcacaaaattcatgcgactctaacacctatagaaatttacaatatgtaaaaaaaattgcattcttcttattcatgttttcaaaatcccgcatttccaaggaggtctaatgtgactgatattgatccctagctacattgcactcactttgtccaaaataaatcaactcataggttcacatgttttcattgcatagagaaaagatcaaagtatccttcattaaaacaaaaaagcactattgatggttggtggtaagtggttttcaaaagatttaacttctttagtcctaacgcttataagaaaagagaaatcaacttattttaggacaaaatttaaattctacaaatcaacttagtcactgtttggcatattccacgttagatttaaaacttgttagttaaactgtagtagtgaattttagatttcatttaaaatatgaacaaaacaattcatctaaattttataacataatcatagatccaatccaaatccatgggttcatggagatagaaatacccaactaaaaaaatcttatatctaaagctactcacaaatattacgcacatacatgtaagctttcaacagaatattagtgaaatcaaatatatgccctagttttcgtctattaaagtatgtgttagatgacatatttacagggtatgactgtgctggatatgactgtgctgttacatgtgcaggaatgtgttcgcgtctatcatgcaatgtaaaaaaaaaacatagccatatttggggatggtgaaaagtgtgcctacaactatcttcaaaacaacgatggttacattcactcgattcgcatgtgtgctcatctctgatgtacgtccagctgtcctgctccaaatttcgttgttactcctctcgttgcgctgcatgtcgatgaggagcgcttcgtcctcctccctcccgcgtcaaaaagagaaaaaaaaaaaaccttacaaaactcctcctccaccaccacctcctcctcctcccctcctccctcctccgccccacccggcgatcccccccacctcccaagacgtcttccccggcgtcctacctccgatcgcgatcgcgggcgcggtcgcggtcgtgctcggacgcggcgtccatgtcgtcgtcggcgtcggagcagccgcgcggggaccaggtgtggtcgtcgtcgtcgccgccgcggtcgtcgacgcctcccccgcagccgctcgtggggggcctgatcgagtcgctctcgttccggagctgcgggttcggccgcgccgccgtctccgcgttcgagaaggaggacctccgcgcccgcgccgcgctgccgcagcggctccgggccgcggtccacgcggcgctgcgtgccaaggacccctccgcgggggcgttcgcctacgtcgccggcaacgcggctgcccggggtgggcgaggaggcggcggcagcggcggcggccgcgaggtgtcggcggccaacccgtggttcgaggtcgcccacgacgacgcccccgagtcccccctcgtcgcgttcgtcaacccccgcagcggcggccgcctcggccccgtcctcaaaacccgcctccaggagctcatcggcgaagaccaggtcaacacctcctctctctctctctctctctctctctctctctctctctctctctcatatattttgttgcgtggcatgatgtgcgggtgaggcattttgtcgagcggttggagagcacgacgtgaggtgatgagatggtcggcgtcgggcgttacgtcgatctgctgtcgcggtgcggcggcgacgcgcgcgcggtcgcgcggatccaggcggcgctggtcacgtcggggtggctgcggcggagtgccgacctccacaacgcgctcatccgggcgctcgcggggtccgcgcgcccgcacctcgcgctcccgctctacgcgcacctcctccgcgcgggccaccaccccaccccgcacaccctcccctccctcctcaagtcgctcgcgctctcccccgccgtccccggcgcgcggggcctcgcgctcgccgtccacgcccacgccgtcaagctcggcctcgcggggttcctcctcgtgagcaacgcgctcatccgcgtccacgcgggcatcctcggccggctctccgacgccctcgtgctgcttcgcaccgcggcttccgtcgacgcctccacgttcaacacgctcatcacggcctacgcgagggccggccgggtcaccgacgcccgcgcgctgttcgacgaaatgcctgcgaggaatgctgtgtcgtggagcgccatggtgaatggctacgtgcaggctggggacgggagggaggcgctggggttgttcgcacggatgcaggccgatggtgtccgcccggatgacacggtccttgtcggtgtgctcgcggcatgcgcgcagcttggcgtgctggagcagggcaaatgggtacatggttacctcaaggcaaataacattaggatcaccgtgtttttgggcactgcattagttgacatgtatgccaaatgtggtgagatgcagctcgccatggaggtgttcaaggtgatgaaggaaaagaatgtgctggcttggaccactatgataaaaggcctggcaatgcatggtcgaggatcggaggcattggagttattctcccagatggagagattaggtgtgaagccagatgacattgccttcattggtgcattgtgcgcatgcacacacactgggttggttgacaaggggcgggagctttttgattctatggtgaggaagtatggtatcaaaccgaagatcgagcattatggatgcatggtggaccttctggcacgaaatggcttgctcaacgaagccagagagatggttgagaaaatgcccatgaaacctgatgccttgatctggggtgctttgatggctggctgtaggtttcataagaatgttgagttggctgagtatgttgtcaagcattggattgaactggagcctgataaaagtggcgcttatgtgcttctgggtaacatatatgctgcctctggtaggcatgcttctgcaagggaaattaggcacctaatgcgtgagaagggagttgataagacaccaggatgcagcactgtggagattaaaggagttattcaccaattcattgttggagatctgtcccatccttttatagaaaagattttgtctaaatgggatgagattgatagtaggataaggttggaggaaggttatgtgcctgataagaaggaagttctgcttgatattgaagaagaagagaaggaaaatgcactcagccgtcatagtgagaagatggcaattgcatttgctttgattaacacaagtgatgatatgcccattcggatagtcaagaacctcagagtttgccatgattgccatcatgtcaccaaacttatatctaaagtatatggtagagaaattattgttagagatcgaacacgattccatttgttcaaagatggcagttgttcgtgcaaggactattggtagtaattaacagatctgtagaataacatcagtacttgattcatgaagtagttcagtcaccaaatgaaaaaaaaaaatctctttcatcttgaagtatacatcaggggtcatgaatgaagaatgtcaaggtgattaaggaataaaactccctgctagttctaatctgcatatgtagtcaggctgccactaagctaatttccatggatattattgttcatctttggtattgaggtgattgttccagaacaataatataattctgcactggtagcatgccaaatccaattgtgaaccaagcatactgcattttttaaatctatcatgatgtatgaatctggtacattagtctagatatgctattgttccattgttatcacgcttatacaaaatagcactacaaacaaaatatgggttgatatcgaatacgaaatgctagggaaacacatggttgaaccctatggaatagagtagaacagttaatttacttgtgttggcatgagaaatttggatacgatgcagggcacataagcataatgagtgcatggaatactttcatgtccaacagttttccaaccaaggaaaagtgtaatagttagtcgtagtcctcaacttacgcaaatgctggaaagattctgatgatccatagtcccatgcaaaacaaatgcattgctttagccttttctgatatgctctgaactttcactaaattagtttatctcatactagtctgaattggctttacttcatacacttttatttactgtcatttaacatccattcttgtaagcaaatataatcatttttagttaactacactaaaaacatatatgaaaatgcagaatggtaggatatcgcttaaactacaaattcatcactggccataaataaatattgaagtaggtaactgtaccggctaattgaccaaatcccactttattgatggttcagttccaactaaattgttgctctgcttcggttaaatgcccttgaattatttctgcaaaagaactaaaatgggtcaattggacacctcaacccaaatcacttgatttcctatagatacttgctctgttaaagaaagtttgagcacgccaaatcacttgctttcctattcttgttctgttaaataaagtttgagcatcatacaatatcttcaattattgggactgctgttcttgaaaaattaaaatgattaaggaataactgctttgttattaacaaccttttgtcagcaggtttttgatcttactgttgtgaagccttctgactttgtgcaatatgttttgggttgcttggaacaacttgctgacgctggtgatcacagtgcaaagtccattcgccataatctaagagtcatggtatgtatgcattttcgtagcttccatagctgtaaagaacacatcattattattctgtgtttttcctgagttgctgaatactaatcacatcatctcttatttttgtcattgttgtagtttcacaaaggtactaaattgtaaaaatgtttttatttttgttctttcgtatgatggaaaacctgtactagtcagcagaaccgttctcatattccaaaagtttcagaattctaaatacttacagtttgtaacctacctaggttgcaggaggtgatggtacagtaggttgggtgttgggatgtttaggagacctttatgttcagaacagggaaccaattcctccagttgctgttataccacttgggacaggaaatgatctttccaggagttttggctgggtaaaacgatctctttcttgcactctttccgtcttcctatgaagctacttactgcaagttttcatgacctcacagttattttcagggtgcttcatttcctttcggatggaaagcagctgctaaacgatctctgtacaaagctatttttggttcagtttcttgtttagacaggtgacttctttactttgttggccagttattttaatcttctgtgcattctggttgcagtttgatgatgatacatcagtatttttgttatgttaagaaaccttatttgagctggttaagtccgcataggtatcactttttcgcaataccatggtcccagcaatgtactcctctatttccaaatatatgtaattttagacactaacatgatcccaaacatacatcggaccattacctttttttctaattacgcgttagtacttgtttattcagcgtattgtcccaatatttctgcatttatgaccaagttcctccttcaacatgtaatactcacgtccccagtataaccacttccagttgctgattaattagttatttctgcagttggcatattgttgtttctatgccagaacgaggagatgaagaggaagaactggattttcctcactcccttaggaatcttggagagtgtaccttttatgatgtaattattttctactatcttatatattgaaatgttgtacaaatgcattggaagtctaccccgtgtacattttatatcgtactccctctggtcataaatatgacatgcacgataagatttggtaaaacttgtgaaactttgaccattaattttatgagaataagtttatgatattatgatagtatttttcaaggcaaatctatgatatcatattttggttttaaactaagcattatatatattatagatggtcaaattttaaaacttttaaccatatattttcctaaatgccaaatatttatgactagaggagcaattatttttatactatcttcttcaagtgttgtacaaatgcattctgcttgattaatacaagtctaccctgcaggacggcactgctgaaggggagttgcctgaaacagtttcttgctttgatggcgtattctataattacttcagcataggtacaatttttacatgataacttatagttgtgttcattattcaatagtgtgtttatagtgtattccaaagtcctagatatactcttggccacacataaataatttgtattgtcatattctacatttctaagcatctattatggtttcatatgatgcatctcatcaagggaaagtatcttcaagaccattgtgctttgtcacttatgctaataaccttgtaactaggtgttcgaaaaattctcctttggttattacattctcataaagtttttaatctacgatgtatgtttgtattgtttgttgtgatgttctttatgcttattttggttctataataaacaaaattaatgcacattgtagcactacaattggaataatgagatgaattatatctcagttatttgtcaccccttacattcattatcagtgtcagagaaagctaccatagaagttatctacggtgtggctttctttgttgttactatatgttgtcattttcaatatgcatattacatatgttctgaagggaccttgaggatgcaaattctgttgtaatgcaggtatggatgctcaagtggcgtatggatttcaccatctacgggatgaaaagccattccttgctagtggtcctttatctaataaggtatgcactcagggatgagatttccatcatttatggcaattcaaaagcttttcagcccaaactcatgatattgaattagcatgtgctcattatctgtctcctgttctttgtataatcataaagttgacccttgaatgggatcaagattgccgtctatagacgcaatgttaaatggtacaaattatttaaaagaaaagataaggggaggacagctgaagaacagtgggcccattatattaatgaattgttttcttttgggtatccagtgtattttctgctagctaaaagcaattcctgacaagaccagcttgtactgtgagtctgtgactgattaacaagaagaatgtccgtgcaggaggggcgtataggagactggcaagggacacaggggaataggagattggataactttttccttttctttaaactattgaataggagcatcgccctaaatgagaggccctaataaataaaattttaagtacaaagacaatgaaccataataaatataaatatatcatggatgatacattaaatggcttcaatcctaagcaaagggtttcaattgggatgtaattggaacgtggtgtgctgcttctgacttccacatgccggccgtaggtctggccgcacatgacattacctttttcaacacttatcgcaactcgcaagctattaattttgatctgatgtaagtaacataggcttccacatattctcactgtaaacatatatacatcaaatagggtttgatacatgggttgaagcacgttatttattgaatgatggttcttataagttctaattgtcagttgatcgggtacataattgacgtttgaactttgtcatgataagccttctgttctgttgatgaatatgataaataatatttcaacagtgaattttttgctaactaaattactgattggctgattttatgacagttaatttacgcagggtatacctgcaagcagggatggttttttacacaatgtgtcagcgaccctgaactgaggtgctgtatcccccctcgatttagtttaaggcatacttatgtttgactgatatctagaaatctggaaagtccatccatcatttgattattttagtgttttctgctctataccttttttggggaagaaatgatccgatgacaatgtgttttccttacaaagagcaaatatactcaagtttttcttttgaccaagtgccaatcatggttaattgattatgttgtatcaatttgtaatgttctaatgatatttatgaaaacttataactttctctaattgtatttacttttttttcattctgtccaaactcatcaaggttgtatttatacatagatatgaaatgtttcttttctgttatcgtcttccagatactgatttgcaaaactgagattagaatggcagagacaggaaaaaggctcttattttgattctcatttcatatatcaggggattgacgaacattattcgtttatcaataaagaagttggacagctctgagtgggagaacatccctgtaccatcaaggcaagttgaagtttttctttcctatttgttattgttatatgattttagttccagatctgaaattcagaaacaataatgatccttgcataagtcactgttctccagtttgaactctgcagaatactattataaacagattactttagtagttctgatactattatatatgggcacactaagtaatgaagtctcacggctgaactagaaattattcttggcacaagtatagaggatacagtttatattgagcagccatgttgtacttcagtgtcagggctattgttgcattaaaccttcacaattatgcaagtggaaggaatccatggggaaacttgaagcctgaatacttggaaaaggtgtgctgagtaaattgcttgtcatttttatgattgctttattggaaaagcacaatagcctgaacttcctcgcaaatactaaaaagcatgctatttttcttaactggaatatcatcaagagaacttctatcttttttatgtaaacagagaggatttgtcgaagctcaatcagacgatggtcttcttgaaatatttggattgaagcaagggtggcatgcatcccttgtgatggttgaactaatatctgcaaagcacatagctcaggtacttttgctccctgcacaagatctgaatagcagaaggtattttaatgcattactgttcaatttggagctcaaaggttaaaaatgtagtagtaaatttttcgctatgtcacctgtgaacaaacatcacattaggtaaaaaaaaaaaagaagtattacaacttagttcaacaggaaaaggcatcatcagtttagataaacagctactttgcaaattacaactccagatggcattcgacactgatatcctcaaaattatttaagcgacgctacctactgttttcaggcagcagcaatacgattggagatcaaaggtgggcaatggagggatgcatacatgcaaatggatggggagccatggaagcaaccattggaccacgagtactcgacgttcgtcgatatcaagaaggtcccttacccatctctaatcatcaatggtggggatcgttagtaacaacaggagagccagccccagatttctttgccctgacctttgctagagctgccaaggaaaaattttccaagctggattccaacttggaagccagacttaaccctgactattcttaactatctcactgtatatgaagttttgaggatatgatatttttgcaggggacgcagccatatacccctgtgctttgatccaagttctcaattaacactgcatgaagtaattgctacatgcatttttttttactaaatgtacagggaaaaaaaaaagaacatccggactttatgccacgtttttgttttccaagaaaatgagcactgttttggggtcacattgtgtagatatagctcaaggattgcatcacatcaactataggcgttgttcgagctttcaaccatcccttctatatcgcgagaaggataggggcacagggaagttgtcagttcaagtataagtgactcaatccatcaaacttaaattctaatttagtgcaaatttaatgcaaattttgtgaagtccgcagatttatccatagccaaagctatgtttaattccacgccaaaattagaagtttgactaaaattgaaagttaatggaccgctccgttttccgtgcgggaagatagattcccaactcccgtatccgaacacaccataaaggttagaccgtcctctttatataccgagaaatttggcactcgagcaccaacccatataacaatgccatacagtaatgcttccccgcactgtgtggttcctacaaaatttgtccaaacccaatgaaatttctgaagattttaatcaggcctgcgtattaaactcaatccaatttatcaaccaagcaaccgtattcatatccccagaaacaaagaattgatcatcactttcccattccattgggaacacttctcagcactaacattgttttcattggtttgtctgagctttgaatgaactgttacaagttgaagttgaagtgacgtagtacctccagcagccgcctcatggcaatgtaaacctgactatcttttacttcatacctctgaagagcagcttacctttcctctgcatccacgagcttctcttataccaaacgaatgccactcaagatcattcatcatctgctacagaaaaacaaaagggctttgcagctatttctattttattgtcaatatgttagctactctctgattggatactgagtactgaaagaattaagttaaaacagcaattgatagttgcatgcttcaacagcaattgatagttgcatgcttcgtgctgtgaacacaatgctccaggtttccttaaatgagtatgccatgccatgatgtctatcaactgtccttccctgatgaacatgccatgacatgattgtatgaatcacccccattatgccacagtatcaaacttctagtcccattatgccacagtatcaaacttctagtaagaaaactcagttatactattacagaatgtcctgtttgcaaagtgacaatgacatggacacatgagatgtagcaactaaacacaagaaaactacagaatactgcagaatatccatgacaagcggcaaatgcacatctacaagatgctcgaaatgtgcttctcaaactacatatagaaaataaaggattccacaccaccagcgatgataatggtaacaatgcaaagtctatcagatgatgatcatgtcccagaaactccacctaataaagatgatgatcatgtccaagaaactccatgtaaagaagatgatcatggccagaaattcaacctaatggagatggtgatgccacatgacagaaacaagcatttagaagaaaatatgcagatgataatttagtaggatgctaaagttcaagttacatcccctctcagtttgaaggagctccatttagagagcccccaattccaccaacagaatccttccttcggccatagggatttttcgaaaatgttcaagacgttaaggacttacaaaccatataaaattagcaaaggaaacataaatatctaatgttaatgtaagtgattattttatttcattgagcaaataaaggatattgaattcgcattccaccacgaccagagctaggaataacagcaccctgtagattatggtgtacagctgatgcagcattcacatcctaaaatttaacaaacagtgagatgcataagaatgtaggataaggttaagataaaattacaatattgtaagtacctacctcaaactcaatgaaacaaacagtgttcctgtcttggcgcaacaccttcatttgtttataaccaggttgcctgaaaggaaaatgaataataatcagttagaactgttgtatctactttctagaaccataccatgcaacaccactgcacacaatagacaacgatattggcgtcgattcttacacgctgaagaggctccgcaattcctcttcaataacagtttctccaagattaccaatgaaaagggtattacagggagggttatcctttgtattctgaaaaagagaaatcaaaatataccattaatactagatttcagaaaactgaacagtataaagcagtcaaaatattgaccccaaacaatgtattctgcatcagcaatgcagcaaccacctcttatttttaatagcattacaatttattaaccaaaatcatgacaagcattatgttcaatgaaaaacaccacaagcatctttgcaaacaagactttatgtactcacacatttgtgcacatattacctggttattttttagggaggaacttgagaagttatagaggataggtaaaggcaacagagtctagtttatttttatcaatgttcatagttcaattatattcaagtggatgaaaaaaaggaagaggttgtctttgaatgatgttattcaagtggtttcgtcacaggttgtaaagtgcaggggccatagatttagacttctctatataagcaaatatgaattcatcatattatatcttacataacagttaatacaaagaaatagagatgatgtgcacacaacggagctatccaatgacctgtgtcaaatttaatcaggaaataatatttaactttcctaagattaagctcaaaaccaaggtgagatatataacataactccgaagtacctgaacaggagcataggcagttggacctggtacgggagaaggtgaagtcattgccacaggaggcactgaataggcagcataatgattgtaaggtggaggtgccgcgatataactgaatgatacacaaaagaaaaaaaggattatagagctccatagctgtgcataattagttgaaagaaagagcaacaaattaagaaatttaccctggagttccccacatggaaacagctggtgggggtggatgatatgggggagcagcataaggagaatgagtataatctccaccagtccgcaagcgtttactttggtccatagcatttgcatcgtttcccacacctaacataagccttaattaattcagcgcataatggatatgcataacagtgtagtaaccatttcatggagtaaatggaaataaacaacagcccaatataaggagtacgtggaacattattgtcaccaggtttcttcatcaagttatagtaattttatcacaatcactaattctataatcattagttcatctttatttcatttgcatatttcctaaagcttatatgaaatgctacaataacattttcaaagattaaaatttggcaacagaaagctttggtaaaacaataatagccttgaatgtgcttatctcacaacacagaactaaatcctgtaaaagttttatgaagccatatgaaaaccaccaattcacctacacattggttaaatgtcctgacctgcataggtttaccaaacagtttaaaggaagacatcaaagctccaatagcaggccacctttcccatatcgaattattctaatattacacataagcttcagaaaatatgcaacaagaaatgaactgcatattcattgccattctctgccaagcttcataataaatgataaaaggtgaaagcttccatgatacaaagcagtatgcgcaaacatggctacatttatatggaccaattccatccaaccaaaaatttatcaggttgatctgcacaacatgacagcgaaagcgagcgcacatcgacaaaggggaacgcacctctcttgacgaagaggttcttcttggccatctcggtgtgcagcgccgtcttggtctccgcatcgaagatgagatcctgcagagagaaactcgtgtcacaccaccatccacccaaaccctataaccaaccccgccatggagaccccaaagagagagagaaaaaaccctagcacctgcagcgcggccttggcggcgatggcgtggtgcgcggaggagaagagcgcgaaccccatgggctggtcgcccttgaagttgatctgggaggcctcgaacccggggagccagcggagcaggttgtggagctcccgctccttgacgtcggtggggagccccgtgatgaagatggtgcggacctcgtcggggcgggcggcagccgccgcagcttcggagtcggcggcggcgggctgcggcgatggtgtcgggcgcgcatgggacgcccggcacggggggtgacgcaggaacgtcggcgaccggggcgggcgcgcccgccgccggcggccgttgctggtggaacgggtggatcgttccggccatcggggcggcggcggcggaggggaggggaggaggtggcgcgcgggcacaaaccctaaccctagagagagattgggttttgggggtttcggggagagagagagagagagagagagagagaggcagcagcgcacgcagatgagatgacgaggtgaggtgaggtgaggtgcgtcctccggcccagcctagcaaagcagctttcagctgatttcaggcccttttggatcgaataaagaacatgcaaaattttctaacttgtgaagtaaccatcataatatttttttcactttgtatgtattttttagacattcagtgcgagtacgtggagtattgtcccaaaatgacacgttaaaaaaattggagtccatgccaagagtcaggctcaaagtcacgtgatccatcacgcgagtagggcagcaagtcgtggacaccactcagcgtccgtgttgcaggggttgttctctagtcacgtcgtgtgagccgtatggtcgcgcagtgtcttcttagtaaagttgggtccatttagttttgcttaattgagtaatatgtgatgcttgggcttatatagcagctaggaaaactcgttggtgtgtcaagcattgttcctataagagtctccaaacatcacctaagataaaaccatctctaaagatactatgtgtccataatgcaagctacacttgttaggatccataaataatttgcatatcggcccctagaattcgaatatgttcaattttaatttgcaaacgtatttaaagttatctattccaatccataaaaaaaattacatattacccctcaccctcatccccttgtacccacacatcattttccccatttgtctctccctccatgctagtgcgccattgacagaattgtcgttccttcctccgctctccacaccgccgactggatcggcacttcttcgtccagtccttgagatcgagtgacaactatgtagctcctattcccaccatcgctcctatccccctacccgggtcctctccctcctatcctctttccctgcctagcgcccctcctctccttcatggctacacttcaagccagggggcagcgatggtctcgagcatggctgaggaccgcccggcgatggagatggtgtgggcgaaggggagagtaaggacaatggggacacaccggcatcgttgtcccaaaatgacacgttaaaaaaattcgagtccatgccgagagtcgggctcaaagtcacgtgatccatgacgcgagtagggcagcaagccgtgggacaccactcagcgtccgtattgccggggttgttctctcgtcacgtcgtgtgagccgtatggtcgcgcagtgttttcttagtaaagttgggtccatttgagtttgctttattgagttatatgtgatgcttgggcctatatagcagctaggaaaactcgttggtgtgtcaagcattgttcctataagagtctccaaacatcacctaagataaaaccatctctaaagatactatgtgtccataatgcaagctacacttgttaggatccataaataatttgcatatcggcccctagaattcgaatatgttcaattttaatttgcaaacgtatttaaagttatctattccaatccataaaaaaattacatattacccctcaccctcatccccttgtacccacacatcattttccccatttgtctctccctccatgctagtgcgccattgacagaatcgtcgttccttcctccgctctccacaccgccgactggatcggcacttcttcatccagtccttgagatcgagtgacaactatgtagctcctattcccaccatcgctcctatccccctacccgggtcctctccctcctatcctctttccctgcctagcgcccctcctctccttcatggctgcacttcaagccagggggcagcgatggtctcgagcatggctgaggaccgcccggtgatggaaatggtgtgggcgaaggggagagtaaggacaatagggacacaccggcttcgttgtccatggttacatatctggccggtgggcatggtagtgacacgttgagagacaaggggctcctcaccagtggtcttgagctcccctagtcgccatcggtcaagctctcctcctcgctagtggtcttgaacaccctcgttctaagcattggcaattgacctgcttggaatgacagcatcagtgctggatcttcttaggcgggtggactcggcaacctattttctcatggcgctagcatggttggtcctcagcgacggctaccccgatggcccacgaagccgacaacctcgacgatgaatggtttgggagggggccggcagcaatgcagggtggagcgacagcttctcccaactcgtctcctcactcaagtggtccctacgccagacgttttgcaaggcaacgcggttgtgcttcctgcatgacacaaggaacctcatgaagccatggccctcacctactgtctcctccatgcctgctagtgtgctaaatggctaggtgagaccacatgtcatgtaggaacattgtgaatggtcttggctttaagattttttactttggacttctttttctctctttgaccctttttcctcaacattggtttcaatccacatggtgatgagctaagaggagcgaggtcatggagtaaatcatgtcggactactaagccggacatcgaggaaaagggtaaaatggttgcaacatgaaactctagtatacaagagagagtacactgtaagaaaaataggtccaaagtgaaagtgcgtctaccccctccccaccaaatttgttgattaacgataacacaattagaaattcctaatgcaactatctaaatgcttgcaaggtcaaaggtgtccccattatttgattgagaaaagatggcaataaactatggtaattcttgaatcatctcattttcttgactctaggagaccatactaataagagggatgctacacaacaataattcagatgtactcttgtgttgagaatcaagtttttgacgcatcgaaaacttccaaaatctcactgaacgcgagtctctaattgtacttcattgaaaacaatcgcaatatccaatcgattggattgtctgaaatgtcaaagaactttgttctatatttgattgtatgtttttgatcgaaaacttgtaatgttcaatcaaaatgctcgacattctggaaactccaatgttgcaaggaactcaactctctggttggttcaacttttaccatcagaatatccgatgtaccagaatgcccaatatttcattgaactcaagtctctctcttaattaaaatcttgcattggaaagtccaatagtgacatcggaatatccgatccgatattctttatagacatctaggatttggacttagctagcagacatataatacatatcagaatattagaccttgaagtcgggatatccaagatgggaagaaaatacatcccccctcccctcccctcccctccccaacaaccagattttgggatcacctatttaaacactggccctatccttttcttggattagttattcaattcactcaaacctgcttttggttagagcttggttctaatgttctttggatcttgagcatgggcgtgctctcactcactctctcaaatctctcttggctttcgtgcttcgattatttgtgtgtggatttgggattgaagacctagttttgtgctattctcttagatcttcagcactaggtttgattccaaggatttgttactcttgaagattgaggactctggatggttaggcatcactccctacccaccgattcatgtttggctataaggagaagtctgtgaaggcaaaatctcaccctcgcaagaaaacagataccccgagtagagatggagtgcatttgtgcaaccttgcaatggaagggttggaaaagacccggctcattgtgagctcctcaatggagagtagaatcccctcaaggatttgaactttgggaaataatcgttgtggagaaatattatatgtctcccataaaactttgttaaatggaatattgtcttgaatttaatgggcaacaaaaatcatctcttgaaatgctattgttagaaatagttttggatggatgttgagatggattaggcatggtaatcatgtttgatctactcccaaaccatctcaactagctccgccacgatgagtttatttgaaataatgcaatatcagaaaaccacctattaacaaacaaccattattccctcttttattctctccttggtttcacaccttaaatcatgcatgtctagattactagtttattccatccatttgcttagtgagtaccacacattcgatgtatgtgttatgttcaatttctactattattaatatgacatctaaagttttaatgttttgacttcaaattctatttgttatgttgttagtgctatgcaaccatctcgttagttatcatcctattagaactgaaattatccaagaagtgggccttttgagtcttttttttttgcacttttttcgattcaattgtgcatgtcataatttggaaacaaatccctaaagttaattgcatataataattttggtacaatattaatgataatcaatatgttccctgattattactgccacacttcttgcatgaatgttcctttgttattctatccctctgcttcgcatgcaccacacatagggagagcatcatctacatccaacgccatcatctcttggtgtcttatacaaagagatgaaaatcaggtcttttggcagtacgtatttgctgacgacaacttcactgtcttcatttcaaatttaaactttacttcaaatatcgttagagcactcataggtatgcgattatagtggttctatttctagaattattaaaatgacatttatggttttagtgagactctgtttgttgtgttgattatgtcattaatgctatgcaaccactctgtttgttgtgttgattatgtcattaatgctatgcaaccatctcgttagttatcacctcattataattgaattaatccaagaagtatgcgtttttaaggtgtattttacacttttttggttcaattgtgtatgtgataatttggaaacaaatctctagagctaattgcatatggtaattttggtattgtattaatgataatcaacatgttcctcaaatgttactagcgactttctcccctcactatattaccccacttcttgagtctaggtttctagattattccatccctttgcttcatgcgcaccacacatagaaagatcatcatctccatccaatgccatcatctttgtgcgtccgacacaaaaagaggcaaatcaagtcttttagccatacatgtttgctcatcacatcttcattatctttgtctgcaacgtacaagctaagaccgtgtattctcgtcgacgtaaagctctacttcaaacatcgttagagcactccttggtatgtgattttagtggttcgatttctagcattattactatggcatttacagtttcagcgatttaacttcaaactatgtttgttgtgttgatcaacttgatgcttctatgcaacaatcttattcattatcaccttactagaattgaaattatccaacaagtaggccttttatgttttttacacttttcccagttctactgagtatttggtaatttggaaacaaatctctagagctaagtgcatattgaaattttagtactatattagttataatcaatatgtttcctaaatgtaactatcgtctttctcctctcgctatattatccacttcttgagtttgggtttttttggttattccatccatttccttagtgtgcaccacacataggaagaacatcatttgcatccaacaccatcatctctttgcgtcccatacaaagagaggcaaatcagggtttttagaagtagatgtttgctcgcaacatattcattgttcttcttcacgacctacgcgttgtgaccgttttctcctcgaactcgactctacttcacgtatcgtcagagcactcctaggtaagtgattttagtggtttgacttctagcattattactatgccatttgtggtttcagcgatttgacttcaaactttgtttgttgtgttgatcgtgttgttagtgctatgcaactgtcttggttagttatcaccttactagaatagaaattattcagggagcaggcctttttagttttgttttcaatttttggttcaattttatgtatgtgatgatttgaaaacaaatctctaaagctaactgcatatgataattttgatattgtattaattgtaatcaatctgttccccgaacattactagtgtatttctcctctcgctatattaacctacttcttaagtctgtgtttctaggttattcctccttagtgcgtgccacacatagggagatcattatctccatccaatgctatcatctttgtgcgttatacacagaaagaagtaaatcgggtcttttagccatacatatttgctcatgacatcttcattgtcttcattcgcaacctacgagccaaaaccatgtaccctcgttgatttaagctctacttcaaacatcgttagagcactccttggtatgtgattttagttattcgacttctagcattattaatatgccatttacggttttaggatttgatttcaaactctattggttgtgttgatcatgttgttagtgctatgcagccatatcattatttatcactttattagaatcgaaattatcctagaagaaggctttttttacacattttttcgattcaattgtgtatgtgataatttggaaacaaatctctagagtttattttatatggtaattttggtactatattaaagatagtcaatgttttccccaaatattatgaataaaattcgaatatatacttttatttttaacgttttgcttttatatacatgcatggaaaagaattgtgaaaatatacctctaccgcagaatggagatgcgggaccgaggcagtgccgctcgctcccgcgtagcgtctgcacggcaccgtcgctcccgcggaacgtccacgcggaaccgttgctcccgcacgcaatgcctagctcccgcgcgccacatacgcgcgaccggcgcggtccggtgcagcggggacgcgtgacaggcgcggtcccacgcgctaacgacgcgcgaccggcgcagcaaagcaagcagcccatgcagcgcatgcattcacgttgcatgcattcaacggcgcggcggttccgcgtttccaggctgtgggatcgatcggtcccgcactgctgttttgcgcgactgccggttccgcggaatggtggtgcgggaccgagacagttccgcatgacccctatgcagtagagctatatttttgcaaaatttcattgcattggtatataaacgcaaaataacgaagaaaaaaaatatattttcaattttttttttcgtttgtcctctctctagattagaccacttcttattacatccttcttcttagcgtgcacctcacgtagggagagcatcatctccatccaatgtcatcgtctctttgcatgttttataaagagaggtaaatcgggtattttagcaatacatgtttgcaagcgacaactccatcaattgtcttcatccacaacctatgcgctatggttgttttctcgtcgaactcaaactcttgtttaaacatcgtcagggcactcctagttaagtgcttttagtgattcgacttctagccttattaaaatgccatttgtgattttagtgatttgacttcaaactcggtttgttgtgttgattatgttgttaatgctacgcaaccatgtcattagttataatcttttgaattcaaattatctaagaagtaggcccttttagtcttttaacactttttgggttcaattgggtatctgataatctagaaacgaatctctagagcttttggcatatggtaattttggtattgtatttattataatcaatatgttctcaaatgctactagtgtctttctctcctcattagattaactcacttcttgtgtctaggtttctttggtactctgtccctctgcttagcgtgcaccacacttaggatgagcagcatatccatccaacaccattgcctctttgcgtcttttacaaatagaggcaaatagagtcttttaaaaacatgtgtttgctcatgacatcttcattgtttttgtccacgacctatgcactatgacaattttctcctcgaactcaaattctacttcaaacatcgtcagagcactccttggtaagtgattttagtggttcgacttctattattattaccgtggcatttacggttttagcgatttggcttcaaactatgtttactacgttgatcaccttgatacttctatgtaatagtctcatcctttatcaccttaccggaattgatattatccaagaagtaggcctttaaaggtttttttttacaccttttctagttcttagtgagtatttggtaatttggaaacaaatctctagagctaagtgcatatggaaattttagtgctattagttataattaacatgtttcctaaaatgtaactattgtctttccatctcttttcttagcgtgcaccacacatagagagaacatcatatgcatccaacatcatcttctccttacgtcccatagagaggcaaatcgaggttttttagaagtacatgtttactcgcaacatcttcattgttcttgttcgtgacctgcgcgctacatccattttttcctcgaactcaaactctacttcaaatatcggcaaaccactcctaagtgagtgattttagtggttcaacttctagcactattactatgccatttgcaattttagcgatttgacttcaatttagtgaattgacttcaaactttgtttgtagttttgatcatgttgttagtgttatgtaaccatcttgttagttatcaccttatcagaattgaaattatccaagaaataggcaattttagtgtttttttacacttttttcggttcaattgtgtatgtgctactttgggacaaatatccggagctaattgcatatggtaattttggtaatatattcattatgatcaatatgttccccaaatgttaatgcatttttctctcctcgctaacctactacttcttgagtctacgtttctatgttattccatccctccaattagcgtgcaccaaacatagagagatgatcatctcatccaatgctagtgtctttgcatcccataaaaagagaggcaaattgttttttttagaaatacatgtttgcttgtgacattttcattggtttcatctgtgacctacgcgctaagattgttaactcgtcgaactcaaactttacttcaaacatcgttagggcactcctaggtaagtgattttagtggttcggcttctagcatttttaatatgccatatgcagttttagtgatttgacttcaaattttgtttgttatgtgtatcatgttgttagtgctaggcaactatcttgttagttatcaccttattagagttgaaattattcgaaaagtaataatttttctagcaataacagttaagtggcaatgggatgagaaatggagagatgagagagatatgataaggaagaagaaaggatgggttgatgacatgtgtgcctgttgcttttctttttgctaggtttgtttggtcgccatatggtccgcacactttgtcatcaagatgaaaatgggcctgtgcggctgcccaggctgcacccggcacgaatagtgccgcactcactgtgcgcagccgcaattgtcggcctgccaaacgtgcccaatataagtctgcccctactttaattgggtaaagctaatgattttgaacttgaagggtaagtctggtaggggtcaagctcgagcacgaccaagcctgactagtatgctttttcctaggcctaagcctggcccaagtaaaacatcgacactgcctaatttcaaataggaaaaaaaaatctttgatgtgaaaagagatgaatgtgaaataagggttaggtagaactcacccaccggtgacaacatggttggactcctagtcagagacttcgtgatgggcgacggtgagaggtgattggcattgaaggaatatgctgcgcgtgtggccgtcgcatgcagactacactaagccaaagcggagtcgagggcgaggcatctgatttctgatcagctaatgtacgtgcaagaagttgaggcatcaatcaacggccttgtatgattccattgtctctgatgggttgagtaggcttctatcattaggggggtttccctgggattgaaggaatgacaatttttttttaaattccccttcccaatcatttctaaaactcctatgtttaccaaccaaacaaaacgcgtcatcatcattcctcaaactctcattccttcttaacaattctctccaatcaaacgcgccgtgagagtcaaaggcagggcagatcacggactatttgactctcattcatttttttcttaaaacaaactccttccgtgattacatgtagttgtttcaactggattttttggggggccgggttttgacgtcttctgaaattgaaaggagctgtgttcgtgattgcaatcacgggagatcgagttggacatttaattacatatcgttgttgtttgcagctaaccatcaacctcttcgatctgcctgtgctgcaagccacatcaccgtcgagttgactaaaaaccaaagatatttttgccatctggtattcccacaagtacatacacaaagcctctgattattttcattgtaacacaagttctcttgcattaatgaaatgtatctgctacattttgctctctttttaatttttttatggttttctacttaaagatgcatattatggacaaaatatgcacactgcatttatagaaacacactcaaaccccccccccccaccccccccaactcccaaataaaaaaaaaccttatatccacctaataataaaactaggaactagacacatactgatgaatattgcaaatcttgaagccaaacatctcaaccattttccttcacaaaataagtaaatgtgtgcaccacgcaaattaaaatatcatgtatatatccttcctctaacttcaaatacaagtcatgttatgtaaaacagtacaattaaggaaacgactcaaataattttatcgccctaatacattaaaaagtgacttatttatttatttatttatttgtaagagtgacaccatttatttggtaagaacaaaccaaagcaaaatgatgaaagattgaaggttctatttttttatgagaggttgtaaaactaattaacttaaattttggaaaataagacgtaaagtaggattaaaaattacatttataagcaaagaaaatactacacaattacacattaccacaaaacagaggacagtactaaatcctctatttctatttaaagagaaaatgaaaaataactggtcgatccgctctaaagaatttctctctacaatacaaaaatcatggctcttattacaactaatagtaatgctacacatacttaaaacttccttacaaacttataacaaaaatctcattatagaagattcaaccataatgtgacaaatccgtatttgtaaaaagtttataaaaaaaatagtacacgtatatcgtttccctactgctaattaaccctctataaatgcatgcctctcaccactctccctccattgccatttcccctactctctctctctctctcaactctcaagccaagaattgtcagggacacgtagccatgaggacgatggttgcggcgccgccgccgtcgccggcgatggctgtctcgccgtggcactcgccggtgccgtacctgttcggcgggctggccgccatgctggggctcatcacgctcgcgctcctcatcctcgcctgctcctactggaagctcaacagctacctcggcaccggccactcttcctccgccgccgccgccgccgccgccggagatggaggcgacggcgatggcggctcgaagtcgccggcgaccgcggtggccgcgtttccggtggtgtacggggacctcgtcgccgtcgtcatggcaggggagaggatgcccacgttcttggccgcgccgatcgtccgtcgaccgccgtccactgacacctcctcctccgccgttgccgaggtggcctcgccggagaacggatgcgacgcggcggagggaggcgcggccagccggccacctccgcagccggtggcggcgaggcaagccgtacagctagctcagctctgaacttccaactgtaaaaaggagaatttgtgggggccttttctgataatttttttgtctccttttttccaaatcgtactctttttttttcctattttcatctctactaggattgtaaataatatattggtgagaattcagatgaagaataatttagttggagatgaaaatatgataggaatgttgtagattctcgtcgagcaaatataattaatcttcgaacaaccagcataaaaaaaacacgacagcatgacactcccacacaaaccatgcatattctactattctaggatatgttatgcgcagtgctaattgagcattctaattatgcaacctctaattctatctataaaaccttcacgtaccttgaaaattattttcctcactatcgaaatatgagtcgcgtctaggttttttaaaaggacggttttacatgacttctatataaaaaattaaacgtattcaaaagttacaggcaaaataaatcatgcaactctcatatatatacacttatatgtttgcttaattacctttttcccccttttatgtgaactttagactggatttcatggaaaagatgtcctagcttcatgtccaaaggaaaaaccgggcgggaaagctggagtcggttgcttccggtgataaagttgcttatttggttggcaaaaggacacccttttgctttgtcacgtagacaactttgtctcatcaaattgaagaggaagccctcgtactatagatgttggggatgttcatataaatgttggattttgatcaaattttgttagaaagttgtttttctttttttttccttttggcaaatggacaccttttgctttgtcacgaagctaactctgtctcatcaaattaaataagatggctctaactcatatcaattctgaagcttggagatgttcatctaaatatcggattttgatcaaattttgttagtaatttgtatttccttttcttttcagatctgattaagtttgcagtaactagcacaggttcggttgctgacaattgagctgtttgtggctgattaacattgggccctgtaggcccagtactagttcttctcttgaatcaccagaaccacagaattcagatcgaatcctgccaaagtgatggtcgttgtaagctgtgatgcatgaataataaattaataatcaagtcattttttttaggtatacattgaccacaagtagctctctacaggttattaatgaaaactatgtatatatgtttgactatacattgagagaaaatgactgctacatggcaaatgcagaagaagaaagttatagagaagataaaaagaaaattaaagggaatatgtgtgtgtgagagagaattcaaggaggaaattaaaggggaccgacctagctacacgagtgggacaaatccgatggtacatgggactaactgtacctacacgtcgtcacatacatatgcgacactgagacgacattgcaaaatgagctgtctgtttaacacctggtttaagttcacaacctactcttctattggattacattactctccatggagtgattttgggactgctcgcttgtggctgccgcagccgcgtcctaccgatcagcgtctttaattaccttctctttcaacgtatggggaaatatatagataccctattttcattgtaagctagctagtgtattaagtagctcattcgtgcgactatagtcatcaatcatgttataaatggtgtgtaagaaaatatattaatgataatatgaaattaaatgattagttattcaaaacgtataaaacatctgaatttgttcgaaacttaattagttgatataaattaaattaattacatgtatatacacttgtatagatacacaactttgagtattcttaagattaggaatactcatgtttaattgtagagtttagagtaccatgtttacacagtttttactttgtaattaattatctgaatttaaagatgtatttgtaatataaatataggcaaatgaatgatttgtacattatacaatttactatattactaagtgcgaaaatagaatcacatatcctctctacatcaagctccatgcggtccacctgtaatcactttgtctccttatatacattatgttttgattaagtaagcggttatatctctatttgtaaataataatacctttttaccatctcaagcaagtagctcttctattgccagagaagggtcacaccctatgtttgttactactactttgagtttcatcctatggtcaaaattgattcttgcttttaatctgatggctaatattcattcgatgatgtggcacactctagttgtatgttgggtttactttcattagataacatttgacgtacaccttctattgtcgtaagtatcaccaaattttacattaccctttgatacttttaagaaccacaattctttttttttcccgcctaacccaatagcgcaccgccactattgaagaaacatcgatagttgtgaagataaattattggctctttcaacatcaaagatggctctcgagtacggttttgggaagataaatggttggggaatgcctgtttaagagaataatatccttctctctataatgctgttaggcataaacatgtaactatttcagaaattttacagaccagtcctctaagcttttcttggcgcagggaccttactagctctaagttagtggcgtggaatcaccttgtctcacgcatcgctatattatattatctcacgaccaagatgagtttaaatggaatctaaccactgatggcagattctcagttaaatctctttatcttgcgttggtgcagaccgatgttcccaatataaacaaaagaatctagaagatcaaagctccccctaaagattaatatcttcttatggtacttacgccgtggagtagtcttaacaaaagataatctgattaaaaggaattggagaggaaacaagtcttgttctttctacctcaaagatgaaactattaatcatttgttctttgattgtcgttttgccagcgcggtttagtctttaatccagattgcttcgaatattagtttacctaatagtacaactcatatgtttgggcattggataagaagacaaccacgcattttgagaactttggtcttattagaggcaactaccactatttgatcaatttggctttacagaaataatgtggtttttgaaaggaaaagcatatcttctcctttgcaggttatctttttgactacacattggctctgctcataggctatcctccagaagatcaatttgcggggtactatcattgcggcttgtcaacaattggagctagtgaccatggagttttctaccccggcacatgggtggcgctctaggctacggttagagagctcctgaagttctttttgttcatgctattttggatgatgagtttatcttttgtttctttcttgttggctgtgtgcactctttgggtgtagaagccagaggtgctctcagaataattgtatcacttgatgaaatttactaagattaataaagcttccattatctaaaaactattgaagaaacaattggcctcctctcaaacactatatttgaccatttaaatatgtgatgttgttaactttttaatatgatatttgatctttcatgttattttaaaattttgtgcaagtacagaaaaatataagtatgcttaaacaaaagtacttattgtgaaccttattgagaaggttaaaatatttatgaccgggaagaatacattatactgatcttatccacattgcatatgagtacgtgatcccttccctaatcaaggcgtcacacactcccaacaaacaccccaacagtaagtgtgtggaacatatataggccccccacaagatcgttgtgcaagtgcagctaatgatcatctccttctaagtgagagagaagctaagaaacctctctaaaaagagatggatgatgaatcacacacaatcacccccaataatcacctgatctgctgatcctactatgtgggagccaagtgtcccactgcaacagcagagtgtgattagatcaaaccagatgcactagctacatggatgcatatgtgtttgtgtgtttgtggatcttggccatgatggtaggctaagctagacctgtaccctgcactcatgtttcccctgacttcactgccaagagagactagcaacacacaggggatccctacactgcctttctttctttgcttccaccctaaacaagcctctgctatgtatgctaccttctcttggtctctaccaaccagcattactgtctcaaccaatggcagttccttcagtcactaactaattgtcatcctggttacaagattagtgtgaatctgaaacctaataattgaacttgtatgttttgttgtaaatggatattggatagcatgccttggttttagtgacagcatgtgtgtacttgcaagaaatgagttggttttggtccttggaaaagatcatcgatgatagaagataaatgtcttattggagtaattattattagttcaccgagctacaaatgggaattgattcttaatgttgagctgaaaattggagagaccaataaaccccaatggagggaagtggacactgacaaatatgctatggtgatttatagtcagtgaaaatcttattcaattgattcttacgaatgattgaggaattcaacaggaaactccagatgaattcagtaggaaacaattttattaccatggaaatcatccaattcctacattggtaatgcatgacctgattcactattaaggttgattaaaagctgttgatgtaactcgtctaacaactagatttaacggttcataaccgaaaaacggttgcttttctagaacatgttgattgcatcaaaccagtcaagattcttttcagtggacagcatcatatgctttactaccaaactaccaactcaaaattgacataatagaatgtacatgtttctgtactaatcactcgagataaaattaaggaccatgaattaaaagcaactctaattttgtgtgtactacatcacaggttgcactacttctaatggtccatgatttggctaaagcatcaattctacctgttttttcccattgtcatgtaggtaggtgcagcactggaaacacaaacatgtattgaaaactaaagaccaaagggcagcaaaattcagcatctaggccaaatttctttgtaaattccagatttagaagttgggaaaaaaaagtgaaaatccatatatcatcaatcttttgccacaacactaacatttttatggttaaatttcattgaatttgttaacatgtagatccctcaaaagttctttaaaaaaaaactctgcaagatcaaaccgggcaacagtcaagtacacctgaagggtaacaatactctgcaagatccaatcagaagcagccacatttcctaggttggcactactctacaactcccatgcaaactctacctatctctgtaccttcacgcatcttcagtcccaagcaaccccaatttttcctctcttttttttcttcttctttttggtaatgcatgccatggccattaccattctgctgctactgctcctctccttccatggtggtcgcccacatggcatagagctcacaagctcgatcagctaatggccatcactacctccaactaactaaccaccttttctctccactgcacagcaacttcatcagtcccatatctatcaaggctatcaccatgagtgtgcaaaatattcatccggccatgcctcccctacaaatacaatccctgtccttgtcgtggccgtcgacatcgccggagtcggagcgaaagaaagaacagtgctggcactaggccactagctaagtagctagctagctagctagtagcagtggtagctgaagaggaggagctagttgatcagctgagctgagctagaggtagaagaagaagatggacaccattgaggagtgcagtgtggacgatggacgccggctgatgctgctggggtcgaggatactggtcggcgtgcccaacaactcccggggatgctccgagctgctctcgtgggcgatccgcgtcgtcgcgaggcccaacgattcggttgtcgccgtccatgttcttggtacgcacttgaattaatctttctttcctgtgtttgactgtgtgtttgtgatttgagttgttcttctcctttctttttgtttgcattgattgattgtttgattgttaattgcttgattggtttgttggttatggttgtggtgattgatgttgtgggttgtggcaggagggagggggaggaagaacaggctgcagaaggcgaacgcgtttgtgatctacagctcggggagtttgtggagacttgtgaggctaaacaggtgagatttgattgaaatcaaagcgaatgcagtttggtttggatttattgagttgtatgcactgaccagttcaacccaaaagcctacactgataaggaaagacagacaattcactttatattctaacaggattgtgttctcttttttatttgttcatgcataggcggtcagtttctggtgaattattttttggtgcattggctatgcaaagatggtactagtgttctgttctttcttttctcggtttatattaatcttgaatacttttctttctgttggcatttcaaaaagaaaatcttttcttcttcttttatgttgatcttggattccttttctttttggcgaacacattgcagtgggaacttgaaagcaaagtctgtgatcattagtgttagtttggtgcccctctctgtcaggtttgtcatgtctcttgtcagctgttagtgttaggtgaagttgtgactacagtctagtacaggtcatgattagcactgtgctctgagtctatctcttctctctctctctgattttgttttttgaaaaacaatctagtttcaattttctctgtctctgatttttcttcatgtagttgtcaagtcttatcagttggaattttgggaagatgtactatcatttgaacttgtaggattacttttgagtgaagctgaaactaagggttacagttatactgaatactgaatttttggtcgtactaattatctgaatccctatcattttggtttaccttttatttatgctgtcaggtaaatttggaggccaaggtggtttgcagcccaagcatttggagagcacttacccaggaagctacattgactgatgcaaacttcctcattgttgggagatcaggaaatgcatatcgtaggtaatctcaggaagctgcttctttgttcagaaaatgaacttggattttcttttagttgatactctcattaacgtaatcatgtattatctagttagtattcatctcaaacgtaattatggatattctttatcttgatagaagtactgtacaaaatatttatccccactgttaattaggcctaaagcactaaatgctacaattgtcatcataacaggaatcattttgaggttgcaaactactgctacatgaatgctccaagaaactgttcagtgattgcagttggaagggatggtctaccacagagcgccgctcgattcaagtctcgatcatttgatggtaaaaatgatcatttttttctaactttcatcactagcaagtttcatttacaatgtactaattctgaacctgaaattacagacagtagtatcttctcaagctcaacatggagcaggagatttccaccacttcagaagctactcagatcaaactcagcgcgaaaaccggcacaatcaacgggtgaagccacagaggacaagagctcaccaagggcagttcttgatggtccagaggcaggggagcaacatgtcactgaagaatgctacagcacaacatctagcaatgaggtgagccggcgtggtcaaaatggcatctggaggaggctatctgacatgaagctctggcttccattcctgcggtccatcgacgatgaaaacgtgaaaggaggtgataattcttcgaattatactgaagatcagaagcctgcctggaggtgtttcagctaccaggagatttcagttgctaccaatgacttccatccaggtaaatatttccatcacttaactatgcatttttaattttagtcacctcgaaaatttctatttcagacatgaattctgttaaaaaaaaggttgtgtttggttttataaaagttagtctgaatttgagaaaaatacaaatgcagaagcaagtttagtactaagatttgcaattcatttgatggtttttcatagataacatggctgggagaggaggctatgcagaagtatacaagggtatcctatctgatggacaatgtgtagctgtgaagagattggcacaaggtaagccaactgaacagaaggaaaaagagttcctgacagaattgggaatccagggacatgtctgccacccaaacacagcataccttcttggctgctgtgttgagaatggactctatttagtattcgagttctgcgaaaacgggacacttgcatcggcactgcacggtattgaatttgatacagtagtaattttcaagtatgcgttgaaatttttgttggtaaacatgtaacagtaggagatgaacttttgcagggaagagtgccaaaatccttgagtggcctttgaggtacaagattgcggtaggtgtcgcgaggggcttgcagtatctgcacatgttctgtaggcaccggatcatccatcgcgacatcaaagcctccaatgtgctacttggtgatgattttgagcctcaggtagccccccattttcatgctgaaaaaatggttttggccatgcgctttgcacaacaatggaatcaaattggatcaaacatgttaagatttaataagaactgtggcatctgtaacagatatcagacttcggactggcaaagtggcttcccaagcagtggactcatcactctgtcatacctatagagggcacatttgggtgagcacagtgctaatgtctgaagacgtactataaaaaatacaaaaacatgtgtcaattaagtactatgaagataaaattgcattatgtcaactgaatctttcccttaaatgaattcaatgatttgagcaggtatttagcaccagagtacttcatgcatggcattgtcgatgagaagaccgacattttcgcattcggagttttgctgctagagattgtcactggaaggaggcctattgactgctccaagctgagccttcttcagtgggtgagtactgagtaccactgcaacaatgcaagtagtgtaacaattactagcacctaacaaagcatatatagaactcattttcttctactgctccaggcaaagccacttcttgaagctggacaagtgactgaacttgcagacccgaatctcggcggcgattatgacaaggatcagctgaagaggatggtcgcagtcgcgtcacgctgcattatgcgaccggcgatgtggcggccctccatggctgaggtagaacagttcatcaatccagtggttgagcagatcaaactattacaacttctgaaacaaaaatgttacctatgagcatatgacaaaatgttccccctactgtgcattgtcaaatttcaggtgctgcatttcctgtcaactgatgagtgcctgaaggagccggagaagtggaacattccggaagacgaggtcgacgacatggatgattgcactatgttttctgaatctttgtctccatgaagacaggctctgatattatttggtctttggcatggctgttcttcatggtgatgtcaagtgctaccttttatgtttcttctcttggttttggaatgttaggtgcttggtatgtaatcatgcaatttagggagaagattttgaagatatggttcgaatttatctttttatggatgaacataaaaagatcacattttcctgtaaattattcatgagaaaatttggtgctgttgagccaagcatatatcatgtgcactaataaacagctcatttgtaagtatgtctccaaacaggcgctgacaagtagatccacttttcgccaaaatattcatgcacattttaggaggaatgaataattttgtatgtagtaaaatcgtacagcaaaaaataaataaatggtgacaatcttcagaaccatacacacgtaggactgaaatagtttcatcgtaaaggatgtaatgtgagaccattataaccaggtcagaaacaacatgaatgtgtacaaattatggaataaatggtaaatgtgtcacattatgcccagggttgtctctgggcatagctaaaaacagaatgaacattctgtaaattggagaatgggatttatgcaggcaaagttgtgcaagaactgcaaatacacaggtttgaagttgcatccgaaaagagtgctgctccacatcagagatatacatatttcacttcagcaataccgacttatctataaatcctccaaaaaacatttttgaattggaaatataaataaatcaggaaaaatcctataaatgttataaccatggttctacgtcctctactatgtggcatcaaaccataaataaacaagggtcaaatttatatgaattctggcacttcaaaacaatcagataactaaaaagagagagaaaattattcttttatattttattgcaattggaacgaagtggagcattccaccagagaaccgaataactgaatattcccaacaaggattcctgataaggaaaacattccaccggcccaaaacagataactcctgcatgcgtcatgccatcaccacccaaaaacctaaacaaaccaccatgatcaggcaccaccctcaatgctcaaaacccattgattaaaagaaagctgcagtcatcatgctattattaataagaaatgacataggatttgttatcttagcaatgataattgcaccatgaaaactacaggtgaacaactatatacaagctacctttgcaatacattaatccgctataattcgatgaaggagatgaggatctaccattggaaagtagaacgggatcgccgaattctgccatgaatgttgactgcaactatgacactttttttttttagataatgggaatttataaaaccacaataactatgacgcataacataattctgcaactacgacttgtaagatagcatcaataattcatcatttcattagcaaacagtataaaatgaccgcagaaactaaattgacctctaattcattcatggaaatggaattttacccaatgaaaacctacatcatcagttaaaaacgactacggatcatcaccgtcgaatttggattgcgagttatgtgatgacacacaattgtttgtgctagtacaactcataagagaaaaatcacattggattttttttattatttcagcactgaaccatagaaattaactacatgagttatcttacaaaagtcacaatgcattaataataatccccctaattttaaccgatggaatttggaattccacccaccgaaaacccgcatcagcagttaaaaatagtgatgcgggtttccaccacggaatcagaaagcgacggcgaagaagacgacgacatgaacaccatgcgccaccattagcatgacggcgagattatgacatgttgcccttttcttaatgtttgtcttaagacgggcaaacgccattgccgttgccgcgttggcgcccattgggagaggggtttctggaactttctagaaggttggcacgacgccgtaggccgcggtggcagcggtggtgctgtccatgtagaaccctacgccgtcggcgcggccgtcgtcggagaaggagagccagaacttggcctccttcgtggcggcggcgccggcgccgccggcgccgctgactccggcggcggccgtgctgtcgtcgtccgatgacgaggaggcggcggcggtggtggcgcgcttgacgaagcggcccttgatcctcggccgcgcctcggcgtaggccttgcgtgaggcgtagcggatggtcttctggaacttgcggttcttgcgcttctcccggtagcgcctcaccctctcctccctcgccgccgccgccgcggcgaccgcgccggccgccgaggtcgggacgacgacggagtcggccggtgaccacggcgtcaacgcggcgagctggcctgggtgcaagccccagcgncggcgcggcggcgccgtcgaacgacgacgcgaggccgccgccgccgcaggacatgatgtcgacgtcggagagcaggtcaaagaggctcctttcggcgccgccgcngccgccgccgccggcgctgtcgttggtgaagctcgacgagctgtcgttggggctcccctgcccctgcccctgcaccgccgcccccgccgccgcggcggcagcccatgacgaggcggcgtcgtcgtcgggcgcgaacaggtggtcgtacaccccggagctcgccgccgccatggcgaccgcgagcggcacgcggtcgtggcgcgacgccagcgggttggccgcgtgcaccgcggcgtcgcacggcacgcagagcgccgccgcgtccgccgcgcagtacaccgtcgccgcgccgccgcacaccccgcacgccgcgccgccgcagctggccgggctcgcgctgccgtcgcttgccatcatctcctcaacaagatcttgcttgcttagttagcttggctaattaatggcttaatcttaagctaattttaagcttgagcttgagatcaagtggcttaagctaagctaaattgtgtgtgtttgtgagtgggagtgagggtgctgagctgtataaatagggggaagaagagacgccaagagaggttaaggggaaggtggagttggtgaagtgcctaagaggacacgtggagcgctaatggccaagagaaacttggcatgagagagaggaggccaagtgtgatttcaggagaaaatggtaggtgtactatggtaggtacccttgtttctcggcctaaccaaactgtgcatatgtctcgttgtctcgatattacgcgatacaagtagattctgtaacaggacgattaagattatttcggtcctgtaccatatcacatcgatttttctctaatcgggacgcttttgactttttagtttcaaataaaattcatgtaaatattgtaactaatcttgcaaaatgtgtaaatatatgttgtctttatggttcgattaagatactttaaatataattggcatgtataaaaactaacaaaatcataggtgaggtaaataggatacttactaagatcgatgaaaattaatatgaactcaagaggattgttcaccattttttttctagaaataaccattgtaggagtatcttgtatcttggttgctaagtaggttggaaggaagcatagaacaacatgtgattttttttaaaaaaaagggatttatgcagcaaccaattacaaaggaaaataatgtgttaaccagacttggcattcaggactgtttgtataaggagtttgcctgatggacccataactacaaatctaccaattagtaacttactattattttcagctctatagtttacttttacaattatccataatataagtttatatgaagaaaatcaaaatagaacatcattaagtaattttcaaccaggctacgtagagaatagcccgcacatcaacctcttacctatcactcagtcatcgctacatctatgtgaaaatcacttggctacgccgagaacagcgcatccaccgctgtcctacgtcacaatcaccccgttaactgtgtgcaattcctagtggacctacgatttttccactaatcaaaaccgggtgattaagcttaagtgatcaaaggtggagagatgagggtagagagagctgtcacactttggtctgtgccgacgtagggcccacaccacaccagagagcgcaggaaatgatccctggcagatgacgtggcgtgtgcaatcatccaggatgttatattgtggtggggcccaccggaatttcaacgcgcatatataatactgcgctccgattggttgcagcatgcttggcttggcttggtcgtcttgatcaatcagctgttgacggtggggaaaactcggtttgattttcaattttgtttaatttggctatctctttgcgaaagggcctatagcctggtgattacaagagcctcagtagcacctgaggtcctgggttcgactccccttgggagcgaattttccaggatttaacggcgttgtgcttttagtggtaggcgacgtacccgtcgacagcgaagcgcctgtagtgacttcatcaatctctccaggatttgtcggcccagttttcaaagatgctcttataggggtagggtttgcgtgcatgtgttcacaggggtgagtgcacgtgcattgtgagtgtctgcgtgcgtacatgtgttcacaggggtgagtgcgcgtgcgttgtgagtgtctgcgtcataattctcaaaaaaatttggctatctctttctatctgcactgtttaatcctgccgtacaagctagaaaaacttgaaatctggtttctatctgcactgtttaatcctgccgtacaagtggtggtggtgatggtgtagtaataactcttttccttcccaagggaaaaagaaattggttttgtggttaggggaaaatggattttcttctaagaataatttagataagtactactgcaaattaaagacgtattgaagctcatgaaccctctagaacgtatgaatttggcataattaatttgtacatgaagtagatgacacccgcgcggaaaattgtatatatggataaaaatcaactatatttgattaagggcatgttcactttgatgaaaaaaaaaattactaaaatttggtattgctaaaattttggcaacttaccaaaaatttggcaagattttttatatagggcttgtttggtttggagccaatttttgccctaccaaaatcttgatagtaccaaaacattggcaaattttggcactaccaaatttggtagtattcaatttgaactatggtgggtaaaatttggtagcaaaccaaacatccacttgctactattgaagttgccaaaattttggtagggtagtaaattggtatcaaaccaaataagcccatagttaccaaaacttggcagcaaactaaatatagccacttttttgacaactttactaaaatttggtaaggttgaaaaagacattaaagtgaacagggcctaaatagctagagtatgatagccaagaataaacagaaactgtaccggttatcactattggtgttgagttttttttttggtgatgtggccttatacatgggttaataatttatttataggagtaaattcttaatgtgttgtaactaggattagttcaattcctactggaaattggaagattgcttttgagtgttgtataagaggcacggatctttattttgagatatactcaagcttactgactcctttggacctaccgaatttttgcagggtttcagtataaataatagttcaattccagcatttagatgaatccacatgttctaaatgaggctcaaggctccatttggaatgcataaatgagatttgtaagaaataatttagttttgtaggaatatatacaaataaggacagcttgaatggagcctaattattataatttaatcgccaatctcttgcaacggattctctcttaaagtgaaatcgaaaatagtggtggagccaacggcgccatcgagtctaagcaactaatagtgttttctagtggccaatcaatattttcatatgttgatggctatctacaatggagatgccagcgtagggctcagaatggcacccgaccaacccgctgtgtctgattgaaaaagatataacaaaacaatatggcataagaccacttgttattgtccacgatacatgaaagaatctctttttaacgtgccaaaaatactttatgggcatgataaacaattccataaaatccaaattactcattttgtcacaaaatataactgcagcgagtaatatatattatagcctaaatatgtacagtcaaaattctataatattgccactatatagtgcaagtcgttcatagattctatacagaactggagacaagatcacaagatttgccatgcatgataaaggcattgatgtcaaaacggattaacattgtaatatttggtaattttccttataagcataacgttagagaataccaaacctgtacattacaaactatgtcgatcgcttacaatgactactaagaaaacatagatactactaagtatctttcagtgaaaataaaataattaaggatatacttccacgagcgagcacatgttaattttttactctccctattgtagtataaattaattccccattaaccacgtacgttaacactggaggtaactaaaggtaccacttaacttttgccattatcatacatacaaacaaatcagctgcattaccatccggataaactttttttttacaccaaaacaaaccgagagcaattgttcttggtttggtccagctagctagctagtggacgacgactactacaaaaggtagtatgaaactttttcttcttgccaaaaaataaaacgaaagagagcaaaaaaaaaattactgctctactttagctaagcctgtagcttaatcatggcttagctagatcgcactgatctctgatctgatgttgctccacactgcactccatcattgcgtatattttttgcggccatcgttatctcctctctcctccatcgtgctgcgaaaaggcggccactcgaaagtcaacggggtcgcacgcgttgacattttcgtcgagcgcggaaacaaaagccggctcgagcgcacgcacgcacgcccgccccgcccgcctcctttcccgcttcgcgagcgcgcgacacgtgtccttctggaacattcggccagagatcattcatagtacagcaactgatagcggtaaaaattgatagaagtattatttgtagttaatctaataatctaaatttacaatagttttatataaatatatacaataccatatgcaactgatacacatacattattttaaagctcgtgctataggtctacaggtgactatatatatgtataccatttttcttatcttttacttcctccgtttctaaatatttgacgccgttaaattttttaaatatatttgaccattcgtcttattaaaaaattattaattctttttctatcatttaattcattgttaaatatacttatatgtatacatatggttttatatatttcacaaaagttttttaataaaacgaacggtcaaacatgtgctaaaaagtcaacggtgtaaaatatttagaaactaagggagtactatcttttttctttgcttgtagatggcttatagccttctaccccctatgtttcataatataagttatttgaaatttttttcttagtcaaacttttttaagttttaccaagtttatagaaaaaatataataatattttcaacacaaaacaaacatattatcaaatatattcaatgttagatttaatgaaacgaatttaatatttaggtgttgctaaatttttctatgaatttgatcaaacttaacataatttgactagaaaaaaagtcaaatgacttataatatgaaacaaagggaatagcattatactctctctatccttcactaagttaatctagtactacatatgatatatcttagtaatacgaatttgaataagagtctattcagattcataatattaggatgtgtcataatactagagtaatttattttgagaagaagtgaatacttggtagagcaaggataatagtaagttataaactaactacaaacttacgtggaggagagaggtaataa

SEQ ID NO: 27303 - DNA, 7478 bp, Oryza sativa
ttttttttcgttgttgcttcctgttgtgccttttggttagagcattggacggtccgtccaatcaacagtatgcttaagaaaaagaatgcagtaatctagtgggtattttactagaggttgcacttatacgggttaatattttgttattagacaattcattcatttttagagacacaaggcaattatactatagcccttacatccaagtaatcaaacaaatagagtttcaaccaaaccaaatagtcaattaatcatctaaatggctaaatgttcagatgtgttacttagtttggctgtggcatagctacggcagctgccataccatgccacaagagagggtccgccaccgtcgacagtcctgacgaactggataagttgtgtgtaggtcgttcacatgtcgacaatcctgaagaacgggatacgtcgcacgtagaccgttcacacatatgtcacgcacgtgcaccattctaggggagtcaagcgaggtgcgaggcgagtgcatgtttttctctagttctctctaccacacatgtctaaattagctaaaagagatcactctctcttctcttttgagaatgtatctcttttagaataagtaaggtaataataaaggtgggtttctgtgattttttataaagttaattcttaacacatttattaatttcaacaataactcaagttaggtattttatggtattatagatctcttatttttcacgaataagcgatccgatggggccaatagacttgtagagtgacaatcaaatcctctccatatgcacatgcgcacgtgagattctcacgattagagtttacatatagtgattttcttttcaatgagatttttttcttttccataattgtaaggcgttgtgcctatgccaaggctaaaatatcacacacgttttttggttgcccaacaagattttcttccggaaccgtgtgcgttgaccttgaaattagctgctcgatcagtcacatcatcatcgatcgatctagtcctaaatttcactgtgcggctcacaaaaaagacgaacaaaaagatctcactagctttagctagcgtgtaatttaggcatgtgtggcagcagcaagtggaatgggtgacagtgtcaagtgggggggggggggggaggggtcttctttctttaaaaaagagatctcccacatgaaagcgggggattgatccttggactgcgataaatctcgccagaccgcaatatgatatatcttatgctctctttaggctgttcgaaatcatacaggagaccgttgatataaacaatttcttataacagtctatatttcgatcatcgatattatggtaaccgagtgggtaccaacttgaacaattcttgttattttttatttttataataaatagccgttttatcaagtagttcctaaatgtggagtgtctcggaaagatgataatgaactgagagactatccacgcatatataaaccttacttatacatacattctctacaatattttcttaaattttcgttgagggagagattaattactttgggatgaaactgtcacttaacttaaaaaggtctaacaacgtaaacagagaaaatgtaaagcaaatgatgtattcagtcaaagctaaaacctgttttaaaagttggatggttttcaagctttccttaaaacttaaggttctgaaataatttttttccccttgcagataagtgcgtgcaaatcaagctcaactcatcatcaacgggttaccttttccggcacggtcggctgctcatccaagcactagaaggtttcttcaattaggagtcgcccaggttttctgttcatttggacttatcatcttatcctcttttttttttcttctcatggttccagaaccttcaagccacgtagcctccaaacaaacaggacgactgctatctttcggcttgatgcacaatcacattctgagacactttccattgtcttctagtagcacttggtagaagctgctctcttgtgggccatcacaccaatagatattttttcttgagctagtgattcttgtcaagctggtgttccatccaattcaattgattattaattagctcatgactagtgtgcatttgggaaaagttgacagccagttgataaccaatcagttcaattcctggcatgctaatccttcccaagaaaattgactaatgcccgactagtgcagttgcaattataagcatcttaaaacacaaaaggcgatcgacagtgaaatgtaagataacaaaatacgtggagtacttatgggcggatccaacatgggcgctgggactcgagttctccctatcgtgttggatccccatgaagaaggtgaggagaaacggaaaagatgaggaagatgggggactgaaaaaaggatgaagaggatgagtacccccttcatataggatcgatcctgaatccactcccctatacttgtgaacatcacttgcagattatttatcggattagttacttcatgctatgaaaaatgtattttcttcttgaaaaagcattcttctactgcactgcaaaaactgttgtcttaagctatttattaaacttatttatgaaaatattaatttatctctataatcaagtagataatcaatagcaacaatctaattaataatccaaatcaaacatgtcttagtatgcatctgccaagtagtctagtgctaagttgcttgagtgaaggcttcttgttattcttgacatctcggcatgtcttagccggtctcggaaatgttcatggtgatctctcgagaaaattgtgagatgcaattttgtgaaggttttgggttatcttctggagtagagaagaactaccgctaaagggcgctcacagatttcatggccatgagaggaagtaaaactctcacttatagtgctccaaattagagtactagtggagattgcccaattttcgatatcttgggaaaaagtctcagcatcttgtttgcttttcctatctcaatctctttacctctcgcattttactttcatagattgaattagaattgagtaaaacttcaactcagttgcaaattttgggtcacaatggttgtcaaacataggaacttagggtagatataatcttctgttattgagttctaatttggccttgtacttagaaaatcctattcaccccgatcctatacacagatagattttttttcctacagatattttttccgcaactagtgattcttgtcaagccagtgttccatccaattcaattggttattaactcatgactagtgcgtttgcaaaagttgacagtcagttgataaccaatcaatccaattccctgcatgctaatccttccaaaaaaaattgactagtgtagttgcaagttgcaactacaagtatcttaaaacacaaaagatgatcgatggtgaaatgtagtgaaataagtggaatacttgtgaagaaacttgtgcagattatacagaaacacttctgatgtagtggagttatggctgtcctggtacctataattacataaacgcagaaacatttttcataggaattcagcctgatttacttaacgactttaatatcttttaaagttgttaaaatcgtgatcctaaatcgaaaggtataagtaagatcacaatcataaaatcgtgtacgtaaaaatcataaattctacctacatggtaaaatcatagaatcaaacaccttaattagaatcgtaaaattatataacagaatcgatatattttaacaaccttaatctccttcgtgcaattgaaaaaacaaatctccttctttgggcaaatgtgattactgactcaagtattatatggacacttggccttgcctatatctaacggaatcggaactgttcgccgcaaacgcgatgaattgtcggcacaacacgtgtctgatgtttaaggggatattgtagcaaccgtgacatttctatggaacaggatgtcgccgtaaacaaattaattaattaatcctcctaattccatgtccaagttgttaaggctgtgtttagttcacaccaaaattgaaagtttagttgaaattagaacgatatgatgaaaaagttagaagtttacgtgtgtaggaaaattttgatatgataaaaaagttagaagtttaaagaaaaagtctataactaaacacggactaggcgacagtgactattcgcgacgacggttgaacagtcgttgcaagaaaaaacaaacggcctgccctggtcctggtgttcagcacaagttatcagatgacgtccctgctgacgtcaattcgcagctggctttgtgctgggccaggtctatctagctccttttgtttaccagcagcaaagtcgctacatcaattattactagacgctatattaattagtggtatgactaataagccgtcgaaaaataaacaaaacgataaaagtaattcgtagataaatattaatctgtatattattgttgttttaagagtcaatgctagaaaataagccacggtgagaaaaagaatcccaaaatcaaatgcaaatatcatgatgttttggacttatggtagtgttttcttaagagaaatatacatataatatcaaaggaagattttaaaaacatataactcaaaagtaaggttttaagatgtgcttatccaagagtagagacgtatcatactttactactttaccatccgtacccttgtgcttatgatgttattgagttattgtggtaactttctgcgaattatgatttcatagttgtattacatgtcatcagaattgctaccaattgaacagtgatcataaagatgtatagatgaggtcaagagtagatttaatttagttacagagggtcaagaatcaagatcacttctttcattcatttcaatataacattattaagaaatgactagtggataatgttcccaagcattcgtatcaccagagtaaaagaatatgtagaaaacgacatgaaactcggcgacaaggtggaaattaggcgtgttcaatcatcggaaaaaaatgtcacaatagaagggatttacgggtaaagccaccagtgaccaagagtcctgacagtttgctcgtcattttctacaaatctattcttgatctcaatatggaggtacatctaaagtcgtatccgaaaactttaacaagcactttacagataatcgatggtataaaacttctggagttaaaacaaagagaatgggggttctcacgcagacttgtgaggaaaagggagcagtgtccctgttctttaccatcaagcaatgatccatggaacagaggctcctaaattagctgcttttggatttcagtgcattactgagcctgcagcaagaatcaaaccaggcttttgtaagttaattccatcagatattcccatatgcattcatcagggaggaattgcagaataatgtgttgtaaaacagaactggaaaaaatgtaacatgggagttcagtctaatcatattcacaggaaaacaaaccgtccagtactcacgtcactacaagaaacaggatagtacaggattttaccagcataaacattttagccattatttcatttgttccgtagagaaaagaaaatttcatgtgacttaccagtccaaaccttcaaaaaggccctctccttttatggcagatgttttgaaaatcgcccattgacggctcttaatcttgtggagttctaatgattccgttatggcagcatcatcaagtgcacctggaagatcctgcattcattgtaggcatgacagcacatgagacatcatattgggcgtctacattgttgccatagaataaagcatctccaacttatttgtatagaaaatgcaagcaacaaagaatgacaattgacaaaaagacattcacatttgaaacctaatgtccaagtaacataatggaaaatcataataaataggctacgtttgtttggtacagagagcgatatattttattaaccaaaaaaaatgcttaaatagtgcaagttcagaacagctagaagtaacttttgtttaaggacttaagatgccatgggctgtcaaaatccaagtgaaccacatgcagaaaaatgtagcaccggagtacgtttgaaaccaatttaagcacacaaaattaacaacagtgtatgagacccagaatggtttggttttacctgtttattcgcatatacaaggacaactgcaccttttagctcatcctcctgccagttgaaggcaagcagccaataagcaaatgcacctaaatgaaatcaattcatgtgtactgctatagccttaaaatcattaggatattggatttatgtctacacaagcgtaacaccatgctaacgaaatgctgctaatatttctaaccataaaaagaatgaaaatagcaaactagatagggatcctggcctcctgtggtgcataaacactgttagtgttcatgaacaaacgagcatgagatattgatttatcaaatttataacagaccagttgttgggatcaaaattaaactgcaaaaggaggcatagcctgtgaatcacaaagcgcctgaaatcccctgacaagtaagcaatccgttaaatcctgacaaaaatacatggattttttattaccaattaatgattttaaagaatgagcaagcagcatgcttcactaaacttgcagtcataatcaccctttgagaaatatgtgcaaaatcccatttgtttcttccatgtaatggttacatatgacacagtaaatatatataccgagtccctcaagcacaggtggcccatacctcaaggatagcatgaaactcttcttttgccgttacaagcctatctgtatcacttgaatcgacaacataaatgatagcctgggtatttggaaagtagcatctccagtatggcctaaaaaggtgaatatgttaatggcgtagagaaacgtgtcatgcctagtctttaaaaggaaggaagtcaaataatctaagagaatccatgcctaacaaaggaaacatacttgaatacaaaagagtaacagaaaggaatcagaagtagcaagacataagtgaaggttgactataaagtttaaatattcttgtgaatcctgaactaaacacgtaagtataaggtaaacaattacaatttcatttcaatgaatggtcgcattacgctcatttggacacctatgtactccactgtgcagatctatatatgtttgttatgggaaaggtcaagtgctgtagtatatggaatatcataagcgatagtatttagaaagctgtcttagccccggggtaaatgtgtagcccccatttcttgtggtaagcatctatgtcccttctctatacatatccggctgaagaacaggatgaccaagtaaattttatatatatccagttgcctgcctctcaaacgcaaaaactccatggagaataattagatatttgaagcccaaggaaaaaaacaaactagccatatttacaccccataaaaggaattttacaaaaggttggattattttttac

SEQ ID NO: 27304 - DNA, 17496 bp, Oryza sativa
attcttgcagatttcaattaaatgacatggaaaatggaatgcaatgtgtagctccccagtgttccggtgattacaaggtattgctacagtaaatcgtacatgtaatgttacacgatggtggcaattaaaaaaatatgtttctttactaaccacaggagacaactagctttgaaatggtgcaatcaaacgctaagcaaatgaatccatatttcgaaaaccaggccacacttttccgagattggaatattagtcaaagctatatgagtttcggagatcgaaatactagtcaaagctatgtgagttccatagttatcaatgtgctataagctctaagctctaacggtttgggggtacagtagaatggctattgtttttaatacaaactttatttagcagtgataaaaaaatactcatggttttacttgcccaccatacaagactcttgttatttcgcaaatgaacatgctgactaaagtctgatttgagcacgttctcctcattgttttccactattttttttatttcttcatttctacttccgcaggaattctacatcattattgttgctgtgcaagaatccaagtgttagtgtattactgcatatgaacttccccttaggattgtgaaatgctagtgaaccaaatacttcttatactaaggcttggcgatcagtgccaaagcagatgagaggatagtattttaagaataaccacatcagccttcaaacataggaaaaaacaggtcactgaattgcttaagatgctcagaatggtcatttttgaactctttgcagacaagccatgaaagccattaggcaacaactcatttacttcaacaccacatagaataaacagaaccccattttgattcaattcaggaactcagcatacaagtaaaaaaggtcacgttatactaaaattccctcaaaacctaggacagaatcagaattgtaatggtcaaaccctagtcagctaggtctcaaccattggtccactcaatcataaattgtagtacccacaattggcctcatggatattgtcgtaaattgtacttataaattgtctcgcggaaaaatctaaaccagtcctcgtgaatcagagacttgggggcacactcaccgagatcccagacttggaacttgatgttgttgtactgcaccgtctccacgttgaacccaatcgctgcagcaacgcaacaacaacaagcacacacgtcaccaaacccgcggagcaaaccgaatggaagaaaaaaaatgagggaatcgggagcggggaacccacttgggatcgtggagacgacctcccccatctgcagccgatctgcgaggaaaaaaaaacacaagcacccagatcagatccgaggtggagacggcgagattacattcgatggagtcggggggcgaggtgggcttacataggatggtggtcttgccggcattgtcgaggccgaggacgaggatgcgggcctcgcggttgccgaagaccgacgagaagagccgcgtgaagacgatgcccatggcggcggcggcgcggaggtcacccccgcgcgcgcggcggaaggcggggggctgggctagggtttcggcggcggcggcggtggagatctgagacggggaggagaggaggggggagatctgggagtgagctggcgcgcgcgagtacccaagacgacgaagacgactcaccgaatggggaaggtggatggatggattttttgtttggaggggaaaaggggagaagcggtttggtttggtttggtggatttaggagagattccaattgcaaaggtttttaggtgggtttgtatggtttttctatttcctaagaaaaagattgcagctacaaaaggtttttatgtggggtttgtatggtttttttattgggattatctaaaactactgtaagatttttttatgaaaaactttcaaatctaactataatataattgtaatgtaattccactacaactatgtatataaatattaaaataatatatataactttatatctaacttatatagagattacagtacagtacattgtaactatattgtagttacactataactatactataactacatttgaaagttttttgcaaaaataacttgtgacggttttttaacaattccatcctctattttacctaagaaaaagacatggtttctctgggttggttttaagttcaggttagttgaagatcaaaatgtaaatggaaaattttaggatatggaataaatactccatccattgtagaatactagtaatcatgcatatactaggcacattttctttcatgctcactgaattgagaaacgttgcaaggacacgtttatactcgcttaattcaggtagtatatgccaagcaagttaaaacagaaatctggattttacaagtatatgtctttcaaatccaaattcaaatagtttctattcatcattgtataatattcaggttccgtttggcacagctctagctcctaactccaacttccctagagctggagttgtgccacacggtacaaattcttcatttttttagcggagtttgcagagttactccccaaaattgtactacggggtagaactgggtttttctacttcacagctccatttcgtccctaatgacccactaccctttaattttttcatgtatttatgcgatatgccactgaactaccccttcacaccccctctcctccctttctctctcatccacatcttcctcccttgacggcggcggcaggcgtcggtgggggcgggtggcgtggcgcatgagagcagcaaggccacaagcgatggcagcggcggcaagaggcgcgtgggtggcggcgcagggtcagcatcggcaaggcgacacgcgtgcggtggcacgtgggtggagcggcgactacggcaggacaatgccaacaagggacgtggtgacacaatctagccaaacactttcatacccacctcagctcatataggaaccagttctcactgaagttgaaggttagagttgagagttggagtttggaaccctaccaaacgaggcaagaggaattttgttacaataattgattcaccaaaaaaccatgctttttttgttggccaacaacatggtggggtacccagcaggtataagtaaaatggcatgtaattatgttgagattgagcagaggaacaatcagtgtacatagataaaatacaaactttagatgatttacaaatagtcaataaaaggaaaatgatagggaaatgtgcttcaacaatatggcatcctccatttgagtcatttgccttgactaatgtcatccttcaaacctgtggtcagtcgtatcgccatgctaattaggtttgcctcctattgaaaagaaggaaaactatagtacatgcctaacaactcaaaggggcaaatacgtcttttttactttatagttaacggtcaacacacaatcaataggcggagtcaatagacgggagtggcatgagagggtgcacaaatttggaccgatggcatgtaggggaagaaccgattttcactggcatataaaggatcagacaattcttagtggcatataagggattatctctacatgttaatatccaaccatatcccaaaacctccatctatttgttggtcatgccttaccatcaaggcactatactgttagctgaatttatcagctttgaactttttgcgtttattagccaatttcaaatttctttttttctttttctaatgacatttcgtatattcgtcagtctgatattcaatgctacttgatttgcgatgcatgtatgcagcagttagtaatgtcctgatgaagctcgacgcctattcaagaaacctaatgttaatttccatgttcctgtgcggcaactgcaatggactaaacatgataaagcggtacacctacagatcggaccttgcttacttgccattaaaccacatccatccatcgtgaatgtatccaattgattctggccgttttccagagacttattttgctcctgctaaaagaaaatggtttaagtgaacatcgggtgaccaatgtatgagtatttttttggttgtaatgttcagttcaaccattattttctagtttttttctcaaacatacaggaggagagctgtgtattttctttatagtaaagagagaagagaataaaactcttctcatgttttgatttttgttgtgtaggccatacagatgatcaaatctagcatgtgcatctttaatggagtgcttgtgcagatattttacttgtcgaaattgatcctattgtactaacttttgacctcattgtcgaaattgatcctatttactaacttttgacctcatgtgaccagaatgaccgttgacaaaatgtcatctcacccaccatgcttatatagttatatttatggtttagccttatctgtagtcatcaaatattcaaatatatagtcagtatataaatagatgcatgccaagtaacatttggtctagtgctgtaatatgtgttattgaaataacaagtttatggccttctacggcatgttttccccgtcaagactgataatgtatttcatgttaaatcatatatgttgaactgcactatagtttaatactttgttttctatatcagtgcttaagctcacgattcctattgtcatacaaatgcagaaagcctcggagaaagatacagagacagcttcgaaaaaggaaactaagaaataagtctaaaggtgtcatgtgcattttaacggtttgccaacagtaattccattagcattagaacttgtattccttctcttttcctaatcttctacccaacaaattaaaatcaaacatacttatatttcaattaaaaagaggcactaaattagtttcattacatctaacattgaatatattttgatagttttttgtgttaaaaatattattatatttttctatgaatctagtcaaacgtaaagaagtttgacttaaaatcaatatgacttataatataaaatataccctctttgtccccacaaataaattaaaccttaggttgccaattggaattaaggaagaagataatgagccaaaatgtctctaattaatagaaaagttacattggtggtgaataggtagttgaggggtattgatggaataaaattttttgatttgcggaccgatggtagaaaagttacattggtggtgaataggtagttgaggggtattgatggaataaaattttttgatttgcggaccgatggtagataagaaggtaactgttgatttattttaggacaaattcaaattaagttgatttatttttggacggatggagtagtagtaattttgtagttattgattatgttggttttttaacgtagtttatcttacaacatttgcttttgaatcactaaggatatgtctataaaagttttacttataaattaattttaatcagtaataaacggttcggaaaatgaaggtaattttcggggatcattagtattttgacacatttgtaacccaaattaataagatctaaccctttttcactatcaaactaatatgttattttttttgtttcttaccatcaatattctattatatatgtaaaagttaaattatttaatggatatcacaaaaagctcaatacttaactatctaatgaataaaggaatttttttaattgtgtgctagttattgtctctcattgtagctcatcgtggtacttagtatggcttgccctaagtgacgcaccacaatccatttataagactatttttagagttgttctttttgccaaatggcatataatctaaccgatgcaaccaaatatcttcttgtgtgcataaaaaagatataacaaataacataattaggtatatggaattcctgagtcaacaaatagattgtttgaaagtgcatctagaccccctagctaaattttggctaattaatgacaaatgaataatgtaataatgtctttaatgagtgatacggaggcattaagtcctttgaagtggaaaagtgagccaaaacaacactcaaagcaaatgagttgaagcgaaagttaattgggcaaagtttggaagatagaagatcaatttgccccaaagttataatggattggacaatcatgtgcggtataggaaaattcgggtctaacatggaccggacaatctaggtggagtcggaaaaatctagtgaagatgatcacgagaaactaagtgaactagattgtttgggaactttcggataatcatggtcgaacagtccgatgcggtaccggactatctaacacgctctggacgtggctagatgattgttcatcagatgttgaagaagcagtggagtagacaatatggtactataccggagtgtttgggagaagcaatgttgaacaatcctacagctatcggatcgtccacctctttatggcccaatggcttgtagttcaatgaatgttggaaaagcataaagtgttggacaatctggatcctatacaaattttggcagactctatcaacggtaataaacaactagttgaaggagttggggctataaatgggtggtgctatggactcatttagagacttttggacccctcttcacccttagaaagccaaacaagtgtccaaacggctaggagtcaacctcgagacaccgatttgttcgtggtgtgctgagggagtatgtgaaggtcagatctcacctctaaaagggaagagatacccttagtggaaggagtgtatttgtgcaatctcacaaggatagggttggaaaagacccgacggagagtagaatcccctcaaggatttgaactttaggaacacattatctcataagaatcccgatgatatctctctcactcatctagttttgctatttggtgttgctaatagtttagttgctatttgtgcaattctttccctaattatgccgaacccctttttgcttgacttgctagtttgcttgtaaatatgagtttttctaaaatatccaaaaatattttagaaatatctgaaaatactaggaagtatccaaaacgttcagcttccgcattttcttaaaagttttagatgcctgttcaccccctctgtaacatcaaggtcgtttcctcaggacacaaaactagagtattctcttcgagccagcatcaatttcagactacgacaattttcttgctaaccatttgcaatattccctactaagaaaaatattccccatcaccttcactggtcactgtttctatcacaagaaaaagaacaagaaaagaaaaaaaaacacaagaatatactactaaaacaagtctagggaggtccaacaaccaagtccaaaccgatcaaacatccgacgaaaaaacacacgaaaatccaaaattaacaatagaaaaaatcctcctccttaaacccccttaaaccctagctcccgccgctccgcacagtaagctcacttctcctcctcctcccccatccatggcggccgcccgcgccaccctcccgctcccgcgtgtccccgccccctcgccgaggccccagctcaggcccttcccctccctccccgctcgccgcggcgcggtggcatgcggcgccggctcggcggcggcgggggtcgcggcgtcgctgcggctcggggacgtgatcgaggcgcagcagttcgaccgggacgcgctgacggagatcttcgaggtggcgcgggagatggaggccctggagcgcgggtcctcctcccgcggcgccgggaggagccgcgtcctcgaggggtacctcatggccacgctcttctatgagccgtccacgcgcacgcgcctctccttcgaggccgccatgcggcggctcggcggggaggtgctcaccaccgagaacgcccgcgagttctcctccgccgccaagggcgagaccctggaaggtgagttcctgggttcagtgcgttgagtgatgtagtgactgaacctttggttggagcggcaaatttcgaagtattgggatgaaattggagtggttttgtgagttgtcgatagtgaacaggtgaggaaatgctcattctgtgccttctgggtacatgttggttttgcattgtcggaattggtagatcttgatttgtctctcgttgtgcaaatggccgcgaaacggagttgaaaattatgggagagtttgaaatggttttggatcaactgtggtatggagtgatgtggattagtcaagtttatttggagcggagtgggatgacatggagtgtcaactagaaatttggtattgtttggaacagttttagtcttgtcgtattataggatgtcatggaaacaaatgctaggaataactagttgtacagtgaactctttggatagtttcggcgtgctcgatgacatttcagttggatatttttgcttgaatctgcgagatagaaaatttcaagggtagttcttgactttcattgtggagcgaacatgagttttctgtcatttgcgctaagggcatcaaagaatggtgagatatctaggataggttgattcatgggatgttggtgttcatcacatttttttttgttttagaatcacggtggtatcttcaatgccttggagttgtgatgtcgaatgccaaaagaaattatcttgaaatgtgttgttgggattaatgatactagttcaagtaccagggcgctggtattgctgccagttggctactatgtttgtatagttgcatcagtagttattccttcgaggaagatagggaggatctaaggacatcagtttgcatcatttgtggtaaaccacgaatagtacaaatataaaaggtttacccataaattatttttgttgtcctaaatgttttgattgtgatgttgggtggcatacttgcatttaggacctatatattcaattaatatgttatattagtattgtgtgggaatataaattcccggaataatctcactatttaatctggatctgacagttgactggtgcttacctcacaaaacagatctaaaactaacattttcaagtaaaaataaatccctctgaatcaaaatatataagtttcttttagccttctcaacatttttaaaatgttactgtagaattacaaggaacttttgtttctttttctttgtatgtttcccttgctaaatgaatgtactcgtgaacaaatattcattctctcctatgtgggtataaatgaaggaccgcaaatcatttgtctattttgtttatttttatgcatgtctgatatgacttattttttggaccagaggatgtaggttgttaaccatgtgtatccatgctgcagataccataaggactgttgagggttattctgatattattgttctgagacattttgaaagtggggctgcaaggagagcagccgccactgcagacattccagttattaatgcaggcgatgggccagggcaacatccaactcaggtaattgttctgcccctgactccttttgaactctcttgtttttaccaataaacagtgtcatcatgcttggattcctggaaaaggacagttttaggcaggtgattgctgttttcttaaggagctaaaaatgcattttaacgaatgatgttctgaccagactctggatggatcattcaatagaaattgcagttttgttgccaatgtacggtgttgatcagaatcacatattaccggctgataaaatagactgtatagtgatgtggatgcagatttcattttattattaagctttctctggagcatttatagttaattcatgacactgaatactccatagtaacaacacctgtaaaattatcagtgctcctcttggggatatacaacatttttgttgtattgctagtgaataggatgaaatgaatgggtgtcagtgaatcagtgtttctagctagtctggtattcctttaggcaagtaagaatgttgcagctttataaacacattttcagcttaatacttgtggcagctttataggtttgtccactgtatctctttatctctgccatcatgttgataactaaaatcagtttggaatctagtttctgttcttacatcctgaatcctgatgcagtatgatttatgtactattttatttgtaattgataattttgttcttttgttcaggctttattggatgtctattcaatagagagagaaattggcacactagatggaataaaacttggtttggttggagaccttgctaatggaagaactgttcgttctctagcctatttgattgccaaataccaaaacattaagatatactttgtatctccagatgttgtaaaaatgaaggtattactcgtcctatcaaatgttaactgcattccgctcttttgatgtctgttatggcccagatagaacagattggatgatgatttttttcttctgtcccataggatgacatcaaggaatacttaacttctcaaggtgttgagtgggaagaaagttcagatttgttggaggtggcatcaaaatgcgatgttatttatcaaacacgcattcaaaaagaaagattcggtgagaggatagatctttatgaagcagctcgtggtaagtacattgtggacaagaaggtcttagatgtgctgccaaaacatgctgttatcatgcatccccttccaaggcttgatgaggttagcaattatccttttaaataaaatcatctaacagtattcatttatcagtgttttacattcaatagtgtcccagatgagatattattggttatatttagcattagtaaaattgttttatattgccaaaaaaaggcaggatatagtttctgttacatttgcatatcataatatccaatatgagctttcaagtttcaaagccttaatagtaaatatgtctgtgaatggatgcaccaaagtgatatgtttttactagttacttagtagttgctgtgtcccaaatgatatggcttggtgcaggcagatgctgagcaccgcttttcatttagtatgtaagcgtgctgtttcagtcagctatgtgaaaagtcaattgtgaacttgggaaatgggaactccttaccaaaagtgtgtctagaataggtgagagttaacccaagtcaactgtcagctatgagaaaagtcatcaatgaaataacagaggatgtatttatctagaatagatgagaattgcccagggcatagcttgatgccttgatgaaacaattgttgtcatttacacatctgggaactagcactagcagtcagcatgctttcctaggccttatggcggcccaagatctaatcacattcaaaattttctgttttgcagatcacaatagatgttgacagtgatccgagagctgcatattttagacaggccaaaaacggcctctacatcagaatggcgttgctcaaacttctgcttgttggtcgctgacagctttcttagtgcgtggcgctgtggtgttgatgggggtcaaaaaatgtttgtcttaatcaatggctccaaatcaactgattagtattgtactaggcaccataagttagatccttgcaaggatttaaccatgtctagaactctagatgcataattttcgatgtaacaaaatattctgaaacagagatttgttgctctcatatgttcttgtgaatcattatcaccgaggactgcactaattttcctacagtgttgttgcaaggactgcagtgatttaccgagtagctctttctgccctcttttgttgaccaaggacaaagaactcaatgtaactggctggctatcagtaccagacgagctctggtattttccccatatcctgttttaaccctaggcgctgacacgttgattgtttttctcttgtcatgtgtaggtatatgatctattgatctatatgattggcacttgccaaggaatagcatggttgtcacctttcagagtatgacagattcctgactgaagcataatcccattggcatcgctttctgcaattccaagtttccatatcatgactgcaggtgaaaatgactatcatgacttccaggggtgacacattcagggtttgtgatgtatactggtaaattgtcatgagagagaggtgatggtgagcccacaccagcaatctcaaatggttggccagacagaagaaggtttcaaagcccttcatgtcagcaatatgacacaatgcataaccggccggctcacacatttcatgccttgggaccccggtacggcttcaagatgttgacctagaacctgctgcattctaaagcctctgagaagtgaattagttagcttgattaattggcttgaattcagcatcactctcactctcatgatgtgtagtgttggcatctccgaatcaaaaccatggtaatttgcagtcaattagggtccacagacagtgactggtccgatacatgacagtggaaatatacatggctgattggcaacattccctgaccatcttgttctaattagattaacattgtgtttaggctcaagagaagcttctttctcagtcatgagttgcgtcagagtttcatgattgtaacaccagggaatattgtcgcagaggccatgcatgaaagtgactattgtgaggatataaagtcctttttcttcttccagtgaaagccaccttgcatttttatctgagctcatcagtcctatctgatctttgacagaatggtgccaagattacatcatctcttggacctggtatatatattttttaccatacctttttatttatcccttgctacaaatttcttacaacaaactccttacagtttggttttaggtgtcactgatcaaagaacacaaaggctagacaatccctatttatattattattattattacctccctaattaacatccttatcaaacctcttcacaattttcagatgtcataaactgttgcataatcctggaagatggagctggtttcaggggtgaaatcccagcaagtcacaggtgactgctttccctgatcatagctccaccagtccacatccccctgcggcggcgcgccgccgtcgacgatcgcgccgccgccggcgtagagaagctcctggagctcggcctcgatggcgacgacgacgttggagttctcgccgccgctcgacggcgacgcctgctgcatggcggcggcgccggcgccgctctccagctgctgcccatcgaggcggtggtggtcgctcacagagcttgacattccatgttcagccacagtgacattgttgtgattctgatcatcaatggtggccttgcttggccactgatgagagagcaaggggttgtggtggatggacagtgggttctgcagctcctgcagctgcatgcagagctggatcctctccatcgccgacgcgctcagcgaccgctctccgccgccgccgccgccgtcgttcatgccgccgtcaccaccggccggaagatcgtcggcggtgctctggctgcggtggtggtggccgccgccgcggtccttgcgccggccaaggagtctcttcttcagctttgtgttccagtagttcttgacatcgttgtccgtcctccctggcagctgtgctgctatgattgaccacctgtggttaattatgtcaagtttagtgtgattatgatgattgattgatagttagtgagaagggagagtggttagtggtgtaattatgtacctgctccctatgctaatgtagaggctgcagatgatgctgtcctcctctggggtgaagtccccatgctttatgtttggcctcaggtaattcagccaccttagcctgcagctcttgccacacctcttcagccctgcaacattacacacataaactaaattaactacacatgaacacacaaaaccagaagatacatttgaaaacatttctagaaagaaaaacagtcacatgaaaagcttgatgatgagcacaatttgcacagatgacaatcttagcatgtctgaaaatttataatctcttctgaaactatcagtgataagtaaaaatggtaataattgctaccaatcttgtgaggcagtgcaatccagttgccaccggtgccatgctcctcaatgtagttcttgagcattgcatcctcctcaggtgaccatggccccttcttcactgttgccttgtcacagcaaggtgccctccccatctctctcagtctctctcagaacctcttatctctttctgcttcttctctctgaatgtagtagtatcaccttagcttgaagctgctatggatgtgtgtatggaatgtgatgagatgagttgtgatgggtttggtcatggtgctgggatttataggagcagatgaagagtgcattaaaatagtacggatatggtttgacctttgattgctgatgctgctgaaagagcatgacacacataccggctcttgttctggtctattggtactttggagatgcatgcatggcctttttgtttctgcattgcatgaatgcatgcagaaaggtgcatggaatgatttgttgtgctttttgctaaacttctgtgtcatccatgcatatatatgtcctcttttttgttctctgggacatggatttctgtctcctaactgttctctgcaaaataatcattgttttgggttatctttgttatagataatctacattaactaattagtttgatttaaagattataatttttggtgctattacacagcttaatttcgggaaattgtgaattttatggcaaagtggttgattatagcaaaattagttatttcgacggtaagtacggtgtaatttgcctcaaattcaatggatgtggtcttggtcctttcctgtacaaacaagtctatgagtacatgaaacagtagtgtcccagtctgttaggggtaaaatcaccaaccttactcctgtagcgttgtcgaagtacaattgaatcgtcttgttttcttgagtttttaagttgaactggttgatgcatgcgactcaataaatctaaacggtggatgcgagaaaatgcattcaaaatggcactatatatttagagctacatgtgggtttaggagagattaggagtgcacagatcacgaagaacagtaagtactctgaactctgcgtaggtttatgggtatcgcagaaagatgaacttatgctctcaagtcaagaactctagcttcaggcaggtcatgtggcagatgaagctagtgttaccacctgtacattgcaaaccaactgccatgaacatagttaaattcagttaggatttagagcctagatggttagaagaaatgaagcctttactgaatcattgaaacgtgccaaaggataagcatggaatgcagtcttcttgtttccttcttgtctccatgcatcccttaggatcacaccgcattgagataagcaacattgattgatcttgatattctattaattttttaattataataatgtagtagtaataatagtatggaatataatgtgaagctgctggaagcctgaaattagtgtaactccaactctgaattttggcatcataaacagggcaatagtggaactagaagaattactatcagactttcagttagggtttctcgtaataagcagtaaacaggccatcacatccaaatggattcccatttctgaaatcaaatagtttgtgctattttaaagtatgatagttattcaaaaactgttttttgtgatattagcaagaacctcttgcagctttcacaatgaactgtgcacatgaagtatcataccaagtactgcaataaagctgaatacgccaaaaaaaaaaatcggcatacgaaaaaattcctccttttctcaaagaaatagagagaacaaacgtcaccaataatgtagttaccagtactttgacaacaagtgtactctacaatgcagcgtacatatagatcaagattcacagcatgggtatgcatgaccagtccaagtcctgcattttcagttattgctgtacccttctctcaagtcaagaactctaactcaaggctgggccatgatagaaaaaaaaaatgttcatagctagatggaataccaaaccatgctgtttgtaagtaactctctttgtagggacccctattgctggctaggctgacctgccaaaagtccatgggcagttacaactgacaatgcagcagcatcctccaatggtgtcatcatttttgaccctcaagactggttcctacaagttcagttattctatacttaagagcaaatgttaagttccttcttttgtcttgtcatttcttttgtgtgcaatcatggttaatatgatattggaggtaatatgatactgcctctattcgtaaatacatgtcgccactcatattaaaacaaaattataaacactttttttattttttagataatggcattttttactcggcctctacatcctatcggatatacaaaatcatttaaattgagaatttagctccacaaacaatccaatctgaaattcactcctatggagatttgaactcggacatttgggtgctattctagtcactgcaaccactaggctacatgccctttcgctattagctatttaaaaaattgaaatgagaccatattattgaacttgccacatcttaatataaacactaagatattgtttattgtaggctaaccatttaaaaattattagccgtcaaagttcaaacagtgctagtcaacggtgacatgtatttttttttcgggaatacgaaaaaggattgcgcacttttgtattaagaggaataaatttacacaaaaggcaaaacaaagaaaagaaggggggtttgggaagaaaaggaggaaaaagtggaaaacaaggacttaagcctattctcgcaattacaatgtgatgaccaaacgacctagcacgctaagaaggaagcgttggcgacaggcaatgggcaagataccaaagggcggcctcttgcgccatgcctacgatcacctcggaccagggtcgagaacagttgttgaatacgcggttgtcccgttccttccaaatggaccacgcgccaagggtcacgatagtgtcgaatccacgacgatgctccctcccaactttgagccggcaggggtgacatgtatttgagaacggagaaacattgggcttgccttatgttctgtggttgtgtgtactctttttatcagcatatccagatatcatacaatgcacgccgtgttgaacagtgctgtatgcgcattgtgcaatgaggatcaagtaggtcttttgtttggagcatggacctttgtgttttcatattactagattattgactcttttcttgtttatgttctccctttttgttagagagtaaagtgacactgcattttggggtggttggttttagattgattgctattgaattgtgatcagccgcaatttggataaaaatatggtactaatgagacccatcttgtgtagttttgtgataatataagatgaacattatggtaaaaagaggtagtttgatatgcattgaagaacaacaccagaaattgcgattcttttcttgatttttttgttggaactcacaaaagccttgcgtgtcattccattggacataggaaaaaagaagtatttatattctagaaaagaaa

SEQ ID NO: 27305 - DNA, 18223 bp, Oryza sativa
cctttggtatcctaaggggaatagtaccgtatgtgtaccatttttgtggtaccggttttccagcactggctgccttgttaatatggagtatgtacatttgttcagtatacagtcctgtcagaatcctcctttggtcagagagaagcaggtctgggcattacagagggaagaggtacacttttgactaactgtatgaagttgttgcagcttcaatatccatggtgatgtatagtagagtagtgtgtatcatgctcacactaccagaagctaccaatgaagatatctgtagatcacaatgccattaggtgtgtctagcttagtattctactatcattatcacaccagaagaaatcttaatcgttgatttatgagttctactataagttgaaaaaaatattctacactgtagtggtggtataaatagatatgatccgttggattagaaaaaaaaaacattctagattggttctactactaatagagagcaatgtagaacaccttgtctagttatgtactacattgtttactttgatcaggaatgaatgcatgcatccatcttggtggtgttagttgttgtttcagaagagatatggttttatccaagatgctgccctaaaagaagtggcattagtaaggaagacaagccctaaaaaaggagcaaagctaagacagagaaaaggggtgactttgaatgatatatgcaattagaaatccatgtcttgggcaaaagagattgcatggccaacttgccactttgtcaagcacaaaagaacacttaagtaagtagcagggcatgaagcatcacaactctatcagtaggatccaagcagaagcaggttaaaccatctgacaccatggagtagactcacctaaacaacttacaaaaataaggtcattagaccttcacaagtctaatgattaatcaaattaagtaatgtgagcctgcctgttgcttaatattttacagggataaggttgagttgaccacattattcaaggatcccaggagaagtaagataagcttatagtggtgttgttggcagatcaagtaagtaaacttgaaaagctgattagtatctcagtgcaattaacttcttttttgtcctaggaagaatattttgcatatgttattatttttgtaccttttgactagtgtttgctacttcttttctttaatgatggatgacaaaaaaaggctgaacaaaaaatgtttattatgcacttgcacccgtggatagaccatgacataatcctggatttcttgtgtctgagtttcttaactaattaggtgctactgctgggagaaaagtttagtaccattgtacatagctttgacagctgttctacacatctcgtgccatttggtaagaataaagaatttgcatgatagaatttgagtattatatacacaaaatgtttggaactttgattttgtcttcaaagttgaactcaacattaataaatgataaaagaaagagtaaatttcacaaaactacatatacttggtcaaattatcacaaaactacagatttaagaatgcgtatcacaagactacaaatttagcgtcaaacttttcacggaattacagatttaatataccatatacaaaactacagatttagtaatgaagttatcaaagaactacatattctagagtttagatcatagcactattaattacttaaagttataaagtctgtagttttatgataaaatagttttaaatgtgtagttttgtgataaaatagttgttaaatctatattttttgatataaatccttaaatatgtagttccgtgataaatttgacactaaatctgtagtgctgtgaaacacattcttaaatctgtagttttgtgataatttgatcaaagtatgcatagttttgtaaaatttactcaaaaagaaaggatagagacgctttaattgttaccatttcttttatataagcccgtctgctctttattgtgagcagtgaaccgaatatacatacttataattgcatgacgcgaaaaacgacacatgttgattactagcaaaaacttgataggaacatgtagtacacaagcaagctttatattgattaatatggtctaatgcactaacattttcatgttgattactataaagaacttgagtcaatttcataaaactacatatacttcggttaaattatcagaaaactatagatttaatatgatgtatcacaaaacaacagatttaacactaattttattatagaactatagatttatggtaaaatatcgcaaaactacagatttagtaacaaagttatcacaaaactatagatttaatatcaatttaatcttggacttttgtaacttaaacataacactagtgcaaaaaaaattaaaccgtaaaatctatagttttgtgataattttatcaataaatatgttgttttgttatacttagtcttaaacctatagttttgtgataaatttattgctaaatatgtagttctatgatatatgaatatatagttttacgataatttggttaaagtatttgtagttttgtgaaatttactcaaagaactttatataaacatcactgtgttcttcaccctattttccgaactcacctcgctcgtttttcgtgcgcatgcttttcaaaccgctaaacagtatattttttagaaaaaaattctatataatagttgcttaaaaaaatcatattaatctatttttcaaaaataattttattaatacttagttaatcatgtgctaatgaactcatctaacgaacatagcctacaagcaaactttatatttattactatggtctactgcactaacattttttacaaagaagagtatgaagtaacatgctcacaaacaatgctactgggaatcgatcatctcacggttaaaggcttcagatgagctagagttcaatgatgttttcaactatacacagttaatatgattacacggtaaatacactacaattacactgtaaatacactataattacaccttaattatattgtaattacattctagtgatgtctattaaaaactttttcaagtgatttattgtatatttttgcttttaatcatgttcattagttttgttttgatcctatggctgaaaaatcgtgtgagacgtaaggaaaaatctgtcaaatgatatctaggtagtttctataaaaataattccaatattctctccacatgttatatggaaatatttagtttatttgtttcaccccagtatctcatgaagtaaacacgcattatgctagaataaggcgatatgttaggacgacacatgctaaatatatatagcgagaggtgatcacaggctggcttctcttctcgtcattccactttttcctatcagtcacgcatttagttgatattctttcccacgattcttctcgttctgattaactgggcgctgttttgtgtgaaggaaatactacatgaaaactatgtgagaacatcatgcaaaaggaaggaaaggagtgatctaatctccgtttatactggtattaatccggtgcgacggttgattggtaactacggtagttacattttttttaataaaaagtaaattgtgccgaaggcataacgccttggccggtgagtgtactgagcacaacaacctaaatttcagcatacaggtacagcaacttagttctgggagtattgactttctgaccacattggcaggccatgggcctccaaccagtttaggaaaaaaaaaccttaataatccttagttacttcctttttgtgacaattactcatcttttatatatcgtatatataatccagtctttgcttcaacatgacgtacttcctccgtttcataatgtaagtcattctagcattttccacattcacattgatgttaatgaatctagaaagatatatatatctaaattcattaacatcaatataaatgtgggaaatgctagaataacttacattgtgaaacggaggaagtatatagaatcatttattacaaaataaagtccttagcttaaaaccaagcacataaaatatctaagcaaaaacgtttggaactttgattttgtcttcaaactttagtgaaatcaatattagcttaaaaccaagtatggaaaatatctaagcaaaattgtttggaactttgattttgtcttcaaactttagtgaaatcaatattaacaaataactaaagaaacaataaaggcattcctgtgggagaggattatctattcgttagagactccattttcccattgaggacgaacctcaacctgtgctcgagagatagctctccatacactgataagggatgtatggattctcgagaagagaggagccgtactcctgtggaagaggattacctattcgttagttgaagcgccatcacgttgctgtttctttcttcaatcattttagaagagctagctcagtgactcctgcttgtttccaagtttgcattgtttttcatgaatgcatcataagcttacacatcccacgttgctgtttctttcttcaattattttagaagagctagctcagtgactcctgtttgtttccaaatttgcattgtttttctttgaatgcatcataagcttacacagcccaaaattttaggtccttatcgagcctatagaacccaaaaggctaatttgataggtgagaactatccccaccctattaagtcgtgcttccctattatcaatgattgatgtgggactaatcccaacagctaatcacgaaaaattttacttcaatggaacaattttacttttggatagtaatagataagcacagactcacaatttttacagtctagtactaatgcactagattgtagtatttgtttcttcatgagtccttccaaattgcaggcctgtaattttctgaaggaaattaagggtatctacacgcattcttggtcaaagctgccacatgtgattttttttttggtcacattcgtggtccacgtcaacaacagccgggtgaaacagccagttgttgttactgggcgcactctgcacaagagaagactctgtttaggaaggcgaatgaaaggtaaagtttagaataataatgacctatttgctcggacaatgtggcaactgtcaaaaactgccactcctgggacatggattgatcacggtgatacaaaatgtgtgtttcatgatatccagagaggttgagtaagtcatcacctgcattccactcggcaagagtacttgagaagatcatgatggtcctcttatctgtccgaaattcaaagcgcatatcatgttcagttcgaactattcgataaaaggtctatatttccagaaaccccccttttttttttgttttctgaaaaagaacaccgcatatggcttcttcagagagtggagggtttgacagttctcttttgggaaatcatggataccctccacttgcttttttaccaaacctgaagcttggaagtgacattctgattgctggacccatccacttgtgtttatgtgaccctgttgacacttttgcatgattagaaagtgaattagagcattgaatcaacaaagtgaagatttagaagttccattttttagacagataagtcaggaagttgctatccagaagacattttggaagtccgcatgatatccgccaggcatttagaccccagcaatgaagtcatttgatggattgtactatgaaacatgcttactaatatagtacttcctccatccaatattaagttcatttctaactccttccatttgtcccaaaataagttcatttttggagtaatcattgcataagagtttgtgaaagtaaggaatagttgtattggaagaagataaagtgagaaatagttgcattgggattttataaagtaggggtattatagtttttttagttttgtattggtatatttgggattgttgaaaaaaaataaacttattttgggatggaggtagtatttggttttagctccaaaggagcagccattgaaacccatgcagttttagtgaaaagagccttctatactaatagatattgaatgaattatttaaaatggatattgaagtgaaaaacatcatgcatcgttgatgcattaagcagataagttccaactcaccggtaagtggggcacttgcacaaatgccttgtaatcttgatctcacggtcattcccttgcttggagaaggtcgagcgcaacccaagcaagctcaggaagccatttgatttcaccaatggcttatttgtaagcacatcagtttcagtctatcacattcgaacaatgttcatgcgatagaaaggttatagacacagtaaacatttgtcaagcttaatcatgaaagtacactgaatactattgtacccctacaacaagccagcatggctttttttcccaagaatctgtgagaatgtagcaacatggcttgggagtacaacttcctacaggaataaaaatggccttgatcagggtaattgtaacaaagcagatggacagagcataaaagcaaatgaggggattgtggtgtcaccttgtgaccggtgccagcaggcttcgcgctgttcaccagcactctagcaacccatctgtaaatgagttcagagacttcagaacaaaccaacagaacacccactgcaagacctttccatcatagaattagacaacgtcacatcacattcgtgtcaaacactaagctgttatcaagcaaaatcaacactgatctagtaggcatttttttattgattttgcagggattcgaacctggcacaaggcacagctcgaacaccattttattcaatcagatattgcttagcaacagaatttatttatttttataatcaaatactgcattcggtgaataacaatacttttctcttttcttcagtatggaaaaagacaaactagtgctgacccaacaatacccataattgaaatcaatgaaacgctcttgattgagatacataccttggtcaagaatttattcttcatacaactaatttagagaaggccaatgatgtctgcataactgtaggcattttcaaacagccctggatttcacaaaggagtggtacttctcagggagacccttcatatgttgattgtacttcccacttgaaaccagcaaaatcagtaactcagcagtggaagcttcaagggagaagtcatttttatcaattttggacagataaacaccagccctgcctatctcccctttctgaagtaactttctgacgatgcaattaagcatacgggagttaggaacacagccattcttctccattgaaagaaatagattatcagactcttcgagcaagccatcttctatgagattttcaatcattaaggtataggtcacaacatccggtgctaaaccatttgccgagagagcagcaaacaaatcctttgattcatcctttctgccacttctaagcaaggaaccaatcattatattgaaagttctagtctcaagctttacatccatcaaacatagattctgaaacatctgaagtgcctcaccagtgagattatttttgcaaagtccttgaaggactatgttgcatgtgctaatttcaagctgtattccccttttgataatcctgacatagatttctttagcagcacgagtttgtccagtctgaaataaaccttgaagaactatgttatacgtgataatattaggactaacaccattgcacaccatctgcctgaaaagagataatgcattctccatcctactaattttacagtagccattaatcaaagtgctataagtaacagtatcaggtttcaacccaactgagaccatgtcagaaagtaacttcattgcttcatccatcttacctgccaagcaatatccatcgatgagtgtactgtatgtaatgacatcaaccttcacatcaatgttagaatttcaatggttactctcattgagaagaggatggcactcgagatggggcaattttctggttttcttcattcactaaacacaaaagccatgtcctcccaaagaggattggatacatatttatagctgcttgtagcagccatgcagccatgctagtctaagagggtgctgtcagcatcccaacaaactgtcctagagcagagcatcccaacaaactgtcctagagcatctcaacaaactgctgtcctaactgtcctagagcatccaaactgaaagtagagatgctgtcctagaaagctgaaaagcaggaaaaaaggcaccacaagaccaagaccaaccagccaagacttattcctacattctccccctaagtcttgtgcgccgtcttgtgggagagttgagccatcccgatccgggagcaaagctcaaggaacttgatcctcccaaggggtttggtgagcaaatccgcaagctggtccttggtgttgatgtagctcgccttgatgctcccttcctccaagtagcttcggatgaaatggtacctcactcggatgtgcttgctccgttcgtgaaaaacggggtttttttgccagggccagagcggacttgctatccaccctgagctccaccgctccagtatctctgccgaggagatcactaagcagtcgagcaagccagagcgcctgggtcgaagcggcggatgctgccatgtactcggcctcgcagctggacagggccaccacctgctgcttgattgactgccagctaacgaggcactcgccgaggaaaaagagaatcccgctcgtgctcttgctggtgtcgatgtcgccggcgtggtcgctgtcgctgtacccgacgaagtgtgccttgccaggacacctcgggtagtagagaccgtggtcgagagtccccgcaacgtagcggatgatcctcttcacagcctgctggtgctccgtcgtcggtcgctgcatgaaccgactgacgtagccgacggagaaggccaagtccggccgtgtgtgggtgaggtagcgaaggctccccacaagacgtcggtactgtgtagcatccacctcctccgctgtgctgtcgcggctcagcttcagtctctcctccatcggagtgagagctgggttgcaatcggtgagcccagccagctcaacgacgcgcttggcgtaggcggtctgtcgaagcgtgatcccggagttgtcctggtgcacttcgatccccaggtagaaggagagaggccccagatcactcatctggaaggtggccttcatctcctccttgaacgccgcgacctctgcatccttggtgccggtgatcactaagtcgtcgacgtagacacccaccagcaaggcatttcctccattgccccgccggtagatggccgcctcgtgcgggctttgctcgaagcccatccccttgagcgtggaatccaacttggcattccacgccctcggtgcctgccgcaagccgtagagggccttgtgcaggcgtagcaccttgccctccttgccggggatcacaaatcccggcggctggtgcacgtagacctcctccttcaagtcgccgtttagaaacgccgacttgacgtccatgtgatggacgccccagccttcctgagcagccagcgcaagaaggagtcgcacggactccatccgtgccacgggagcgaaggcatcgtcgtagtcgatcccctcctgctgcacgaaaccgcgtgccaccaagcgagccttgtgcttgacgatggctccggcttcatccctcttcagcttgaacacccacttaagggtgatcgcgcggtgaccacgagggaggtcagcaagctcccaggtgcggttctcctgaaccgcgtccatctccgactgcatcgcggcacgccatgccgcgtgtttctcggcctctgcaaaagaccgaggctcaccgtcgtcgcacgcaaggtgcaactgcgcctccaggttgcgaggcaccagtcccggcaccggctggtcgccgagaagatcctccatcgtacggtaccgtagctgctcgccgtcatggtacgcgtcgatgcgctccccgtcgtgggagagcggagtaacgaactccaccgggctgcgctcaacacgagctggcgtcggagtagacgtgcccggaggagtggctgttggtgctggagcgtgtggggacaccggctggggtggtgtcgacgaagagctcgtcgtagtcgaagtcgtggcccgagggtgtgttggtgttggagtcggtggaggctcggggactggggtagacacgctcggtgaagaagagctgcctactcccccagctccctcgaagtggacgtactcgatggtgaagtcgtcgtacgtcggagtcgaaccatcatccaccgccttgtcccatacccaccctcgcccttcgtcgaacacaacatcgcgcgtaatgcgcacacgctgtgtctccgggtcgaggatgcggtaggccttcgagccctccgcgtagccgatgaacacccctggggtgctcctgtcgtcgagcttgccgatgtggccaagctccttggcgaacgcgaggcagccgaagacccgcaggtgggagaccgccggcttgcgcccatgccaagcctcgtacggtgtcctgccatcgagggccttggtaggcgagcggttgaggatgtaggcggccgtcaccaccgcctccccccagaagatggccggcatccccctctgcttgaggagggcccgagccatccccacaaccgtctggttgcgccgctcgacgacgccgttctgctgtgggctgtacggcgcggtgtagtggcgctgaatgccctcatcagcgcagtacgacgcgaattcagctgccgtgaattcgccgccgttgtcggtgcgcagcatgcgcagcttgcggccgcactccgcctctgcagcagcctgcgcatgcctgatggcgtccgcagcctctcccttgctgccgaggaccatcacccacatgtagcgggagaggtcgtcgacgagcagcaggaaataacgtcgtcctcctggtgtggccggtgtcactgggccacacaagtccccgtgcacgagcccgagccgctccttggctcggaagctcgtctgctggggaaaggggagccgccgctgctttgtcaccacgcagacgtcgcagagctgctccacgtggtcaaggcacggcatgcctcgcaccatctccttggcactgagctgcttcagggcctcgaagtggaggtgcccgaagcgctcgtgccactgccacgcctcgtcgtcccgacgagcggcgaggcaaactggatgtgcgacctgcgcgctgaggatgtagagtcgattagtgcctctggttaccttggcaagaaggcgacgacggcgatcccaaatcctcatgagtccgtcctcgaccaacacgcgtgagccgttctcatccagctgtcccacgctgatgatagaattcctcaacgcggggatgtagtagactccggtgagcagcctgtgctcaccggacttggcggtgaaggtgacggagccaacacccttgatctccacgccggaggcgtccccgaacttgacggtgcctcggacgctggagtcgaactcggtgaagaactcccgtcggccggtcatgtgatgggtggcgccggtgtcgaggtaccacccatcagccttgtcgttgctggagccgtcacagagggagacgagtaccttcggctcatcaaggtggaggaaagccgctgcggccggtgccgctggaggtagctcgatgcttgcgtgagctaggagcagagccggctcttcctcctccacccgtgcgacgtgggcctggccgcgtcgtggctgtcgacagtctttggcccaatggccaagcttgccacagttgcggcaggtgtcgtctcgtgccggcttgtggttgccggtggcaacgccctgggcgcctctgcgggcgccaccctcggcacgtcttcgcgcccaccgtagctggacacctccccgcgccttgcgcggcttatggccgcctgtcggggaagatgactcccccttcctcccgtcaccctgagaggcctcccactgctcccgagtgagatggagcttcccgccgatggtgatgggccccgagagaggccgtggctcatcaccatcgacgaccttgaggcgacctaacgcctcctcgatcgacatcgtggagaggtccagcagagattcaatcgagcgagcgatctgcctgtacttctcagggacgcagcggaagagcttctcgacagctctctcctcgtcgtaggtgtcgtcgccgtactgcaccattttctgcaagagagtgttgagacggagagcaaagtcatcaacatcctcacctggcttgaaggccaggttctcccactccttgcggagtgcctgcagtgtggacttgcgggcgcggtcgctgccgatgcgtgccgcagcgatggcgtcccaggcctccttggcagtccgcttctgggaaagcgagaactgcatctcgggcggaactgcagcgatgagggcatccagtgcccgccgatcctcgtcgtagtcgacgtcaccgtaccggactgcctcccacatgtgccgcacctggagcctcaccctcatcaccgcggcccactcgatgtagttggttttggtgagggtaggccacccaccgccgggaccaaaatccctgaccaccgtctggacgccgtggtgaccatggcgccggtcaggggagagggagccgtgccgcctgcgagggccgcgtgcgggctccgggctgccgccggcacgcccgcgcccgtctgggttcccgtcggcgggcgcacgatcccttgggccgccgccgccgccgtggaggtgggctgctgcccaccgctctgctcgctcccgtgcccttcctcttgccagctcctcaagctccctgtcagcggtgatgtcgccggcgatggagccgttgatgctgctgcgcaaggtctcaacctctacctccgccgcacgtgccgcatcttccgccgcctccgcctccgcctccgccctggctgctgccaactccgctgccgccagtctggccgccctcgctgctgctgcagcggtctgagccgttgctcgcctgcgctcttctgctgcggcgagctcggcgtcctgctgacgccgagtgctcgaggcgaccgaacgccgagaccgagcgtcggacatggcgcacctccggggggctgctgtgtggagagggggaagggaaaggggaaggaggggcaaccggtgctgctgctgctgctgctggctgagagctcaaccgagcttgggaaggggtggaacaagagatgtttagcctacaggaaagtgtggctctgataccagatgttagaatttcaatggttactctcattgagaagaggatggcactcgagatggggcaattttctggttttcttcattcactaaacacaaaagccatgtcctcccaaagaggattggatacatatttatagctgcttgtagcagccatgcagccatgctagtctaagagggtgctgtcagcatcccaacaaactgtcctagagcagagcatcccaacaaactgtcctagagcatctcaacaaactgctgtcctaactgtcctagagcatccaaactgaaagtagagatgctgtcctagaaagctgaaaagcaggaaaaaaggcaccacaagaccaagaccaaccagccaagacttattcctacaatcaatacgtcccatcaggccaaagagtttttcagattctataaacctcccttctttgcaaagattatcaattattgaattaaaggaaattgtgtccggacagattcctctgttaatcatttcagagattaactcctcagccttctcccatttgtcactggtacagagaccatgaatcagtgtgttgaaaataacgatgttaggggttacaccttcactaatcatctgctccaaattaagcattgcatcatctactctgcctgacttacaaagtccatctatcaatgttccgtaggtcactacatccggagttaatctttgctgcctcattttgctgaatacaaacatggccacatctacattttgatgcttagtgcatgcacatattagtatgctaaagacatgacgatcaggttggataccatttcgtaccatcaaatccaagagatcacgcatctcaacaagagctcctttcgtagcataaccatgaagcaaggtactgtatgtaataacattaggctttaggcccctcttgatcatagaatcaagaatctttctagcttctatgcatcttccgttcttgcagagatagtccattagagatgtataagtaacagcatctggttcaacaccatcgctgcacatcttttccaaaattccaatagcttctttcgactgtccagaagagcaatatccatgcacaatactattatatgtgatgcaatcgggcatgactccattcttaaccatcctattaagtacatccatggccttatccatagcttgagccttgcacaaggcagcgacaatagtgttgtaagtcacaacatctggtaaaatccctcgctccagcatttcatggtatgtactgtaagctttgtccgaatccccctctttgaacaagccatcgatgatggtgctgtacgacaccacatcaggagggcagtctcctccatcatccgccatcatgtgcagcagctcgagagcttcttggcttctgctctcatgacagagtcccttgagaagaatgttgtaggagaagacatgcggcgcgcagccaagctctgtcattctgcggagcactatgttcattgcgttgctcgtcctcttctcggcacagaggctcttgagcagaggagtaaagatgatgggttccactctatatcccttcttaataacattgcccaatcccgcgaaaccgaggtccaaacggcccgcgcggcagcagcagccgatgaggatgccataggtgtgcaaggtgggagtcaccgcgccgtcgctggatcgtgccatgcggttgaagccggacacggcggccgcggggctgtcgcgcgcgacggcggcgagggcgcggttcaagctgcggatgatcgaggcgcccccgcccccgcccctgccttgccggagcaattcgtcgaacacgtggagtgcgtcctcggcgccacccccgctggcgcctgctgctccggtctttggtccgggtcgcgcaccctcggagcgagggccgccgccgacggatcgtgctcgggcggggacgcggcgtgccatgcgtgcgccgacggagctcgcagcaacctccgggtagcgccgcgccgcgccgcgcctgagcaactaactgacccgagggaaggaaaccggaggcaaggaaagggaggagctaagcagcacgcgaagaatggcgtccggatcttgtgttggcggtggcggcggcgagccggcgacggcgacggcgtgaggggacgacgggcgcaccgggataattggctgagagactgatgatgcgcggagagaccgtcagagtagagtaaaagacgcgaagagatcagcagtttattaaatttgttattttgtctttttttcccccaaaattcccccctgcaaatttacattttttttgcctgttgttagtggtgcattgtatttcaattgcaactttttttaaaaaaaaactagttaaataaaatgcagataatgaaaaccccaagtatcaactattaagaagtaataaatcagcttagatggatctggggagatggatgtggtggctccggcggtgggtatggaagcgaggaggtggcattagggatgtggatgaggaggtaaggctgtcgaaaaagctcgaggcttgagagctgctcaagctcgactcgtcctagcttgattcgagctcggctcgagctcaagcttctaacgagactagatatacatattttttttgttgttattttataaattaggagattaaatatattatttgtatgtcttgtagtggcatcatatatttattttattctttttcctcttctattaatatgatgaaccataaattaattactttttaaagattatccttctaattaaaaatcaagatcggtagtcgagctcgagcttgatcgagctcaaacctagacagacgagcgagctcgttgacagccctatgaggaggagagcatctcgtcactgaagctccatgaggcgatcttcggaccttgggaggagattgcagcggtgcttggcatgggagcaagatggtccattggcggggctcggtatggggaggtcgggaggaggacgacctagcggtggcagcaaggaggagggaggaggcggtggggctcggcactcggcatgatggttcattgttaaatttaatgaaacttagtgttgtagatgttaataatttttttctataaacttaatcaaaactaaagaattttgagtaagaaaaaagtcaaacaacttataatataaaacttataatataaaatagagggtgtaccgtacagtagcggcagtgcgtagaggcatttgacagtgtaattcaggcatagcagggacgttttggtgatttgtctggctggaccatgcctgttagtgtgctatgtttacaatgttgatgctttctctgtgtttctacaactttacatgttttccattttatttttctattgggagtgcctagcgaacctgaatgttttttcacccatctcactcagatttttcagagtctggatggacgtcatgatgccaagtgaaaacggacttataatggttaattgttgttatgtatatgcatctcagtccatgggccgattgttagtgcagataaagagaagcccagccggctcttcattattattgtccgtaaaagcccaagatgcctaacaaaaagaaaaatattactaagacatctactaaaaagttattacatctagttacattaattataactagcatggtggcccacgtagattgcgcggctagtatcattatattttctcttatataatagcatacattatttctcaatgtattattcaaatatattaaaatgacaacataattttaaattttgtactaactttacgaaactactactccctccgttccaaaatataaggcacaaccactcttaacccaaagaccaagaaacaattattatcatctcctagtttggatcaccttaataaatataatgtatgcatccaatagaattagagatattgaggatagatgatttaaaaaagtaataatttaatggggaagtgctcctaattaattgtatgcatgcatgcaagccttatattatggaacatccaaaaaaattagttgtgccttatattatggaacaaagggagtaatgtgtaatatgcacattgtattttatatatgttttagttattaattatttttaatatcaaattttagttatttgtaaattatattactatatggactctagactcatctttcaatatacatagactctaggctcttcttcaaataatatttatttttaattctgaaactttattatttctaattgtatttctatgtgtactctaaactcatcttttaatattctttaatttttaattttaaatatcagttacttcgaaattgtattcctatattgattttagactcttcttcccatgtttttttaattttgaattttatttatttgtaaattttatttttatacggactctaaactctacttttaattttattatgtttattccgaattttagttagttttaaattcctatatggactctatactctacttctaatattcgttatttttaattctgaatttctattatttcttaattgtatttctatatggctctataaactacttctaatattccttatttttaattccgtctttctattatttcctaattatatttctatatggactctatactcttcttttaatattctttatcatatctagcaaatcgctttttggataattctgaatttcagctatttctaaattatatttctatgtggactctgtttttctttttctcctgttaatatgagaatttctaggccgtgagagcgaacgtggaggctcctttttctattcctttaataagttaatagattgtaattagatagtagtaacaatataattatagtgcaattatattatgatactgtaattttgcactttatctctgtaaccactaaccagtatttattttttttaggaaccactattcagcattagctgcttgctcggtgttaatgactttctagcgggaagcgtaggtcgtgtgatagactgatccatcactcgttttttactccctccatcctaaaatgtttgacgccg

SEQ ID NO: 27306 - DNA, 15579 bp, Oryza sativa
ttatgtatatagttttacacattcacaaaatttttcgaataagacgaatggtcaaacatgtttaaaaaagtcaacggcgtcaaacatttaggaaaggagggagtattttctcgcccgtacaaacactaatcttgacacaattacacggctagaaaattgaaaatctgtaaccaaaaatattttcctgcccatacaaacacgaatcttgacataatcctacggccaaaaaaatcgacaaataggtaacaaaaaaattgtcaaaagattaatacaagtcctgacgctcaattaaccatgagcacggctatttcaataggttggttttagtcacactgcagtggatgcacgcttttccggtagtctgtgatatgcccaacacatgagcctagtcccaatacacgagataaatcacgacctagtttttctggatcttgtggcattgcggcactcgcttcaaagactataaatccccatgcactccctagctccttcatcccgccgcgccagtcatgaggggagtcttggactccgatatatcaaaggaaatgaaagcaaacaatggttcattttactcgatatgtcattaacacactcactatcctttttctccattcacaacacatgaagttcagaaccggccatgactagggtgtcgtcccatcagaatcacctagtccactaggtctaggcctatatgagaaaagcggtcgtagttgttcgtttcctacatattttcttaactcggttcttacctagccagggtcggcgctaaccttttccaggaatcactcaatttaattcttgccaccctagccaaaaaatagttttgttcattaaatttggtttttcacaaacaatttaggtgtgcatcgcaagtggcatttcatgtctctacttgcagcaatgtaaccactcactacccgaagtgatcactcccatcccatccaataatcatataggatatgaatcatctatcaagcatgactaagaatttatcgataattgattagggacataaagtagtgtatagcatattagcatcaaggtatatggcaacaatatcaaaggatatacacacgcaacaatgtgggaatacaatttaacatagcatgcaattttagttgcaaacagaacatttgacgataggatcagcatgctcgaaggagcggaatatgatgacttgccttgcctagctacatgaaccttctcctcagcgtcaaattgtttttcgcacaaatgtaacctagacggcgaacagctaactcaaaatacggtccagtggctaattaataaggaattaaataccaataaaaatgagaaaaataacaagccaacgccaatagataaagagagtatctatgcatctttcgaaagatttttattatcatatcacacagatttttaatctttagattaaaatctaatagatacagtaaaagacaaaaagcaactaagaaacaccataatggacactaattgccatatcttcaagaaaaagaccaaatccaatataaatttcaaaacttacgtgcgaaggttccaaaattatactgtaacttataaaagttacaatataagtttataaattacactgtaacttacaagaaaatacactgcaaatttgagtgagaaatcaggtgaaagataagaaaaatatatttcgagtgagatatagcaaaatcgattgataaatcttgatttagatgaatttaggtaaaagcttcactagtggtgatggggttaaggtggactaggtcaatttgaccagtcaatggcccagagccatatatcggtgacatatatcattaaacatcttttgatcagagtttctaaataaccaggaaccatatgttatactaaggattaagggggtcattatcttaatatttcattagtgaataaggaaggattaaagaaaggtgggccctgcatgctagttagagtaaggtggtgcagaagggtggtggcggcgtaagagggctagcggggttgccggagctttaacacccgacggatgagcagcggtgggccttggggcaggtttacgcaggcagggttaaacctatcggtttagtcgatttaatcggtgcccaccgaaatggcgaaatttccgaaattgcaaaggtgaatattgaagctaaccaaatttttcgaattatgggattagctcaatcatctccatggtcgaacttgcccttaccctgatatgctaaaaatcatatatacaagatatatacacataaacaaaagatgatggtcacgcaccatttacttccttatattctcctcggttgcccctctcgcgttgctctaggaaagttcctgcatactcctattcaattttgttgtcaccatattttactccaatatcccaaaattcatcaaccttaggaagcaaaaacagtcaccatatgtagacagatacacaatgagagatgtgatgtcctcatgtgtatagaaactccaccgcttattatgttttgctgcagttgatttgttcgatctgtcttatagcatctatatatactactgtactcttgttcggttcgtttcacaacttcatttttggaagacagaacataagtacaacttgtgtgttgacgaaggatgaaaaaagtgcctctagtcatgcgattgttggagggcaagcatctggaccagcaccatgttttcatgacattgtaaagagaagaaatgcttgtgtatggaaattgaaaggatccggtttacatgacaagaatcgaggaagtctgacttgtaatggctccattccacaatccacatctgtcttgctgtaccatcaacttgtgcagcctcactttctcgcttatgcttatacttattagctaaaatttaaatttttaactttaaatttgaaattgatttgggttttttttatcaaagtttatttttaacctttaagtacatgtatagggaaaaaatatttttcgtttacaaataagccaaacagtggtgtccggaagtatggtgaaaatccgtattagggtattctgactgcaacgtggattcaatttgccaccatgaaacaatgcacccatgtgtatgaatgtaacaagaaaataatacggcctgctcagaagacctgtataggcccgaaaacggaagcaaattacaggcccgtaaacttactcgcatcagactgagaaaggccgtttgggttcgccggttttccaccgccgccaccgcctccccatctcgatccgaatcgccggcctcctcccgccggcgatctgcctggccggcattctcgcctgccgtctatctgctcggtctgtgccgccggagtcgatccgcgcggccgacctcctcgagtcgccgatccaagcggttgcccgctggcatcggtccacggcggcggccatccgcgcgcatcgttgtcttcaggccttggcgaagccaggttcatcagccatccttgtcatctcatcttctacccctttcggtttgcctcattcgcttcattgcacagtgcacccgaacaacatttttttttccttctgggataataaaataacaaggctgtattttttttttggtttccagtaattacatcggtaaaagatttactggtgaaagatagtactaatcatccaacctggctctaaatatatatatatttttaaaaaggattaaatggtaagatttgtgctgttctttaatgtcatattattattctgatgtgattttttcattactaaacaacaacaactggatagtgcaaaggtgcaaacgggagcaggttcaggggtctgagaaaccaaattgcaagtccagggggctaggttaaatattggcgtaaaaccaatatttactcttttaaaccatgggtaacacctccaaaatacaaaaatgaaatggataaaaattacaagaagagaagaaaataaactgtactgacaatattctggacttcagaaacaaacaaagtatgcttcagtaagtaacaacttctcaagcagacaaccaaatctagttacattcattgcttacccagattacttcgttgctcgaaattcattatcaggcatatgtatgagctgagaatgccttctttatagcattcaattccttgactacattatccatcttcattctttcccttggtgattccttgcagcatgctagaccaagtcgaaatataggataaacaactagttgtgtcatatcttgggtgtttccattgtaggttgcattagtgtccaatatttccaatagattgttaggataggctgtcttgacataatcgataagacttgccataccattgataaaattgtcagttggtcttcttccagtaaacatttccaacaacaacaccccatagctatatatgtccccatccatagagaccggagatcctgagccatattctgcaaacatatataaatcataaaaaagttttagtggatacatagtgagtatgggataaaaggtggatctcgcactacaattttcagtcaaatataacatcaatattacattttgtttttgcatcgctaggtcacattaaaatactatcgtatcattttgttaaactagtaaaatatatagaatggaaataattattgagatcctgacatagttgagttgaataatatccacttacctggtgcaacatatccaattgttcctttaattacaaatgagctgctttctttgcacggttcagcaatattgattatctttgctagaccaaagtccgtaacatgcgccaccatgtcatcgtctaaaagaatgttgcttggtttaatatcacagtgaactataggcggcacaatatgatggtgaagatattccaatgcctctgccacatcaagagcaatatgcagccttttcatcagatttagccttctgtagcttgtgctaattgctgccgtgcttgcatgcagccactcatctaaacttccattacaaatgaattctaggacaagcgccttgaactcatcaccattttggtctgatccactgcatatggtgatcaccttgacaagtttccgatgtcgaattctcctaagagcatcacactcagtcaagaaacttctactggctcctcgttggctaaggttaagaaccttgactgcaataggtactagattctgatcaataatcaaatttccaatgtaaacattgccaaagcttccagaaccaatcaaatttgccggtgagaatgactcggttgctgcttgtagttcggcataagatatcctctcattcgtctcataaagaaataggttttcattatcaatgatattcggtttcatccttgtcttaatgaagcagtatgcagtcatacaaaacaaagagaaaatcaaagttccaacaatgcaaaagattaagacatgtagtcgatgcactgaagcctggtctgaatctttagatgggcatgaagggaattgcaaatctggagggccgccacatagcattgtattacctgagagtgacactatagtgccattacaaaaaatccctgtatttggaacaggacctgacagtgcgttgaaggagaggtttagattagttagaagcgtgaaattcgctagaaattcaggtatgggacctgccaagttgttgttagagagatcaaggatttcaaggctcctcaaattgttcagattttctggtatttgtccctggagaagatttcctttgaaatttaggaaactcaattggacacagctgccaatagcttttgggatttcaccagatagcttattcattgagagatccattttgacaaggctgttcaagagcccaatctgtcttggaatagagccacttagagcattgttggagaggctgagaagtttggtaagggaaggtattgtaagtatttcttgtgggatttggcccatcaaggcgttaccggaaagatccaagtattgaagttttgtgagattgccaaggcttgatggaatgcttccatccagaaaattatttgacaaagtgagagagctcaactgtgaggcattgcctaatgattgtggaatctgcccagtgattctattatgtgatacatagatagaattgattcttgtaagccagccaatatcatgaggtaaagttcctgtgaagagattatatgacaggttgagagatgtaagtttaagcttccacaaatctgcaggtatggtcccaattaattggttgccacttaggtcaatccatgagagctctccgctcaggttggcaatgttattggcattgcaccaacaaggttgttctggccaacatctagcatttgcaagctgctacaattggtcaatgatgtaaaaaattccaaatcactaggccgtgtggcttggagcacattgtctcctaacgcaaagaacttcaggttaccatggatgccaatttccctaggaatcatgccgtgatatttgtttccacgaagttgcaaggattcgagagcagatgcgtttgagaaggtcggtggtattatgccctcaaaatggttagcaatagtgctaaaaatttttatcctgggaagcttaaaaccaatatcgagtggaagtgatcctgacagtctgttgaaaccaagatccaagaatctaatggaagaaatattgaagatcggtagaggaacatggccttccaactgattatctttgacattaaagtaaataagattagccattttaccaaaagattcagggatgttaccagtgaaacggttcccttcaagaacgaagtgtgtcaatgatgtgaggttacccatccagctcaaatctttgccatcaatgaagttcgtctctatgataaacttcacaagtgttgtgaggttggagaatgacttgggaacattaccagtaagattgttgtggccgacatcgaaaatggcaagctttgatgactgaccaagatcatcagggattgaacctgacaggtggttcgtgctcaagttcaatgtacgaagctttcgacaaccaccaaggctagctgggatatcaccatcgaggctgttggctgacagatcaaggacacggaggtgggtcaggttgccgagctgaggggagatggtgccgactaggccagcgccactcagacggagagtggttacgcgacctggatgccggcgattgttgcaggaaacaccagtccattggcagatgacaggtgctggcatgtttgtaccattgccagcggtgtcccaagatgacatcacctctcttgggtcatcccttatgagggatttgaatgacaagagtgctgagagatcatcaccattgatggtctgagaggtgactgtttgcaagaggagggcatgtgtgagaagagagagcatggtttccatggcagaggaaggaggttgagaggttgcaatatggtgataacacttgttaacaagagtatgtcagcatataaggtgtagaagaacgtaggatgactgcacttcattacatttagaagaaataaacaattacagagaagggaccaaaactccaaaaggtgaccccttcacaccaaaacccactcacacatctcacctggccggcgcacgaccacaatatcccttgtgaaacgacttttgtggtgatattgtttaatttcacatgttttgtaacttttgtcttgttgatcaattcatgcaatggttgtcaatggagatataaactacgtgattccctcttgttgcattggcaagccagaaatatttcagcactcctgagagccactatatttggaaggttctgttttttctgcaaaattagtgatgcaacttacatgttttcttatttagtatttatgacaccaacacacactaccaccacttttactggctgtgaaatggatccttaatatagtggctgtgaaatggagccttaatatctctctttcattcttatgcaaaggaaacgtatagtggctgccaaatgcagccttaatatatctcctttacgttaattcaacaaataatacagaaatgtttgtatttttcaaactgtaaaatatttgaagttaacaattcaaaatgaacttactgtagaggcttacattttcatgatgcttaggggttgtttttttaaaattatcaatccgtatatatttcaaatctttgtgatggctaattaagcagaattgaccctgcaaatgatgttttgaaataagtagataacattttactttgagaagtatggtctctatcaggaattagtatttgtgacaaagactatagcatgcaagaccaaacctcgaactgttcaagtgatgctgaaatctcgtacatgaaaactaacagtgtaaaaaaattagtcgtaaagagataagttgtgttgaattcactgttcacctggcacaatcaactcaatcagaaagtgacacattttgatagttctatgtaaaatagtttgcccacatgattttgcaaaacaatgggtatttaatattgagatagtcaattttgaagtttacagtttcatctgatttgttcaaaatatatgttgatgctttgatcatttacaatttcggtcttctgtttgagaagaccgaactttctttagaccataaggaccagaccgaactattggtccagaccgattgcccacccctagttaacaagtttactttcactaacatctgaacaaaagaatcagcagcctttctattcaccgatttcaaaaatactgaaaatgggaatatccaattcagttgtagatttggaggcaattttccaatgtcggcacaacatgaccaacatgtgaactttgtgattgcaccatgctattattttgtcttgcaaaacctcttttctaactgtccaaaagatggtccaatatcagatatgacatttgacctaacacctattctaaaccacagggctgtctccatagcagcctgcatcatttggaacaggaacacaaacaaactgttgcctgggagcagcagtttcatatgctattgtctagtgcgatgaagtcacgatgcttttcaaaattcgtgttgtaacattcgtgttgtaactttgcttcaaaaaaaaaaaattcgtgttgtaacatttgtcatttgtcatttccccagggaatccaaaggttagaccgcataactttcaggtgatattagggccctacaagttagtgctgtgccggccattggaatatgatacttgatgtaacgaaatgatcaattattgaggcctaacaatgttctttacattgatccacgaggagtgttgaagttgagaaagatgctgacaagatatcaaccagacccactcagcatcctcatcctctcaactgaacctggttctgctgcagtttgcagtgtatctacaacttttaagctgccacctgtttgttgttgttggataaaccccaaaacacttcattttaggagttttcattttcccttgatttcagcacttttcgccgtcggcgcagcgtgtttatagcagttcgtgtgcaacttctgtttgctattctaaattagaggtaaaaaaaatcaagaaagtgtgtggttttggctgcacaaccgtgttcgatttgtccaatttatccttcttgatatgtgctttgtttttccgtttccagtccattgtcagattcttggtgctcctactgcaaatctgttcatggcaaggcacaactccaacggctgtcagatccaaatccaagggctcacatgctctatggtactatagaaatacttaggttactgtaacatcagtattgtggctatgtatctaatacgttcatcagaaaaaaaaaactgaaaaagatggataaaacagcatggagtccttcccaattgcctctcaagcatattcgccaacaacgatcaacgtttatctttgggttcaaactagagatgttgctgagttgacgcattgaacattgacttgcttgttagtaatttggtagacttgttgactgcttgatctttgatatcctttgacctttgatatgcatgccatctgtactgtaactcaggagagtgagagaggggagaatcgtaagacatgacatatactccctccgtcctagaaaaaactcaacctcgtattacgatgcgacacattctagtacaacgaattaggacatactctatatctagattcgacatcctagtactatgttgtcttttttttggatggagggagtacttagtacattcagtacgtacttgattgaacttattggtaatactacaggcgattcaatcattgattacagaaaagccttcactagacataacctcgattaaaaggggaaaacgacagctgacatgttatcatcatgcaaatcatggtgcggctctcacgcggttgttgtttatggttggacccaagcaccgtaggaagagtgtgaaatgtactagcaaaaattaaaaaatgcaatagtattgtgtaatgatatgtatatttaatttgtgcacgatggtttctaatttgtcatcatcgcttctccaaaaaatatgctcctggtttttcccaagtgaactttaggtaggcacctcggtacatttctaattttagtgttactccgttaatgttttttatccatccaatgtaatatactattctttatgactcaacgtttattatcatggacatcttctcaacagtttattatcatgaacatcaccaccggcacatttgctatcggcattactttcatcttcggccaactattgtcaacaaagttatttgcttcatgagtctggacttcgtcaacgctaaaatccgactggatcaccaacatcattatcttcatcagcaaaaggaaactggagccatatccggctatgttttcctctttgtaaccttgtccgtcaacctatatacattagcaaaagatggcaagcgagccctccaaggacataagcacgatcagatcgtcagatcaatatacattcggcggatacaatcccttgaaataagtagggtattacctcttatctagagggtctgaacttgtctaaatccatgtcttccgcatccattcacttttagatctcgtacgctaccccttttattattgacggtttacataatcgatagcttacaaactgaattgaattattaaaattttggcaaataaactcctaatcaaaacaaaatgataatgaacctaatctgaaatgccagtacacaccatcgtaaagcgtccgagccttatcactgctcttttttcttcccacgtctggttgtaaccgattccccacataacattagacacatctatcatcaccaaactttgaacataaaattaatccatctgttctacagagaaaccctaggaaccagcactacctaggaatcctagttcacccgccaccatggatgacctcgccgcaatccgctcacttccatcacggacgacctctcatggatctgcctgctggccgttatcgataatccatagctatcaccaccgaccaactccgcaaccttcaactgccgaattcagtgtgcccgaggtctcaaagccgctgcacacactgcgcgagccgcaaaccttttgacttttgtagacacagcccacttcgccgttgtcgataccgcctcgccacatccgtctccatggttgtcgttgctgctagatctgttgatcctgagcacctaggaagccaaattcatcatggagaccatcagggaggaatggtggcagttgccagagtggtggggggactacgaggggtggaagagcgggaggggggggggagccaagttgtctaccaatagggtgccaatacaccattatacatttataaaatgtttatatagcaacgaaagattttttacgattgcatccgctcttgtcctacaatataatgaattttatgggaggtaaacatgtcatcaaaaagtgtatacatgcaaaataaccagagactttgaccaaatagaaaattggatgatccaaccaactagcatacggcctgaaattgctaattagcgcgtacgcgctattagcgcaagttgcgcgtgtttctagcccacgtggcccacgccctcacgaagcccatctcttttctctttttctttttttctcgcttctttttttccaccacggggagactgtgaaacgttttttttccgtgattttttattttagaaattgaatctttcatctttaatttctactgaaagttttgaatttgagttgaaagtttttaagattcgagatgaaaatttttaaatctgagttgaatgtttttgaatctgagatgaaagtttttaaatctgagctgaaagttttcaaatctttagttgaaagttttcaaatcatgacttaaatagttgaaagtttttaggttttgagatgaaagtttttaaatttgagttgaatgtttttgaatatgagatgaaagtttttaaattcgagtagaaagttttcaaatattgacttgaatttttcaaatcaagattttaaagtttcaagatgtgagttgaaaatttttaaatttaagatgaaagtattcaaatcttgacttgaaaatttttaaatctgagtttaattctggacttgaaagttttcaaatcttagttgaaaagtttccaaatcctaaataaggccctgtttagttcccaaaacatcacatcgatctttttatacatgcacgaagtattaaatatagataaatttaaaaactaattgcatagttaggggggaaattgcgagacgaatcttttgagcttaattagtccatgattagctataagtgctacagtaacccacatgtgctaatgacggattaattaaactaaaaagattcgtctcgcggtttccatgcgagttatgaaattagttttttcattcgtatccgaaaaccccttccgacatctggtaaaacgtccgacgtaacacccaaaaattttccttttcgcgaactaaaaaggccctaaatatgagttgaaagtttgtttcagtcaactaaacaagaagacacaaacgcatgacaaatttttatcaaaaaaaaacttaaaaaacggcgccgtgaaagtgcgcgcctccgttgctagagcgtacgcgcggaacaggaatcccccatacggcctgctcggaagaattgtattgggccgaaatcagattaaatgaccataaacttattcgcatcagaccgagaaaggccgagtgggttcgctggttttccaccacctccggttgccgcagctggtgacagcctcgattcgattaatgcggtctcctcccagcgtcaatctgcttggccggctgccggcgtcgatccgctcggccgacctcctcgcatcgccgatccaagcgggtggccgttggcatcgacctacgccctcgcgatggtggcgacccaccgtttctgagccagccaaggttaagaccgcacggttccctcacgaacgatcacatgtaagtataccacatctaattaagtggtgaacacatgatgaattttcttccacacatgttttgcagatcggtagcaatatgggcagatggcctatttatcggagacgactacgcgtcggatgtccgacaaaatacaaaaaatcggacgtcacgcccagctcagcatctgtcacacgcaagagcgtccatctcagcctctgtcacatgcgcaattatatatcagtcgaagagatatggcatagccacttactagtagctacatgcatgcttagtagggtagtacaagctagtagggtaggtataacacttattttccaaattttaaactagtttatcttttaaattatttatccaatttacgatccgattacatcatttaattcattgcaattaaatctttaaaacaagaccacacatgcatatatttcgatgaaaaaaatattttaactttcttaatggttttctttgaaatgttgcacatgttatatttaaatgtttcagctagtatacatatgttgtttcattagttaatttgcaaattttgtaggttgttttccttaaatgtttcactaagtatttaataatgtttcaatagttatagtttaatactcattagtcatataaaaatatttgaacaatatcaagtttttaaaatattttgtaaatctcatatgacttttcttgtttcgctctctgagactcaatgtttcatataggtggttaatggtgttgcagtcgatatttttttaatgttacatttctctagaacattttatacaactgaaacaatttttttaagggggtgaaacaacatttattttttttatcaaaatataattgtgtgatatctttttataaaaatataattgtaatgaatacaatggtgtaatcggattaaagaacgaataattattttagatacaagttgtgatccgattgcaccgttgaatttgttgcagttaaatctttacaaagagatctcacatgattatattttgtataaataaagcatatatatttatattactaattgaaacatttctatattataaatagaatattgatttgtaatcgctgaaacattacaaaatacacgttgaattatcgaaagaacaacacgtgcaacaacctaaatgacctagtgaaacatttgctaaaacatccaaataatacaatatgcaacatttcaaatgaactactaaaataccttctgaggcattcaaataacaccacgtgcaacatttcgattgagctagtgaaatacgttctgaaacatcacaaaaataccttctgaaacatccaaagaacacgacatggaacattccaaatgcaatagtgaaatatcacaaaatacctagttaaacatcacaaaatacctagaaaaacatcaaaataatacaatgcaacacttcaaaatgacctagtgaaacattagctacaatatcacgaaatacctcatgaaacattcaaagaacaccacgtgtaacattaaaaaaatgataccgtgaaacatcagccgaagaaatcacaaaatacctcctgaaacattaaaaaacaccatatgcaacatttcaaaatgacctagcgaaaacatcattaaatacccattgcaacaattaaaaaatccattaaaaaaataaaaaaatatatagtcaagtaagatcttgttgtgaagatttaattgcggtgaatacaatggtatactccaattacggattagataaatactttatgaaataagattatttgaagttatacattaagaagtaccagcaagcatatgaaagggaataaaaaaaggagagggtggactacttcatgtcagagcagtgcatgctgcatgcatgcagaagttagagtgagaggggaggggttgcaagttgcaacgggcaggataaaaaacattcatcacatggtttgagaagaggcgtgcgggtgtccgatttttttcttaccatcgggcgtccagataggagcgttttccctatttatcacaacattgttcttccaagattgctatcttttacccaactaatgttcttccaagattactattacaatactactctcttatttgtactacctgcaattcagactttgctacactgtttgtccatgttctttttatatcaattttttaattggtgctcaatttaatcctaaggcaaattttggtacaggacacttgttatgtgtggttttagccctaggatactgccaaactcacttttggggg

SEQ ID NO: 27307 - DNA, 7122 bp, Oryza sativa
aggcgcgcggcatcgcctacgagaagaagcgttggaaacgcccgcccacctcgtcttctcactctcaggccgccgccgccgctacctcctcgcgagccagccgctagcccgctgccgccaccgccgttgccggagagatcagccgacgtgggagcttgtgtcgccatcgccgtcaccatggggtgcacgccactctcgccagccgcccgccgccgcggctcctatcgcgcgctcgctcgctgcctcctgccacgcactcgctcgccgccgctgccgctccgccggccgcgtgctcgtccaccgccgccgccgccccactccactccgctggccgccgttctcaccatctccgccgtgactgatgctaccccatgcgagcgcgctctgagagagaaaagagagatagatgaggagagggataggagatagaactgacatgtgggcccaaggacatttttgacatttcacgcgatttctctctcctccccaaccggaaagtattattttaattggcgcggtgtccactggcaaattaccacgtttatggagtgttttcccccaaaagtgagtttgggtagtgtcctagagctaaaaccacaaataacaagtgtcctgtagcaaaatttacctaatcctaatggtgatcacacttgctctctcatcgtatctattgattattttaggtggttgactgtgcctgattccttaatggtggttttatgtgcacaagtgcaaattaagagcaaagccgaggtaagaaattttttaatctgttggttccttttgattatgttcatatggattgtcctccattgtgtacatagtttattccaaaattttgcaagtgtctgtatctattttgtggttgaagtcgatattcttaagttctattttctttatttgtttgacagcgtaaaaggctgtggatgctgccatctgattcaccttcaactggaacccatctgaccttaaaggacagctcagaaatttcagagaatacaattagttggtaattaaattattctctttgtattgtgttttcagaatcattgtttcagtgtcacaccttaggtgacaatcttcggaatccatttttcggttggctaacgtgctattcggttgattgtctgtctgtctcaattttaccctcctgaccagtttggagttgacagattttgtgggcagtgaaatcctaagcttcacaacttcagtttgtgcatatacagaaagacctctctgactgatcgttcacataaaacaatgcaaccaagctgtgtaagttatgtcacagcagtaaactagacctgctactgtctcttggatgaacatgctcaaaatactatttattttcacttgatgaattgccaatgagctacaagcgtagctggaagcatggaagaactcaaggagaaagaatacagcaaacttgaaccgggaagctacaagcatagctggaatggtacaactctaggtataaactgtggcttgcagacgttttcggattcacgaaaattcgtgatgtgtttatgtgtcttcttctgtttttaatcgttccttttcatttatttgccttttcagtaatatgtcaacatattatagcactttgtgatcctgagtaggtttaatttatctaaagagtaatatgtaggattcaattagttttatgaaactattcatcacagttgttctatacattcagcaatcagcactgcatctttttttttctactgcatataccgtagcaatgcgcgaggtatcaactagttatacgtatgatgttgccatgcaatttaatagaattttttttgttcttttccatacactcttaactcatcacaattggatgtgtatatattcaatcatttgttaatttgtggtaatcctggcattatgaaagagaaaaatacaaattatcctctagacccgaaaaccagacatctttcacccttaactattaatatcagacgaattacccccctaactcaatttaaagtggttttggtcctacgtgacagtctagtcagcaatttttttttaaaaaaaaacagcaggaccctccatatctctctgactctgtctctttccaaaatcctcactctctctcttctccctccctcacctccatctctctctgtcaccaaggcagcagcgaaggggaagtcaaggattcgacagcggagggggagccgaggatggcgagcgacaacacctccatctctctctatcaccgagaggcagcgtcggagggagagtcaagaatggcgacgggcaaagctcgcaggatggcggaatgggcgggtgggtctcatggcaacggaggggataggcggagctcgaggtggcaagcagagctcgggacagccgaggatggcgagcggcggagacggcactctctttcttctccctccccttctatcaatcggttcggatggtgagcggtgtaggcggcgctctctcgtttcccaccccttcagtcaatcggttcggacgatgagcaacggtggcggcgctgcattgtgggggcggcgagtggcggaggcagctccttcgcagcctctgccgacgtgcgcctcctccacggccgcctcgtgagcttgttgctgtcatcatcgtcatcgccgctgagacctgccgcacccaaggttgtctacaatggtgtgcacgtgtgacgtcaccgtcgcctcccgcgctcaaggatgctcgcagccaccggcgcacagtttgtcctcggcttccgccggtgcacggggctcctcctcggcatctaacgcgtgcgagagagggggtgagagacgaaagagatagagaggagagagatctaataggtgggccccatcattttaataaaagaattatggactggactgtcacgtaggaccagaaccgcttgcaaagctgctggggaagggggggtttcatcaggtattgatagttgagggtgaaagatgtcagattttagggtttagggggtaattcgtactcacccaatagtgcagggtgtaatttggacttttccctagtgaaaagtatcataccaattggcatgcttcctaatgttgagcgttaaaagaagattaaaaaattaggtctgcatataagcacatatcctttatgattaattttgttcaaatgataacttgtattactaatcttccaaccaggctccaagtaacatttattttagaaatgaattaaacggtacgatttctgctgttcttttaacgtcatattgttactctaatgaacaattgaatagtgcaaaggtgcaaatgggagcaggttcaggggtcggagaaaccaaattgcaagtccagggggctaggttaaatattggcgcaaattcatcaagtttactcttttaaaccttggatagcacctccaaaatagaaaaaatggaagggataaaaattactagatgaaaaaggaaataaactgtactgcaatatactggacatcaaggaaaaaaaaaagcagcctgctgtaagtaacaacttctcaagcaggcaaccaaatcaagttacatatcattgcttacccagattacttacatagtatattgaaggagaggtttagattcattagaagcgtgaaattcgctagaaattcagctacgggacctgccaagttgttataaaaatcaaggatttcaaggctcctcaaattgttcaggttttctgggatttgtccttagagaggatttcctcttcccaaactgtcatggaattaatggaacaacttagagaattgttggagaggttgagacgtctgataacggaaggtatatgtatctcttatgggatttggcccgtcaaggcattaacagaaagatccaacttttgaagttctgtaaggtttccaaggctaactggaacgctgccgtatagtaaattattagacaaatcgagagagctcaactgtgagatattacctaatgattctggaatctgcccagtgattctattatgtgatatatagatataattgatacttggaagccggccaatatctggaggcaaggttcccgttaagagattatatgacaggttgagaaatattagtttaagcttccacaaatcggtatgtatggtcccaattatttggttgccgcctaggtcaatccaattgagctctttgctcaggtttgcaatgctaattggcattgcaccagcaaggttgttctggccaacatctagcatttgcaagctgctacaattggccaatgatgtaaaaaattcccaatcactaggccgtgtggcttggagcatattgtctcctaatgcaaagaacttcaggttaccatggatgccaatttccctaggaatcgtgtcatgatatttgtttccacgaagaagcaaggattcaatagcagatgtgtttgagaaggtcggtggtattatgccctcaaaatggttagcaattgtgctaaaataatttatcctgggaagcttaaaaccaatatcgagtggaattgatcctgacagtctgttgaaaccaagatccaagaatctaatgcaagaaatattgaagatcggtagaggaacatggccttccaactgattatctctgacattgaagtaaataagattagccattttaccaaagattcagagatgttaccggtgaaacggttcccgtcaagaacgaagtgtgtcatgatgtcaggttacccatccaactcaaatttttgccatggatgatgttcctctttatgataaacttcatgagtgttgtgaggttggataaagactcgggaacattaccactaagattggttgtagccagcatcgaaaatggcaagctttgatgattgaccaagatcagcgggcattgaacctaacaggtggttcctgctcaagttcaatgtatgaagctttcgacaactacctaggctggctgggatatcaccatcgaggctgttggctgacagatcaaggacacgaaggagggtcaggttgccgagctgaggggagatggtgccgactaggccagcaccactcagacggagagtggttacacgacctggatgccggcaattgttgcaggaaacaccggtccatcgacagaagacatgtgctggcatgttggtatcattgccaatggagtcccaagaggacagcacctgtcttggatcgttccttatgagggatttgaatgacaggagtgctgagaggtcatctccattgatggtctgagaggtggctgtgagcaagagcagggcatgtttgataagagagagcatccaaagctgccacttgatcgccatgatagaggaaggaggttgagaggttgtagtatggtgatagcacttgtaagcaagagtaagtcagcatataaggtgtagaaatcggcaccagtagaatagagttgtaccggtgatagcaagtagtggtaattgtgggcttccttggaaacgcaggatgactgcaattcattgcatcaagaagacataaaaaattaccaagaagggaccaaaaggtgagccggccggcacaccacaacaatatcccttacttatgaaacgatttttgtggtggtggtttttagtttcacatgttttgtaactttagtttattgttgattcattcaatgattgtcaatggagatatataaactaggcgactccctcttgttggagcggcaatatatttgaaagggcctgttatttctggaaactagtgatgcaacgtacatgtgaaatggagctatgacacgaacatgaactccaacgcacgctaccaccacttttactggctgtgaaatggagccttaatatctctccttcattcttatgcaaaggaaacatatagaggcagtgaaatgcagccttaatatctctcctttaggttaattcaacaacaaatacataaaacagaaatgtttgtatttttcaaagtgtaaactatttgaagttaacagttcaaaataaacttactgtatgaggcttatattatcatgatgcgcagaggtcgttttttaaacttatcaatccataaatatttcaaatctttaatatggctaattaagtagaattgacgtccttgcaaatgatgttttgaaataagttgatagcattttactttgagaagtactttctctattaggaatcaatatgtgcgacaaagactatagcatgcaagaacattttacttggagagtgatgctgaaatctcgtacatgaaaactgacactgtaaaaaatttagtcataaagatataagttgtgtagaatttactgttcacctggcacaatcagctcaatcagaaattgagacatattcaacaacaaaccatgcgaacaaattttaaataatcattgtttgttcgcatggttttgcaaaacaatgattatttaaaattgacgtagtcaattttgaagtttacagttttctctgattagttcaaaatatacattgatgcttcgatcatttacagttttggtctcctgtttgagaagaccgaactttctttggaccaaaaggaccggaccgaacaaaagaatcaattttagtttcactaacctctgaacaaaagaatcggcccttctattcaccgaattcaaaatactgaaaaagggaatatccaattcagttgtctagatttgaaggcagtttaacatgtgaattttgtgattgcaccattctattatcttgtctttcaaaacctcttttctaactgtccaaagtatggttcaatttcagatatgacatttgacctaacacctatgctgaggcacagggctgtctccatagcagcttgcatcatttcaaactacaatatccaccatgtcatgttcatgggtggaaaaccatctatcaacggtgttatgtccctggttttttgaaaaattcagtattataattgacgggaatactacaattttatgaaacttcggggaaactaactccatctgttccttttgtaaaagaaaaggaagacactattgatcatgtatgtagggcctatttggaacaggaacaaaagcaaactgttgtttgagagcaccaatttcatatgatattgtctagtgcgatgaagtcacaatgtattcatgctctttaaaatttgtcttgaacaattgtcatttcccctggaaattgaaagggtaggccgctttactttcagg

SEQ ID NO: 27308 - DNA, 15343 bp, Oryza sativa
  unsure (1)..(15343): unsure at all n locations
aaaatcggtgaccaaatttcattaagaaaggggagtttaaaatacaaatatagctttgcatcgacagtaggctgtcgagatggggttgaggctgagcctcttccccatcaaagcggaaaaagaaaacaaagcccgaaggctacatcacgaaggtgtgtttctattacagacttggaaataacctccggacttccacacgaatatttcctccttgatgctctctagaagctgctccgccgtctgcaatctgtgctgaaaaatcctagcattgcgctccttccacagcagccaacaagacagggcaacaacacaacactgtcgaaattatccctgtagccggtccgaaaacgcaatcgcgctatcagccaccagtctgctagcgtctccccgtcctgccccggcaaagggaaatccacgttgatccaatcccgcagcagacgccatactcgttttgtgtagtcgcagctgacaaagaggtgcaaacaatcttcctgctgtcgttgacagaggacgcattgatcttgatgcggccagcccctctttgccaagttgtctgctgtgaggcatctactcttcgttgcaagccagagaaagaatctgactttggaaggagctttggtttgccaaacaagttgacccgagagagaaacctcccttgccatgaagaagaggtcataagcagatgacacggagaaaaatccatctggagtaagcttccatcgtattgtatcatcctcctggttcaggctgagctgctgttctttatcttgatccatgaggattgtggaagagacaatgacaaccagcttcactaaattaagaaagatgctgaattgctgaccagagatcaattaaacccactcgccaaacagccacattgctggagtgttggtcattgttgaataaactccaacacatttcatttttaggaatttcactttctctttgatttcagaacttatctccatctgctcagcgtgtttttagcatttcgtgtgcaacttctgtttgctactctaaataagaggtaaaagaaaaagcaagtgtgcggtgtgccgttttggctacataaccatgttcaatttgtccaattttgagttcagcgcctccttgctatatgctatgtttcccctgtttttccctttcctattcattgtcagattttttgtgcaactactgcaaaggtgttcatcgcaagggccaactccatcggctgtaagatcgctcacattatctccagtgcagtagacagcacttaggttactgtaagagcagtattttggctatgtaatttatctgatccgttcgtcagaaaaactgaaaaacggtggataaaatagcatgcagtccatcccaatcgcctctcaagcatgagttgtcgagccgggatgactactagcatttctgataatcaaccaatttttacaaacgtcaatgggaaattggaaatccaaagtggcaacatcaacggcggagcccgggcggctgcccaactagcccgggaactagctccactgctgcatattcatcaactgcaatcaatgtttatcttttcgttcaaactagatgttgctgagttgaggcattgaacactgacttgctttttactaatactccctctattcctaaatatttgacgccgttgacttttttaaatatgtntgagcgttgattttattaaaaacttgaaatatgtaaaactatatgtatacataaaagtatatttaacaataaatcaaatgataggaaaaaatttaataattacttaaattttttgaataagacgaacggtcaaacatatttaaaaaagtcaacagggtcaaatatttagggatggagggagtaatttggtagacttgtttagtcgttaatcatctttcgaaatccatgtaaaaaattaggcaaaattttctacaggacacgcaaaaaaacgtgtaattggctgggggacaccgtaaaaacgagacactgcccatggacagtacaaaagttgtgtaattggctataggacatcggacgcattattttatcattttcgggatgaaagagtggagagaaatttctaaatgacgggaatgccccctctactcctccttcctttcttcacactgcagccgacatgtggacccgcacacagtgtcgtcatcctcctctcgcaacgctcaatgccggtcgcgtccccgccctcgatgccgctgttgcctccgttcgccgctgcaccaacgctcagaccacctcctccacctcatatcctccctcctcaccccgcccacacctcccctcctctgcgagccgccgttgccttcgcctgccaccgcgccgacatccagatcacctccctccacctcatttcctccctcctcgccccgcccgcacctcccctcctccactacgccctcgcccacacccgcgctcaccccgctagattccacagcggggacatcaagcgctgtccagatcgtccaattcggtggcaatatcagattctgacggcgcattgtccccctcatcatctccaagaaatccatcaggctcggcggcaagaggcgacctgtcttcccctatctcgtcgtcggagaggtgggaggggttcttgaagaagccgggcaggttggggtcggcgtcctcgacatctctgccctcgctgatgaccgggctcagcggcggcgcgacctgctgtgcttgctggtggacatggcggagacgagggagaaggacagattgcggctctgaggcggcgggcagaggaagaacgcgcagctggcgttgagcgttggcgtgaggaggacgacgacactgcgcgggcccacatgtcggctgcagtgagaagaaaggaggagtagaggggggcattcccatcatttagaaatttctctcccctctttcaacccgaaaatgataaaataatgtgtccggtgtcctatagctaattaaacaacttttgtagtgtctatggacagtgttacttttcacggtgtccctcagccaattacacgttttttgcgtgtcctgtaataattttgccaaaaagttatcaaccacaagcatgccatctggtgatctggactgtaactttttttttggtgggaggggggggggtgttggagggaatggtaaaacatgacatatactccattatacatttgtactacgtatatacggagtatatagcagccaaatctatactttctatatagttggtacccactaacaatcattagaagctaaagctcaacatgcaaatatgctacatcatcacccactagcaattactattttagaccatttaaaatctcatgcaagcatgccacatcttcactcttttaaaccatggatagcagctccatggtttaaaaattacaagatggaaaaggaaataaactgtactgacaatatcaaattttgaatatattttgataatatgtttattttgtgttgaaaatactattatatgttttctataaacttagtcagactcgaaaaagtttgactagaaaaaaggtcaaatgaattataatataaaatggacggagtactgaacttcagggggaaaataagcatgcttctgtaggtaacaacttctcaagcagacaatcaaatctagtaacatatcattgcttaaccagattacttcgttgcgcgaaattcatcatcaggaatatgtatgtgctgagtatgtcttaattatagcattcaattccttgactacatcattcatcttcatcctttcccttggtgattccttgcagcatgctagaccaagtcgaaatataggataaacaactagttctatgatatcttgggtgtttccattgtaggttgcgctagcatccagtatttccagaatattgttaggataggctgcctgacatagtcgacaagacttgttgtaccatagttaaaattgtcagttggtcttcttccagtaaacatttccaataacagcaccccatagctatatatgtcaccatccatggagacctgagatccggagccatattctgaaaacatatatataaaataaagtttgattaggggggtaaaaggtggattccacactaacaattcatcagtcaaatataatatcaatattacattttgtttttgcatctttagtcacagtaaaataatatcttatcattttgttaaactagtaaaatgcagaacggaaataattaatgagatgctaacacatagttgaattaaataatagccacttacctggtgcaacatatccaattgttcctttaattacaaatgagctgctttctttgaacggttcagcaatattcattatcctcgctagaccaaagtccgtaacatgcgccaccaggtcatcgtctagaagaatgttgcttggtttaatatcacagtgaactataggcggcacaatatgatggtgaagatattccaatgcatctgcaacatcaagagcaatatgcagccttttcatcaaatttatccttgtgtagcttcttctaactgctgtcgtgtttgcatgaagccactcatctaaagttccattgcaaataaattctaggacaagtgccttgaattcgtcgccattttggtctgatccactacagacggtgatcaccttgacaagtttccggtgtcgaattctcctaagagcgtcacactcggtcaaaaagcttctactggctcctcgttggctaagattaagaaccttgattgcaactggcactagattctgatcaataattaaatttccaatgtatacatggccaaagcttcccgaaccgatcaaatttgccggcgagaatgaattggttgctgcttgtagttcggcataagatatcctctcatttgtctcattgagaaataggttctcattatcaacaacattcagtttcatctttctcttaatgaagcagtatgcagtcatgcaacacatagaggaaattaaagttccaacaatgcaaaagattaagacatgaagtcgatgcactgaagcctggtcagaatcttcatatgagcatgaagggaattgcatgtatggagggccaccacataacattttatttcttaagagtaacactatagtgacattacgaaaaatccctgtatttggaactgggccagatagtttgttgaaggagaggtttagattagttagaaacgtgaagttcgctagaaattctggtatgcgaccttccaagctgttcttagagagatcaaggatttgaaggctcctcaaattgtttaggctttttgggatttgtccttggagaagatttccttgaaaatttagggaactcaattggacacagctcccaatagcttctgggattccaccagacagcttattcattgacatatccattttgacaaggctgttcaagagcccaatctgtgttggaatggagccaattagagcattgttggagaggtttaggcgtctggtaagggacgttattgcaagtatttcttgtggaatttgacctgtcaagctgttacaagaaagatccatgacttcaagttttgtgaagttgccaaggctagttggaatgctgccatctagaaaattattagacagagacagatagctcaattgtgtgatatttcctaatgactgaggaattttcccatcgattctattatgggatatgtagaaagaattgagccttggaagcccgccaatatcaggaggtaatgttcctgtgaagaggttatatgacaggttgacagaagtaagtttgttaaacttccataaatcttcaggtatggtcccaattatttggttgccacctaggtcaatccatgacagctcattgctcaggtttgcaatgttaattggcattgcaccaacaaggttgttctttccaatatctagaaatcgcaagctactacagttggtcaatgatataaaaaattcccaatcactaggccgtgtggcttggagtgcgttgtctcctaacgaaaaaaccttcaggttaccatggatgccaatttccctaggaataatgccatggtagttgtttccacgaagaagcaaggattcaagagcagatgcgtttgagaaggtgggtggtattataccctcaaaatggttagcaagtgtgttaaaacgatttatcctgggaagcttaacaccaacatcgagtggaagtgatcctgacagtctattgaagccaagatcaaagaatctaatggaagaaatattgaagattgataaaggaacatggccttccaagtgattatcttggacactgaagtaaataagcttaaccatcttaccaaaagtttcggggatgttaccagtgaaactgttcccttcaagaacaaagtgtgtcaatgttgtcaagttacccatccagctcaaatcttggccatggatgaagttcctctcgacgataaactttgttagtgttgtgaggttggagagtgacttgggaatatcacaggtaagattgttgtggccaatgtcgaaaacagcaagttttgataactttccaagatcagcagggatggtacctgacagatggttcctgctaaagttcaacgaacgaagctttgggcaaccgccaaggctggttgggatatcaccatcaagactgttggctgacagatcaaggacatggaggtgagtcaggttgccaagctgctgggagatggtgccggttaggccagcatctctcagattgagagtggtaacacgactggggtattggcgatcattgcaagtcacgccggtccattggcagaagacaggtgctgtcatgttggtaccattgccgatggcgtcccaagaggacagcacccctcttgggtcgtttcttatgagggatttgaatgacatgagtgccgagaggtcatctccattgatggtctgtgaggaggctgtgagcaagaggagggcatgtgtgagaagagagagcatcgaaagctgccacttgattgccatggtagtagaaggaggttgagaggttgtactgtagtgatagcacttgtaagcatgaatatgtcagtatataaggtgtagaaatcggcaccagtagaatagagttgtaccagtgataacaagtggttgtaattgtgaggcttcttgaaaacgcatgatgactgtgcatcattgcattaagaagtaaagaattactcgtacaaatcagggaccaaaaggtgaccccttcacaccaaaacccactcaaacatgtcacctggctgacgtacaacacaatatcttataaaacgactttagtggtgatattttttaatttcacatgttttgtaatatcattattgttaattcatttaatggttgtcaatggagatatataaactaaggccctgtttaaatcacaccctaaaatttttcaccttgtcacatcgaacgtttggacacatgcatggagtattaaatatggacaaaaaaaaaccaattacacaatttgcgtgtaaattgcgagatgaatcttttaagcctaattgcgtcatgatttgacaatgtggtgctacaataaacattttctaatagcgaattaattaggcttaataaatttgtctcgcagtttataggcggattatgtaatttgattttgttattagactacgtttaatacttcaaatgtgtatccgtatgtccgatgtgacacgccaaaactttacacctctgcatctaaacaccccttaagcaatttcctcttgttgcagtggcaagctagaaagacttcttagtacaatatatttgaaaggggctagctgttttttcggcaaactttgatgaaacttacatgtgttttcttatatgttatttatgacaccgacatgagctccaacacacaccattttactagtcataagttcgtgaaaactcataaaactataatgatatggaaatttttcatgccaaatccacttgtcccacttttacatgaaaatcttattatcttaggtggtgttttggaaggagggactaaacttcagttcctgagggactaaaatttttgtgagttccttcccaaacacccccttaatctattcccaagagatctttaaactatgacgcaagaatttcaacatgaaatttctttctgaatgaagggtgtatagcttgtaactattataaaaaaaaagaaacaacagtagattatctcatacatagtaagagttattaatctgagtaactcacatcgcatcctaatgtacaatgaacattttcaacattgacgtatcctttttgcttttttaccggcaaacattcacaagctcttgagaatgcaatttcaaaattattatgcaaaggaaacatatagtggctgtgatggagccttaatatctctcctttagattatttcaccaccaaatacagaaaaaacagaaatgtttgtatttttcaaattgtaaaatatttgaggttaccaattcaaaattaacttaccgtatgagggcttacattttcatgatgtttagaggttgtttttttaaaaacttatcaatccctatatatttaaaaacttcaatatggctaattaagcaaaatcgaccctgccattgatatttgaaataaatagataacattttattttgagaagtatggtctctatgactctatcaggaattaatatatatttgtgacaaagactatggcatgcaagaccaaacctcaaactattggagtgatgcaaatctcgtacaggaaagctgacagtgtcaaaaatttagtcgtatagagataagatgtgtagaattcattgttcacaacttcacatagcacaattaacccaatcagaaagtggcacatatggcgagttctatgtaaaatagtttgtcttcatgcttttgcaaaataatgcgaattttaaattgaggtagtcaattttgaaatttacagtttcgcctgattagttcaaaatatatattgatcctttgatcattaacaagtttagtttgactaacctcaggtctattgaccctcataaattttcatagtagtaaacttgacctctgaacaaaagaataatcagctcttctattcatttatttcgacataataaaaaactgaatatccaattcacttatctagatttgaaggcaattttccaatgccggcacaacatgaccaacatgtcaacttggtgattgcaccatgctattatctttatctttcaaacctcatttctaaatgtccaaaatatggtccaatatcagatatgacatttgacctaacacctatgcgaggcacatgatattctccattgcagcttgcaactctttgaactggtatatccacctagtcatggtcttgggtcatctataaaactaatcaaaggtgttatgtctcaggttttttgaaaaatccagtattgtaattaacgagaaacattgaaatttatgaaagtttaggcaagcaactccatttaagctgagttcgtttgttgaggttcccaactcacctcactcgtttttcgcgtgcacacttccaaaacggttaaatagcgtgttttctgcaaaaaaaatctatatgaaagttgctttaaaaattatattaatctattttttaaaaaataatacttaattaattatgtactaatgagtcgctccgttttacgtgcgcaagggatttttttaccaacgtcagcagccgaacacagcttaattatttgtccaatcaccgcatatctctttttcttatttgttaacaaacttatatatggttgtgtgtcttacggtagaagccagagatataaatcatctctattatctaaaaatataatacatttgttcctttcgtaaaaaaactcacaattgaccttctatgtagggcctattggaacaggaacgcaaacaaatagcagttcgtgtgagaacaataatttcatatatagcctattggctagtgcgatgaagccacaatatattcatggtcctcaaaatttgtcttgaacatttgtcatttgtcatttcccatggaaattcaaaggctagaccgcttaactatcacgtgacactacaagttagtgacagccattgaaatctgaggcttgatctgacggaatgagcaattattgagacctaggagtaacagtgttccttatcttgatccatgaggagtgtcgaagagaaaatgacaaccagcttcaccatgttgagaaagatgctgaatttctgaccagaaatcagccaaaccccactcgccatcctttcaactgaacttggttttcctgcagttctatagtgtatctacaacctaagcagccagactgtttttgttttataaaacccaaaacacttcattttaattccattttccctttgatttcaacacttttagccatcagctcagcgtggttttagcagttcgtgtgcaacttctgcttaaataagagcaacaaaaacaagattgtggttttggctacataactgtgctcaatttgtccaatttcgagttaagtttctccttcttcatatgtcctctgtttctgtaaaatcaaagtgggtttaattgttattttgtgatgaaaaattggcatgtgagataattagttttgatatgtggagattattggcgaggtggtttttgcatcgattgggccggggtatgtgaaccggtcagaccgggtgatgatgaacagggttttcagatgttgaacaggtgttgcggttgtggtaagccggtcagactggagtatggcgactagtcagaccaaccagcccgcggtctgaccggccgacactttgttagtttcggtttccggttgtttctttggatatccgtggataattcatgtttatagcttctagatggatactatgtgtatgtaatattgttgtttggtaacaatgagtcaagttggttagaacttgtgctcggatattggcgcaaattcatcaagtttactcttttaaacctccaaaatacaaaaatgaaagtgataaaaatcactagatgaaaatggaaataaactgtactaacaatatagaggacttcagaacaaaaaaaacatgcttatgtatgtaacaacttctcaagcagacaaccaaatctagttacatatcattgcttatccagactactttgttgctccaaattcattatcaggcatatgtatgtgctgagaatgccttctttgtatcaatcaattccttgactacattattcatcttcattctttcccttggtgattccttgcagcatgttagaccaagtcgaatacaggataaataactagttgtgtcatatcttgggtatttccgttgtagattgcattagcatccaatccaatatttctagtagattgttaggataggccgttttgacaatgtcgacaagacttgtcataccatttataaaaatgttagttagtcttcttctagtaaacatttccaacaacaacaccctgtagctatatatgtccccatccatagagaccggagaccctgagccatattctgcaaacatatataaatcataaaaatgttttagtggatacatagtgaatataggataaaaggtggatcccacactataatctttagtcaaatataagttcaattttacattttgtttttgcatctctaggtcacattaaaatactgtcgtatcgttttgttaaactagtaaaatatagaacggaaataattattgagatgctgacatagttgaattaaataaaagccacttacctgttgcgacatatctaattgttcctttagttacaaatgagctgctttctttgcacggttcagcaatattcattatctttgctagaccaaagtctgtagcttgcgtcaccatgtcatcgtctagaagaatgttgcttggtttaatatcacagtgaactatagacagcataatatgatggtgaagatattccaatgcctctgccacatcaagaccgaactttctttagaccaaatggaccggaccaaactttccgtctggaccgattgcctacccataattaacaagtttagtttcagtaacccctgaacaagaatcatcccttctattctccagtatcaacatactgaaaaagggaaaatccaattcagttgtctagattggaaggcaattttccaacgtacaacatgagaccaacatgtgaactttgtgattgcaccatggtattatctttgtctttcaaaacctcttttttctaactgtccaaagtatggtccaatatcagttatgacatttgacctaacacctaatcaccaatgctgaggcacagggcggtctctattgcagcttgcatcatttcaaactagtatatccaccatgtcatgttcatgggtggaaaaccatctataaaactagtcaaaggtgttatgtccctggtttttttttttggaaaatcctgtattgtaattaacgggaatatgacaattttatgaaactttaggggaagtaacttcatttgtaccttttgtagaaaaaaataaactattgaccctgtatgtagggcctatttggaacaggaacaaaaacaaactgttgtctgagagcaacagtgtcatatgctattgtctagtgagatgaagtcacaatgtattcatgctcttcaaaattcgtcttgaacatttgtcgtttgtcattttccctggaaattcaaaaggctagaccgctcaactttcaggtcacattagggccctacaagttagtgccgggcattatatagaaacttgatgcttgatgtgacagaatgaacaattatgggacaattgcttatttgaccccgttttgaacggtaaccgctgatttggcctctacgttttgaactttgcttatttgaccctccttttagagtacgaagcctctatctgaccccatttcaatgactctgttagggttcgatttaaaaaaaatagaaaatgtttcaagagttcctaatggcgaaaataccttccaaaccctattttgactctctctctctctctctctcttactcgtgcatgactctcacagtctcacctctctcagtcgtgcgtgcggcagcggcggcgagctacgcgtgcgagctaagggggcattcggcaggcatagtgaaacattgtgagtacattaggtgaaacattttttgtagaacaaaaaatgaaacgagttcccttaatagagggttttcaaaatatgtgggtgatttgttgcaatggagtatgtggtggagacatgtggtggggcccaatgggggagacacgtgcgcgtatttggggagcgactgatctgggcgccgggcgccagtcgaccgatccggcgcattttccatatcattcacaagaagtgagcatgctctctttttcatttgttccattttacttgacaaccatttccatcttcagcgtttacatgggttctgtttttaggaatggataagtattcttaattcacaaatgtgagggtaggggtggggctgggggcgtaactatgtgagaggtgtattttacctacccctccgttttaggttatgagacattttgactttagtcaaagttgaactactttaaatttgattaagtttatagacaaatatagtaatatttataatattaaattagtttcattaaatcaataattgaatatatttttataataaatttgtcttgggttgaaaatgttattatttctttctacaaacttagtcaaatttaaagcagtttaattttgaccaaagtcaaaaagtcttataacctgaaacggaggtagtataacacaacctattgttgtatagtatgtatatatatgtttgttttatatatcgcagatgagcacaatagtaaaagaactagtgacttgaactatagacttttgactcaactccgcatgccaacaatcatgtttctagttagtcatatgatttttcatgttgtctaaattgaactgactaattgtatctgcgcatcagggggatccgttctctagcagtaggccaatatcgtaacatttcccttctcctttgcaattggcggctgcttttcactactagaaaaaacattttcgccgacgttggcaaatcattttcgcaggtagaaaattttctacctatggaatgatttcactccaatatccatgaaaccatctccagagaacaaaatggttaccaagatgtgatgtgctggtgaactccaccagttataatgctttaccgcatttcattgactatatatggccatgtttagttataggggtgaaaagttttggcgtgtcacatcggatatacagacacacatttaaagtattaaatgtagtctaataacaaaaacaaattacagattctgtctgtaaactgcgagacgaacttattaagcctaattaatccatcattagcaagagtttattgtagcaccacattgtcaaatcttggcgcaactaggcttaaaagatttgtctcgcaatttacacgcaatctgtataattagttttttttctatatttaatacttcatgcatgtatcaaacattcgatatgacgggatgaaaagtttttgcgcgggaactaaacatggcctattccttgtagcatctacatactactattacactcttgttcttttattccaatttatttcacaactttattttgggatacaaaagtgcatgttatgtgccaatgaccacggaagaagtgtgacatcccggcttaggacttaatagaattaatagaatactcatatcaacaagttacaacttctttttcagaaattgatctctaaagaactccagggttaagcgtgcttgggatgggtgactggccgggaaattattcccgggtgcgcacgagtgaggacaaaatatgcagaaaagacttatgttgatctgtgaagcgggcccggtctggaaaaggcgggacgttacaacaagcatctggactagtaccatttttttttgacattgtgaagagaaacgctcatgtatgcaagcaaaaaagcatctggattgtacgacaagaattggggaacagcctgaacctgtaatgcctccattttacgtcctgtatctagctgtactattattttcttaactgtcaacgtcgagtagtatggtggaatctttatttggatatattctgacagcagtatctgtgcaatgtgaattctgtgtaccatgaaaagatctataacgagaacaaacaaaggaattgcaaggtggatgataattgtatggcagacctccagagttccactactgttagataataattctgtgaggttagaacccaatgctacaatggatgccttgtttttaggctagaagacaggaggcatattaaccaaggtgatgccattgtagaagttcagagtatcggcatctagcacatacagtgccactaatctgtttggtacagctctaactcctaaatataacttcaggagttaaatctggagtggag

SEQ ID NO: 27309 - DNA, 7839 bp, Oryza sativa
agtatattttgtgacagagctccacccaacttcactcccagttttggtggagctgaaattgtttggctgagctccagctccaggaggggtggagttggagctggagctgtgccaaacaggctttaagactcatgttgaaacttgctccatcaccatagctgaaacctctatttgtatgcactcccattagaataacggaacgcgggcgtgaccacaaacacagatcaaatcactttgttagctggcaactggctcttgttgctggacgaatatgccatcacactgtaaaaagacgtttttaaaggtgccacccttttactacacaggcggctgtcattaatgctggtttgtggtttcttgaactctgctattgccctttcagccatatttacatattcttcacatggatgctttgttttctcccatatcatagtgtggatacgtctctcctagctccactactgtggtctgtggccacagatttgtgaaagaattataaccgtgcaacaattcctaactcaccatttatattcaactttaatagacaagggtcttgttaacctctctctctcccttttttaaaaaataacttttatagacaagggtcttgttaacctctctctctccctttttaaaaaaaatgatactgctggtttgttaacccaaattagtcatgtaaatttttatatgatggcaatattatctgttcaccagatcaatttgaacaactaaacaaatgtatgcatatgtattatagtaagatttgcatgtatagacttttcatcaaacttctgcttcatttatttatgtgggagaaaatattctttcaaaaaatagttcttacaaacttgtacctataaacactttgtctatgttttcagcgtccatgttttcagcttcttcccatgtcggagagacaagctcttcccatgacattaatgtttcctcaatgtggttagcagaaccaaggagactgttgatttgctttactccaacatcacaatgcataacactgcaggtattacacatgaccttcctagctacagtacattgcaactgcagatcttataaagaatacgaaatgctattctcccgaaccactcatatctataatattggggtaagctctggaacatgtttaacgcgtcaaagaagcatgaatgactacagtgcaaaagtatgggctgatcttagattcatgcaaatctcccaaaatgctcactagttcgttctaaagtataagatgcattagagtttttagatggtctctaacattatgcattgatcactaattttattcataatgtattatgaaaaacaatgaaattaatgtcatatgtaaatacttttagatatgaatatagcaatactatatatatgtttatagaaacaaatacacaattttttagttcaattattaactaaaagattcaaatattgattttctggaaaaataaggatgatttatactctattttatttttgacagagggaataccatatgttaaaatatactcctattttttttgtatgatgttgattagtttaaaaatgaactaacgaaaaaaaaacttttttttgggaattggataggttcggttggatagttccagatatttttagatttagaaacgaattaggattgaaacgaaagcaaatacagtaagggcactatccgttgaaatcgaaaaacagtaggaaactatccggaatttttctccggttattctcatgtagcaattaatttttagaaggaaaacacgtatatatacacctaactttgtcatacgaaaacagatgaagacaaactttatatcaaattgtagagctcgacaagatatacgactttgttgctgacagtttattgtttgaatcatatatgggggtccaaatattcattagaaaataccatatctatttttacaaaatctcagatctacaattgaaatgacatcagatggagacgtactctggatatcaaagttatatagttcagtgaatctactactgtgtagtttatgacacttgtatttgaaaatattttaagtgtaaaacaaatattacaagtttcgaagaggtgaaatacaatgaattcaatctataaaacgagaacttgacatgtgatatagacaagtgatatagtaagtaagctatgcatgaagtaagaggtattggaactaggaagtggataatcatattaaaacgtgggtcttttaggggaatgtccatgaaaatcgattttcacatacggttgtgagacctcctaaaaaaattgatgatacaattttggagatgttgatatcttattttagaaaaataacaagcgatacctcttgcttcattaaggaatctcaattcgaggtattttttatattcagcaaatattcgttattgtactcattccgttttgtattcgttccgtatttgtattcgataatatttgattccatttccgtatccgtgtttttgatttcgattccgatttcatccctatggcacagtatacttgtgtgctggactagttactactagtcaccaattgagcctaaaagcctgggtaattaattaatccgatcatagttgattctctctctcttttctcttctgctttttttcaatgtgactgttcttttacataaatgtggctgtttatatgtccattatcatccattctaatcctttcttgtaagttgtaaggcatattttactgtactatggtgtatataacaacgaatggatcttatgattatatccatgcatagtttgaaaatgcacatcgtcgtcttcaggcctgggtgaagcctaggccagcttagctatcttcttctctgctttggtttgtcttcattgcacccaaacattttttttcttgggtaataaaatatggttgtattttttttgcccaatgattacagtcgtaaaagatttacagctgaaacattattactaatcttccaagtagcccctacataacattttttatatggattattttttgagaaacccatttttatatggattaaacggtaagatttgtaatgttatttattgtcctattattatcctaataatgatgtgatttttcatcgtaaacaactgaagattgcaaagctgcaaaccaggacaggttcaggggactgagaaagtaaaatgcaagttccggggcctacgttaaacagtggctcaaattcatggagtttactctttaaaaccatatatagatagcacccccaaaatacagaaacaaaagggatacaaagaaatacaagatgaaaatgaaataaacagtagtgacaacaatataatggacttcagatacaccaaaagcatacttctgtgacaactttttgagcagacataaccaaatttagttacatataattgcttacccagattacttggttgctcgaatttcatttaggcatagctgtgcatgccttctttatagcaatcaattctttgactacatcatccatcttcattctttcccttggtgattccttgcagcatcctagaccaagtcgaaatataggataaataactagttctaccaattcttgagtgtttccattgtaggttgcgctagcatccaatatttccagtagattgttaggataggccatcttaacatagtcaacaagacttgttataccattgataaaattgtcagttggtcttcttccagtaaatatttccagtaacaacaccccgtagctatatatgtcaccatccatggatacttgagatcccgctccatattctgtgtatataaatgaatgttttagttgctactaataagtagggataaaaggtggatttcacactacaatttttcagtcaaatagaagatcagtatcacattttaattcttttagcatctttaggtcacattaaaataccatactatcatttttatgaaactagtacaatttagagtggaaagaattttcactgtggccatagtttagttaaataataatcatttacctggtgggacatatccaattgttcctttaattactaatgagctgctttgtatgcgtggttcagaatgcattatctttgctagaccaaagtcggtaacatgtgccaccatgtcgtcatctagaagaatgttgcctggtttaatatcacagtgaactatcggcggcacaatatgatggtgaagatattccaatgcctctgcaacatcaacagcaatatgcagcctttccaccatatttagctttctgtagcttgtgctggttgttgtacttgttgcatgcagccactcatccaaacttccattgcaaatgaattctaggacaagtgccttgaattcatcaccattttggtctaagccactgcagacagtgatcaccttgacaagtttccggtgtcgaattctcctaagagcatcacactcgctcaggaaacttctgctggctcctctttggtcaagattaagaactttgattgcaacaggcactagattctgatcaataattagatttccaatgtatacattgccgaagcttccagaaccaatcaaatttgccggtgagaatgactcggttgctgcttgtagttcggcataagatatcctctcattcgtctcataaagaaatgggttttcattatcaacgatgttaggtttcatccttgtcttaatgaagcaatatgcagtcatacaaaacaaagagaaaatcaacgttccagcaatgcaaaagattaagacatgtagtcgatgcactgaagcatggttagaatcttcaatgagcatgaagggaactgcaagtatggagggccacctcatagcattctattacctgagattgacactatagtggcattacaaaaaatccctatatttggaacaggacctgacagtttgttgaaggagaggtttagattagttaggagcgtgaagtttgcaagaaataaaggtacaggacctgccaagttgttgttagacagatcaagggtttcaaggctcctcaaattgttcaggctttctgggatttgtccttggagaaggtttctataaaaatttaggaaactcaattggacacagctgccaatagcttttgggatttcaccagatagcttattcattgagaggtccattttgatgaggttgttcaagtgcccaatctgtgttggaatggagccacttagagcattgttggagaggctgagaagtaaggtaagggaaggtattgtaagtatctcttgtgggatttggcccatcaaggcattactggaaagatccaagagattaagttttgtgaggttcccaaggctaattggaatgctgccatccagaagattattagacagagatagaaagatcaactgtgagatattgcctaatggttgtggaatctgcccagtgattctattatgtgacataaagatagaattgattattggaaggcggccaatatcaggaggtaaggttcctgtgaagaggttgcaggacaggttgagagaagtaagtttattgagcttccataaatcttcaggtatggtcccagttatttggttttcacttaggtaaatccctatgagctctttgctcaggttggcaatgttaattggcatttcaccaacgaggtttttgtgtgcaacatctagccttgttaagctgctacagttggtcagtgatgtcataaattcccaatcactagatcgtgtggcttggagcgcgttgtatcctaacacaaataccttcaggttaccatggatgccaatttccctaggaataatgccatggtagttgtttccatgaagaagcaatacttcaagtgcagatgcatttgacaaggtgggtggtattataccctcgaaacggttattaattgtgttaaaacgacttatcctaggaagtttaatgccgatatcgagtggatgtgatcctgacagtctattgaagccaagatccaagattcttatggaagaaatattgaagattgatagaggaacatggccttccaattgattattttggacactgaagtaagtaaggttaagtatcttaccaaaagtttcagggatgttaccagtgaaaatgttgccttcaagaataaagtctctcaatgatgtgaggttgcccatccaactcaaatcttggccatggatgaagttcctcttgacgttggagagtgacttggggaatatcaccggtaagattgttgtggccgacactgaaaaccacaagctttgataactgtccaagatcagcagggatgttacctgacagatggttcatgctcaagttcatggcatgaagctttgggcaaccgccaaggctgattgggatatctccatcaagactgttggttgacagatcaaggacacggaggtgggtcaggtttccaagctgctgggatatggtgccgactaggccggcatcgctcagattgagggtggtaacacgacctggatgccggcgatcgttgcaggaaatgccggtccatcggcagaagacaggtgctgtcatgttggtagtgttgctgctggtgtcccacgaggacagcacctctcttgggtcgttccttatgagggatttgaatgacaggagtgctgagaggtcatctccattgatggactgagagctggctgtgaacaataggatggcatgtgtgagaagagagagcaaccaaagttgccatgtcctcttgattgccatggttagagtaaggaggttgagaggttgcagtctggtgataacacttgggagcaaaaaccaagtcagcatatatagacatatggtggtgtagaagtctgcaccagtggaacagagttatactcactaggtagaacaagtagtagtaacagggggaccatatcccactcatgaaagacacttttatggtgacaccttttattttgtaaatttcctattcttaactcatttaatgatggtcaatggaaataaataaactagacgattcccccactacattgctgcagcaatccagaaaaaaattattccctccttcccaaattgatcatcatatgatagaattcaaaatttctcaaattgatcatcatgtaacctccgcatagacacggattccatcataatacaattaatgcagcatggaagaatgtgtgcatgctaaggatttcaaaaattctgactgcaagaatttccgaatgaaaagggtgtatagctaattattgctcagtttgtttcaaaatataaggcctattatgttttgttaggtactttgaccaacaattattttttataataaaactaataaggtaacccgcacattcgcgtgggtaagtatgttttttacacgtgtttgaccatttgtcttatttaacgtttttatgcaaacatgtggaaatgtaagttatgcttaataaagttataaaccaagtcacaacaaaataaataataattatttatttttaatttaaataaattgtcgaacgtgtaccgaaaattcaatggtgttatctatcgaaaattgtacctttaataatcgtacattttttttgaaaaatattctttatcgacattgattatttttaagctatttgttagatatttatagatcaatactcactctctaaagtataagtatatttggattttggtacggtgtttgagatcctggattttttttacaatttggtccttccaaaaacttaatttacaaatacatcccttaaaaaacttattccagaaataatcattttttgtgtgccagagtggctggtgttgtcatccaatagggctccacctgccatactggcgccaaccccccaccaccccaatgcgctagtgcctcttgcatgctcctccggggtggggctagcacttaacccgtgggccccacccct

SEQ ID NO: 27310 - DNA, 14164 bp, Oryza sativa
cttacatcaaaagagagagagtggtaagagttcttcatctccactgtttttccttccagttttgaacaaacatatggttcagggcaaggaaattgcccagcagttgtgaatgccttcaccacagctggagtcgcctttgcacaatcgtcgtacccagtagcaacatagtaggtctccaaaccaagagcaggaacagaagctctccaataaagacggtgctggccagtagaaaccttttcgccactaacatactgccactcaggggaaatttgacttctcaaacaggaaccatttgaattgagaacagatacatcaggattacttacaacaaccataacaatctcatcccttgtttgctctaatgggttaaaaaggacaacagaatgtgccttccctccatgagggttgagaaccttgtatacaggttgaacatcatattttgaccgttcctgcactggctcaaaatgcgatagtaaggtaggatcagatctgtcatggatatcacctaaaagcacttcaaccgccctggacataaagagctgcaagtcttgcaaagaagtgtgcattcgagtcccatagtccactacaacatgatccttagctgtgccagttacaccatcatgatgctggaagagtgccaggttcctcctagctgctgttagcttgtgagaaaagctgatggggagttttacacattgaagcttctgacagtatcctagaacaaaagaactcagaatctctgaggcacgtagtgtctgttctagtactcggtcaactgctttgaagtacggccttgatacatagtaaccactccagtaatcctgatttctatcagcatatgtaaagaaatcacctgaaagtgttggaaaacctggcagctcagaagaaaccagttcaccagggcgtgtatagtttatcctttcagcttcatctctcagcgtggagaagtaatcctccagggtaccaaattttacttcagccttaagatggggattagagtttatgtaatcaaaaagcttttcataattgcggaactgtgcttctgcttcctctgtactaacataccggaaatcatcccccaatggaatgagaagtgtatttgttctgtacagcgtagactttttcctgtattgatctagaagtttcattgccctctcttgcacattgttagcatttgtttcaactggatcaaatctccacgggcaagattcatagctgaagctacgcattcgagcaaagtcaaactggcagcagatagctggttctggtccacaggtgtgtggaatgtcataagaatagaagggcatcatatgaacaaatatatcagttgtttcatctatatcccagttctgcctccataaatattcaaggttcttattcatcgcaagctcctttttcaattcataatgcgttcgctggattaacatgttgtggaaacccattctcctcagcagataagccatggtagctgaataaccaaatggatcaattgaccaagaatttttaggaacaactccaatggtatcattgagccacatgtttccctccatcatctgaggacgaagaatagaaagattggcataattaaataatgttccagcccatatactatagtcacataactgacaattagagatttgttcattatatattgcaggttggtcagagtaacacaactttggagtaaaaaatagaagtacgcaaactttgtctccgtaaaaaaatcaggcactatgaaaattgaagcatcaggtttccattaaaacaaaagatgtagctggatttgaacaagatataaagcatatttgcttcatttgttagattactcttctgccctgactccaatgttcaggccaacatagatagcattagcaacacaaagaaaatcgacattaagctatgacacagcttgatcgattaaaagagggatttgttggagggaattgtgtaccttttggagtgatttttaaaaagtattaatgtaacttcaacaatacagaaccaaaacgttaaaaaaattatatggtccatatgtgaatacaaccaggatatcttaaaaagggtaaagtctaaggactaagtgcgcaccatgaaattgatgaatctagttgtcaagggtttcttgtaaaaaaagacaattctgagttcatgcatttgataatcagaagaggtgtggattgctccacaaattattaaacatgaaactgaatagtgaaatcatgcaatacaagcacattgcaacattctgtctacgatactgtccctgtatttttcttcaagagcaccatctaaacacagaccaagtcaccaagatggtgtaaactaaaactgtattaacttcattcaattggagaacagaataaggtgcatttgtccactccatactattgtatgcttgttaaattgtactatcgatgcaaagtgtcagtgctaataatgaacagtcaggtgagttcaaatagctaaagcagcatgatagcacgtagcattaaacatatgtttgcagcacgtactgaagtgttttttcgatatgtacaatttacttttatgggtatttcaggtcagtgatatacacaataggaaaaggaataaataatgtgatttctttatgcatcaggtacaaatgaagctaagaacctggcgcatttagcaattagcacagaggagataaaagaagatgtgatgcacaaagagtcaagagtgtacttgcctgctctatgatagcaaaatagtgggagtttgcctgcacaaagaaagaaagatggttacatttagcttcttcttcaaaaggaaaaaaaaaaagaaagaagtgtgaaatacttctgatcagaaatccataacacagtaaacaattgaactaaaatagcatctctccaaggacttctacatcatccagaaaaccgcaataccggacagatcattcatcaaactgacaattgatcttaatactccatttgtgtaactctgaaacatgctgttctcaaggaaaaataacatggaaattatgcagcagtcaaatattcaaatcatgagttctattttattatttaaacaatggataccaagtatctcatggcaagaggtaaaatattgaaggaaaacatattagacacatcagagttgttgctgatcctttatctagtgctgaatctccaacatgtttactaacaaattggaacttcagaagcatcacccgtcaaaagcgcatttgcataattcaaaacagcaatgtgtacacaacataaaatgcgaataaaactgattcctgagcattgaaactacggcccaatcaggtaaagcatgaaatgaaatttcactccattcataaccaagcaacaaatgacaagcataccatgcctcaaatgccaacaaatacacaaaaggcaacccaattagacaagcaaaaactgccatctactcctaagatcatgtataaaccacaaatgtttccttccgtctcacctcgtcattcatgacccaccctccactgacaatctccagctgtccatcacgcacaagcttggtgaacgcctcctgcttcttccgaggggcgtcgcgccaccacctctccaggtatgacatctcctcccataaaaatttcctacgcgaatcctacatgacaacaaaaaggttaaagttaggcatcaaaaaccgcactaaaaccctaacaccgaatctgggtttagatcgcagcgaccttggagagcgactcgatgatggtgtcgaggatgtggcgcgactgcttctcgtagtactcctcgacggtgagacgccatccggggtcgttgtgggagtggggcgcgacaaacaccttgagcttctcgccgtcccactcgtcgctcttgtaggagacctcccacccttgcttccacgcgccgccatccacgtccaggaactggatccggtcgtacaggtccttggtggtgatgtccacgtgcgcctcgcggccgatccgcgcggccacggcggcggcggccgcctccgccgcagccgagtcgcggcggaaggccggcctgcgggtgaggcgcgggcgcaggcgggccggggaggtcgcggcggggcgggaggaggggaggccgaggcggaagaaggcgaggaggaacagggcggcgaaggcggcggccgcgacgtagaggacgcggcggcgggaggaggaggaggccgacgaggaggcggagtgggccccgcggcggcgggaggcggccggggaggagaggcccttggagcggaggtggtggtggcccttgggcttggaggtcgtcgggaggagcgcgcccgagcggccgcctccgccgccggagaagaacggcatcgccgccgccggcgaggcgaggcgggtgggaggaagtgggaagttgggtgggggggggggagtgacgacgacgtcgcgtcgcgggtttctccggtgatatttttcggcgaaatggcacgctaagggacagacaggtgagagagaccggaggaggaggaactgtaccatcactgacatatgggtcccacatttaggtgggccaggacagtaagcgggacgtggcaacgcgctgtactgtgatgtttggattagttgggtactttggcgtacctgtcaaaaaagaagagtcagttggacattttaaagaatttggtattctctggcaataaagtaaacttctagaaattctcatatgcatatatactgattagtaataataaatacctgattatttaaaataaatctgaaatattataaaatgctatatttttagtgttacaatatttacaacatggtacctagattctaggtctggaatgtcttgtatcatacttcctccatcccgtaaaagaccaacccagtactggatgtaacacatcctaatattatgaatttggacataattttgttcagattcgttatacataatgtgtcacatccagtctcagatttcttattttgatacagagagattatctagtacttagtagttaggataaccacgatgtttatttatcaacttggtagtaagatgggtttcagtatcatgcaataattgttactagcaggtttcataatgtgtaataccttaaatggtaagtaagatgggatccacattgaatgcggagattgtcattcatgcatacccaagcaaatactactcatatattttaatggtttattgctagtagtaagcatactaccggttataactaataccacctaccacaaaagtatcttactaccatgtaataagctaacattaattgctttttacattttttttctcacatcgtggttgcttttaatgcttctccatcttaaaatgttgctacctaatacatgattggacactttataatataagacattagcatgatacctaggtaccataatctaatacccataagtgcgtgctgacgttagcacataaagaattctgttaggtaagtggtacaccgttctttagtcattctcttaaaaaactgggaaccctaagttatgtataaggaggagcggatcataataaggctatagtgagtgaatacatggtcatggaattaatgaaatagtccctacctcatttgccacaaatgtatttcatggaaatggtacagagtatactctaccttgtcattggtcttcatgtctgagtgtgtttgagggtggtttagtgtataagtgtggtatgtatgtagtgatgtttgtgcacgtgtgtcttccgtgtaataaaaaaatggcttatatcagcaacaaaccaaacatgatcaatacaattctgcaatatcaaaatttagcttgggacttcttaaatgactgtaccaaggaattctaccatactccgtgcaaatatagttgatcctacggagcccacccaaaggttcagaccggaatgtaggaagtggtgatatttatttatttgtttctatgaaaagaaatatgacatctacgattcatagcggtaagttgcaagtaatattgcgcataacaaatatttattaataagaaatggcattgttaaaaaggctagcttagaatttagtcctaactcttaatctacctcctacctcaatgtcgcctcttcatccagctctatcaacaggccccttctctcataatacaaaggttttttcctactagagaactatagtataaagatctaaagtggctcttagattttcttttgtttgagagttttgtaacatttttaagcagtatcatgagttttagtatgaaaatattgtaacatgtttgatgcttgtataagttggtttttataaaagttgaatatgctcggtctttgattaaaccaagctcgagcctgtctgacctcaaagatcaactcaagctcgactcagctcaattcaaatctataatctatatcgtgcttgagcctacgtatgtagataagcttgttgctattagacaaccctcaccgagaactagactctaaaataaataacttttgatatgtttcctattggcacctttgttagggaggccaaattccttctttgctgtaactttatcgagtttgctgtaactaactgttcttatgggtgtaacttaggccttgtttgtttcagcttaagattattgaaatctagattattaaatcagatttctctaaactagattatattaagctgacataaaataagctacgagttgtttgtttctctggattattagaggcatctaagggtagtgggtctttagacactcaataatctggaaaaagctcctctagaggagattattggattatagtaatctggcttatagattgtaataatctagcataataatctacttgtttgtttcagcttacttctaataatctagattataataattctaagctgaatcaaacagggcctaagtagctcgtgaacttgctcactttggtgtgaaccttgatccggctagtgtgatgctgtgactggacttggttccaatttgtgttacctcattggtggctggcgatctcgccatggtctaggttaatggaatcactaacatttttttaataaaaaattagcagtgctatacgtatttaaataatcataacaaaactttaatttgcaaataaagatatcaaaaccgcttaatttagatcgtggtggctcttgtggtccaatggtccctagaccaaactcaattttggcctagaaggaccccctcccctaaatccatgtcaaagtcactctataggcatggtctattgatttttttacactgtattttttaatatttgcactcaaatgtgagttttagggatttgtaataccatgagatactttgagcaaatttggcttatgtgtattgaatttatgatgttatagaagtttagagcatggagtaggatcatctaacgaaaaattgctatagccgccactgaatttagtaaattagttgtcacataagcataaaaacatttttttctagagacatatcaatttgcaagaaatatgttttactttaagaaagcctaaaagcatacagagtcttatacatcgtaaaacatttacacgtgaaaaagaaaacatttcgtaagaaaaagtttagtgtatcatttttccatcagtgacttcacgagaaagagccgaagcatgagttgtttaagatagcgtttgattaagcaagacgggtgagaaattttatcctatttagtataggcttctcgaattgttaaatagggtggtttttttaaaaaatatatagaaaaattagtctattattttaagtttaaaataattaatacttaattattatatgctaatagtttatctttattttacatatactctcattcttcttaaaataaaatatcctataaaaacgggctagaactagtgtagatatatgaaatacattcttaccaaatcttaagtcaaaactcaaattaatttgtaagaaataaatggcaaatttaatggtaacagtgtcatcacccgaaaattgtcttttttttactcgcaaataaaattgagtttctatttggtttggtgagaatgcatttcatatctaacacatatctttatagtaatttgctcataaatttataaaatttgtatgatgttcacgagtttcaacagtgaattcgttttcaccggaaatgttcttcttaaatccactccacacacacagccttattatacttgtgtgagaggataatcggacggcggatgctcaacccatcgtctccaccccacacttcaatcgcgataacccccgcgacgcccagcaagccaaaaccacaaacaccatacgcgcgcggacgcggaggccgcggagctctcagccatggaggcggccgcactcctatcccccaccgccacctctcgctcccctctccccctcctctccaccgcgcccgccgcccaccgcctccacgttctcctgcctctctccggccgccgccgccgcctgtgcctccgctcctctcctcgaccccgcggtaactcactcctcactgctgttcgaatccgcggaccgcgggcttctgaggcggtgcagaatttgatgcgtgatgctgcgctgcagggtcgttgggctgtgcgggagattgcgtcgtgaggagtatgggttcgtctcgtgagcgcggggtgctcgtgaagaccagcagctcatcaggtttagtaatttataatccctttagtctgattgatgattagtacttcttccgttttatattataactcgtttgacttttttcctagtcaaatttcttcaaatttgaccggatttatagaaaaatatattactattttcaacacaagaaacatattatcaaaatatatgcaatgtgagatttaatgaaactaatttgatattttaaatgttgctagctttttctataaaattagtacttaatagtaaaaaagtcaaacgacttttaatatgaaacggatggatggagtagtaagtttctgcttggtatgtatggttcggtttgtaattgtggtgaaattgaatgtaatccacagcctcagtcgaatcggcaacccaggaggtgggcgcagcgagttcgggggagtggagcggggacgccatacgccgacgtttccttgatttctatgctgcccgtggccacaagatccttcctagctcgtcgcttgtgccagatgaccccaccgtgttcctcactatcgccgggatgcttcagttcaagcctatattccttggcaaggtgattctcataagatacatattgcattcagtagtgcaaactgcacatttttgaaaagtgacccgtaaggtcatcactaagcgtttttaataagaacattggggaaaaaaggggatcattgcacacattgagctagcatttacaagacgttgaagtgcacatgagttttccacttgcgggaagcaaaagctacgcaagtgacaagtcttgtggcatgatctttgcacgatctcagaatcagaaacaaatttgcgaaatgacaacagtaagaggggctaatagtacgtagcaagtgaattaacatgggtgtctatatgtactaatgtgaatactaactttaatatttcagttaataagtgaagttctttagttgtccaatgttcattggtaatcttgatgcttatgtggaagaatccgttatcgaatataatcgttggctcgataatggtagtaaatagtaacacaatgagtattgctttgttctttatagatcatgtcacagcaaactatgttgcaacatgcatctgtttcttgtaacttcgttctgaagtccttatattgctattcctaggaacctaggcgtgtaccgtgtgctactacctcccagaaatgcatacggacaaatgacattgaaaatgtggggcgtacgagccggcatcaaaccttctttgagatgcttgggaacttcagctttggtgattacttcaagaaggaagcaatcacatgggcatgggagctaacaaccaaggagtatgaacaatttccttactccctatggagcatgatctctgtattggtaaatcttaagctgttcatctgaaaagtttgccatgtcaccatgaatattacattcatgcacacatgcctctaagtccactctcaagaaaaaaagggggaaaaacttccggacatttagggttgttcaaatgcttatgtcgatccccagagtattgaacagctcttctttcatctgaaattttatactttgtttgtacccattaatgctattaaaaatttagattatttgaggattatcagtattcctgcaattgtctttgatttctttgtcaatgctaatgacttgcatattgactttatctttccaaccatcagcatgctgttttagtgtatactactttactaggcttgatattcttgcatgcttttgttgctttaattctgcagctttcattttttgttatttatttaggtttgggttacccccagaaagactatggattagtgtatttcaagatgatgatgaagcattttccatttggcacaatgaggtcagttatcaaaaacctgcatgtttctgcaatcttgaagagctttgtttatttttggtttacacaacaatggaacatttattacattttagctgcatctcagagttactcttcatggttagctagaccatacaatatgcttactcactagcaaaataattatggtcaagaaaaacttatttctttaataacttattaatagtaaaagtatatagatctgatgttattgtacatcagttatttacagtgtcaaaatatgcttattctgttcaagaggtgatgggattgtatatggaaatatattgactgacacataaacacattgtcttaaaataatgttctgtgcctgactaagtacttcataagcttgtagtatgggtgagtgattttatatctatttattttatcaaggttggagtaccaaaggagcgaataaagagattgggcgaggatgataacttttggactagtggtgcaactggaccctgtggcccatgttctgaaatttactatgatttctatcctgagagaggatcctcagatgcggtatgtaaagactgtggtattactagttaagaaattcaaagcgccttttccattgtgtatgcaagatattcaccattaactgaaactagtgatatacatatagttgtatgcaggatttgggtgatgatagtcgattcatcgaattctacaatcttgtcttcatgcaatacaacaaaaaggatgacggatctcttgaaccattgaaacaaaagaacattgatacagggatgggccttgagcgtatggcacgtattcttcaaaaggtattgcctaccatctatttcttaaaacaaatgaatgtcatccttactaggtttaagctactctcttactcaattgtctatcataggttccaaacaactatgagacagacttgattttcccaattattgaaaaggcagcaagcatggcattagtgtcgtacaccacagctgatgatgctatgaagacaaatcttaaagtatgctattcaggaccttttactagtttcatcataaataaggaggttacccataacctttgctctttctttttctgttattccagataattggggatcacatgagagcagttgtttatctcatatcagatggagtcattccctcaaatattgggagaggatatgttgtccgaaggcttataagaagagtagttcgaactggtagactgataggtataagaggtgatgggcatggaaattcagaaggtgcctttttaccttcactagctgaggtagcaatcagtcttagcactgagatagatccggatgttgaatctagaaggaaatcaattcttggagaacttcaaagggaagaactgcgatttgtgcagactttggaaagaggtgaaaaattattggacgaacttctggatgaggcattatcaagtgctggtaataatggtggtaaaccttgtctatctggaaaagatgttttccttttgtatgatacatatggttttccagtagagattacagctgaaatatcaggtgaacgaggtgtaattgttgacatgaagggatttgatatggaaatggaaaaccaaaggaaacaatctcaggctgctcataatgtagttaaactttctgtaggaaatgagactgagattgtcaagagtatccccgatactgaatttctggggtacgactctctttctgccactgctgttgttaaaggtcttttagttaatggaaactcagtgaatgtagtttcagaaggttctgatgtagaaatatttttagatcggacaccattttatgctgaatcaggtggtcaagtgggagataatggtttcttgtatgtctatggagaagaagatgcaaaacagaaggcagtcatagaaatcaatgacgtccaaaaatccctggggaatatctttgttcacaaaggcacaattaaacaggggtccgtagaagttgggaaggaaatcgatgctgctgttgatgcaaaattgaggcagggggctaaggtatgaaattgtggaggcatcggattgttttttctggttgacatttttttttttgttttcaagattcaatgataatttgttttatttggattcacattaacttagcttatgtatttatttacctgacgaggtttctcgagattctgaaaaatctatctgatcagactactttaaagagcaaaataggaacatttgcaatagctaatttcttgtgttccatgactaattacagcttagattgttggcatttgaaacatgcaaatgtggttagaatataggttcataggctttattgcttccattatcttggttcttactttcatatgctatctttgttttgtactaggcccatcatactgcaacacatctcctacaatctgctcttaaaagtatcattggttcagaaacatcacaggcaggatcccttgtggcatttgaccgtctccgatttgacttcaatttccaccgccccctttctgaagaggaattgatgaaaattgaatcacttgtaaaccaatgggttagcagtgctactcatcttgagacaaaagtgatggatctgcaagatgcaaaaaatgctggtgcaattgcaatgtttggagagaaatatggcgagcaggttagtctgtatatatagatgtttttttcttcaaaaatagttagtgccctggcctctggaaattagtatgttgcagtgacatgcctgagtagggaagtgccaagtcatgaaagtttgtgcagatgaaattccgaacttgaaggagcatagaacaatgaaaatgcatgttataccatagtagcatagccaatagtttaacctcaataagactttttttttgttctgataggtcagagttgtagaggtccctggggtgtctatggaactctgtggtggaactcatgtgagtaacaccgctgagatccgtggtttcaagattatctcagagcagggaatagcttctggagtcagaaggattgaggctgttgcaggtgatgcatttgttgagtatgtttgtgcccgtgacaactatatgcggtgcttgtgctcatcccttaaggtatgatggtgctcatgctgttgcccttctgatttgtcttgtgtttgtttgtaagtttggttgctatactttgtgaatctatgatcgtttacttctttgccccatgttcaaatagacaaacatgcatgcttctaactactgctaatcataggcacatgtgttcagatacagcatgttggcaacaaattttactctgtaacttgattatagacatcatgttaatcacaagcaaaatgccaacagcatgctcatcctgtcatccatgcctaggatgatcaattcttgcaacaacaaactatgctgattatgtcttccatttgtgtttttcaattgatgtccatctactcaaaataactttgcaggtcaaggctgaagatgtgaatggcagagtagaaacaattcttgaagagctaagaacaaccagaaacgaagtatcatctctacgcagcaaaatcgcggtgctcaaagcagcatccctcgcaaataaagctacaactatcgataacacgaggtatgacgcctccgctttcgccattttcacatccagtcttcatgatcatcacttgctagttgctactagaaaaccaataacatttggcagttgacaatttgacataagcaacaaatccatcccaaaaat

SEQ ID NO: 27311 - DNA, 16677 bp, Oryza sativa
tcacagtggcagtaacattgttcgtcaaccaagaataggaaattgttgtttgggatttttttctgcccggttgcgtacgtactttgcagaaaaccagcttgtaccatttgtaactaccccgtcccaaaaaaaactcaacagagcaagtttaataatatagtccactactagctataaatcatctatatacaatgtaatagtcaattcatactatagttacttaatatactattaatacatggtcctatctatcatatacatattacgtcttggagttcgtgctacagctggctacagatttgtagcccgctgctcttctctctcttcctttatctctttaaaatatatttatagctggcttatagcccgctattgcaccttctcttataggtttgagttttttttttagatggagggagtagtgacaaattaatgttactatggcccttatcagcgcagcttctggctagcttttggaagaagaacgagaaagaatgcaaatctctcttttttttttctcaaatatgcatgggagctgctgaggaggggtgttcaagacgcaattacaaataacagagaaaacaaaggtcaaaaagcaaacacacaaaaaacaaacagaatacaacgaacaaagcatcccaagaagacccttgtaatgttctactccctccgtcccataaaaaactaatctagactgtgtttagttccacgtcaaaattgaaagtttgaagaaattggaatgatatgacggaaaagttggaagtttgtgtgtgtaggaaagttcgatgtgacggaatagttagaagtttgaagaaaaaagttggaatctaaacagggccctagtactggatgtgacacattctagtaatacaaatatggacacatctctgtccagattcattgtactagaatatgtcacattcagtcctagattcatttttttgaatggagggagtaactctcacttaggttgtgctttttttgttgggaaccctcccttcgcacgtaaacggagcgatggattaacgcataattaagtaagtattagctataaaatattgaaaatagattactatgtttttttaaagcaactttcctatagaaactttttttaaaaaacacactgtttaacagtttgaaaaatgaacacgcgaaaaacaagagaagtgagttgagaacttaggctaagccttagccgggatcagtaatcagtgaaagtcccttgggccttggccttggccaatctccaaagacatgcaagaaccaagcaagctgaaatacttagggaagcctcgaaggcaaatttcttgaagggctggtttctccaataggcttctaaaaaaaaggtcatttgtgaagattatgatgttttcattaaactcttgttagatatagtagtgagcacatatggttgtgaactcattcacaaagacttaagtctcacctttctttcagcatgtgtgagacaaaataagtatttatctctctctattttttattatttctttcccgacaatatttttttataaaaaaagttgacacttcttaatcaaccttattccgcttcctcgccctgcttgagctctactatcgttgtcaccactgtcatcttaagctcctccatggcatacctctagatcccaatcatgatattggtatccatgttgtggccgccttcaccttgaggtcttggtcgctactatctctactttgagctatggctatcgttgttgccttgagctcatgagtagtgccatgttgaagttgtagtcattatcaccgtctcgagctcatcattgtggttgccattactgcatgaagctcctcccttttaccaactatacatcctagttgctattttcatcgagccacctctaggagcttgttgccaccatgttttgttggactatctccaagagggatgaggctcccctgacgttgtacggtttgcagttgtgctactgatatgtgggcccacatattagtgactcatctgcaaactgcacaacatcagaggatctatttccctccaagagctagccgttgctaattctactccaacaccacatcaccacctccttctacggtttctattcacaccattgattgtggatttgcacattgattcctaagcaaatggaaaagataaaggatgctatatgtagttgttgatatggttttacacttcaataactagactgttaaacaaaccagataatataaatagtagcttcttttggaatctaggtaaacatgataggacaatgtaggactaatttagactataataatttcataagaaaacaaaactatcaatttcccgcaagaatggagaaaaatttcccatgttctaaacaagtctaataagcatgtacaactgctatttatttatctcgttccactcccttggcctgcttatgagctcctagtcatcgtatctctacattgagctatagccacaatcaacattgccaccttaagctcgttgatggcaccatagcatccacctaagctttggtcactatcatcgttcctatctttagcttcttgacaacaccacctctaggtatcaatattgtcacggcctcaatctctgttgtagctacctccactttgagcttataagcgctaccgtccaattccagatcctaatcattatccatgccttgagtagccacatctctagatcaaactcctccattgctcctctagagtctagatcctagttgagttctcgttatccacttctcgaagttcgttgcaacatggtcagttggtcatcaaaatgcctccaagtgctttccattgcttcctctgccacaatgccacctccctatgtggattccattgcctaaagatttgatcacattgattgttgatttgggcgttaattgatattgatattatatgtagctattgatattgtttcacgtttcgatggctagtgtactaataaataatcagattctaagaaaaatatcttatccataataccattcaaattgcactatataaaactaatttagagctttacaatacaaaagttacgtaaaactaccgttccgaaccgataaattttcctgcgttctaaataggtcttaaaaaaaggagtttaaagaaaaaaatataacaataaaccaacacgaaatttggctacgatttacggtcaattactagttaccattccttgcaattttcaccagctagcggtactcccaaattcccccccatttcgcgctcggctccgttgcgcccgcgctccaaaaatcccgaaccggtggcgcgtactacccaacgacccgcaccacacctatcacaccgacacgcgggccccatccgtcaccaaccgacaccgacccgagccgcacccgcgcgcgggggacggacggaagcgttttgaaaaacatcgccgccgcccgcgcgccgccaccaaaaaaaggaaaaaaaaatcgcgcataaatcatttccccccccccccctccacaaccaaatctctcctcccgctcgccgaaaccctcgccgtcgccgcgccatggccgccgccgccgatgctcccccgcctcctccggaggtcgccccgcccgcgcccgcgcccgcccccgcgccggcgccatatcagccgccgcggctggcggtggccgacggagcgggaggtggcggcggcggcggcgggaagccgtgcaggcaccacgcgtacagccgcaagcagaagtcgctcggcctcctctgcaccaagtaaacagctaacaaccctccccctcccctccgcgcagcttcgcgcaaccgctatagctttctcgaggttgatttggctggccctccctggtgtgtttggtttgctagcttcgtggcgctgtacgaccgggaggacgtggagtcggtggggctggacgacgcggcgaggcggctgggcgtcgagaggcgccggatctacgacatcgtcaacgtgctcgagagcatcggggtcaggaaaattttttcatctcctcgcctcgtctccctttcttggatttgaggagcgatcttgttctgcgttcgctaaacatttcttggccggtcgtgcgcagatgctcgtgaggagggccaagaatcggtatacgtggatcggcttcggtggagtccctgcggcgctcgcgaaactcaaggttaggaggatccgcatattctgttcttaccatagtgtcattgtatgctttgtgaggcgtaatcagatcggaatttcgatgtatttattgaattttctgttgtttcggtttggtcaggagatgtcactgagggcggtgtcaagcgtggcgtcaccgtcgctggatgaaacatctgctgctaatgttagatttattctctcctctttgctagctcttggtattgttacaaatcgacgaaatgattagcacttgtactgacaaaagtggcacattttgggttttgtgaattatgattataaaaggtctcggatgatgaggatgatgacaagttagatgatgctgagggcgatgcggagagcgagaagctcagcctcagccagtccattgacaatccttctgataagcctgatgcacccccttgcaagcttcgatccggtatagttggttaatcgcttttcttgctatctcaccgtgcctgttggaacacatggtttgtactgactggttgttgtattagcagagcataggaaggagaagtcccttgggctgctcactcagaattttgtcaagctcttcctcaccatggaggtaagcagcactggatttgttcctcaactgtttgattaagttggatgtcctttgtggttaattttagcggaatttgtatttgattcagattgagacgatctcacttgatgaagccgcaaagcggctccttggagagggacatgcggcgaacaatatgagaagtaattgttcacatttcctatttataattccaaactgacagtagtttttactatccaactggaactcacaatgattctgatgttcttgatacagccaaagttcggcgattgtacgatattgccaatgtgctgtcttctttgaatcttattgagaaggtataccctcaaaccgcattcgatttcagttgaacctaagtgattttttcttaacttggtatcttctgctgcttctttcagacacaacaggcggactcaagaaaacctgcattccggtggctgggccaggcaaaacggaatgaaggcgtcacggttgctttacccccaaccaagacgttgcctaacaagagagcatttggtactgatctgactaacattgacaataagaggggtaagttggactccacaatggagaacagaggcaagcccacgcaggatggtggcaacctattcaataatttgcagaggcaattagggcaagagaacaggagcgattttgtttatggccccttccaccctgctgttgcaaggaaacaagaacatggtaatcgcacagtacaagagaaggagaggaagagcattcaagactgggagaaccttgcttcttctttccgtccgcaatatcaaaatccaggtgagctccaactctctctatatatctatatcgccaaacgaatgctgtttcaagaacccattttgcattagctattagtccatctgtctagctagcatttttggttgctctctacataccatgtgatatgtcagtgctacacaaacgtcaagaagcaaatgaaacctggaaattactgagtgctcgtggattgttgtgaacaattgaagggcttcttaggttcatacatgtgtcatcagttacaagtttaaccccttcaacccttagttgatatacacttgtagggtagagctcctttacctgtgccttgcgcatctgctttactcaacacatcgtttcctctagttcacttgtttgccagcatacattctgtatttgaattccttgaaatcaaatcaaaacatcaaagactggtggatagaagaccatgtaccgacgtttaatagtagttctgaacattttgtatatggcatgttgataagtttagtatcattcggtcttctcaagtagttcaccttctgctagtgatctatcttctattatctatctatctatctattatatactaaaagtccattaaacttcctacaaacgctctcaagccgccacgtggcgttcctacaaacactcctaaaccgccacgtggcaatgtctaatcgcaccgtcgattttcacttaaatcggtggacccgataatttagaccattagattagattagatgtattttatttaataaaaggaaatgaataccatactgttggccggaaaaaaaacaaaagcataattactccttaaatacgtacgactacaaaaacaatcaagcttacataatgttcatcgaagaaaaaaaagacctacgcacagacttacttaaaaaaaaagccaaaagcaacataagtacatagtaccattgaaaaaatataaaaacaacaaagccaaaaaaaatatacgtacgtaataccattgaaaaaaaaaattgatgacctttaaaatataattttctattatttaaagataaaatatatcactctataaatttaagcaaatattatagttaattttcacttaaattagtgaacccaatagtttagaccgttagattagatgtattttattaaactaataccttattactctgtgtatgggagaattatataactattggctagaaaaagacaaaagaaaaaacataagtagcctttctacaaatgctactaaatcgacatgtggcatcctataaacgctcctaagccgccacgtggcactctaatagttaaagatttttttttaaaaaagcaaaacatctaaccgttaattttcattaaatttggtggacccattatttgtaacctttagatttatctataaaaaaaatctccttctaatatctgggcccacctgggcctgttggcatgtacgtacctacatagtacctacatacgtatgtttcttacgtctactccccctccctcttttttacctatttcttttcctactttcacgcttttagaaaagcaaaaattctatgttaaacaattaagcaaatgtaacatctaaatcataaaactaatatttgatctgcttatgtcttttgattattttacatttaaaaactcatatccactttaattcaattttgagaagaaatatgtaacattaattaggggtacatcttctgacttttgcatgccacttaagaaattatacaattataaaaaataatgatatatattttatcatcgtacaaaacttcataaaaaataatagatataatataagtaaaatgaacataactttgggtaatattaaaaagaattagacccccattctaacacaacaaaaagtcaaaataacagttagattattagatttgtagtgtgctccttacaaaaaaaattatttgcagtgttcatattttaatatcaactatgaatatattgtaggtacagacgagtaaaaaagattgattttaatcaatcattaaagcttttgttttatttttagttaataaagtaatagcagctaaaacactataactgataataattattataattatatgcatacatactctctccccttcgactatctcttcctctctcccattcaattatttggtcttctaaattttaactgattaatcaaaatgattaataattagaaaactaaataattaaattttttaagttatatctaacccacttttagtttacttgaatttgtttttttataattaaatatataattcaagatctgtattacccatattttatgctattaaaataaaagtttgtcattttaacatatacccctatcctttacaagtacctaaatagaaaaaatatcagaacattataaaatataataataagtattatataaccttaaatcattgtatatcctctgcaatgcacttaagatgtcatgtgttacatcttaaataaaaataaaaactagaaattataggaaaaaaacatctgactatcagttttcacttaaataggtggatccattattttaaaacaattgatatacttttagaacaatcctatccctccatgtgttagtcggatattagaaattatgagaaaaaaatggatcatcggtttcacttcaattattttaaaaaggaaaaagtatgaattacaccaccgaactatcgcgatcgaccaaattaaacccctaaacccaaaaaccaaacatcactcaccctgacctttcaatactttacaaattaccccctcgacccaatccagagcaattttgtcctacatggcgtacgcatgacaatccagtcaatattttctttttttaatggtgggcccaccagtcatatatactttctcacctcctctttcccctcgtcccccctctctctccatctctctcggtgcacatggcggcgcgtggcgcgcggtcggtcggcggcaacgcacggcccatgtttaagtgcttagatgttaatgaccttccatctatgctatatcatggcattacgagtttctcaatatattattacatatataaaacacatagttggataaaaacttatatatgctactattaactttaaatttaggactcatgttgactaggtatttttttagaaaaaacactgtagatcacatatagtaatagggaagcgagctgtacaatatgtatatctcctacatacttattgacacggttttttttctagaaaatgaagaattagtgataatcgcttatagtaataaagtaaatattatatagttcaaaccttacaaatatcatgtaaaaaaattatatgagcaatgcagatgaagaaaatttataaagaaattgtactttttcaagtacgaaatgtgtctcgatatccatcttacaagttagtcaaacctatcctactttgcatgcctgcgcaatgcgcgggctatcttcctagttctattaaatgtactgttaaagagaaggttctgttgtaacaaacttaacataatttcttccattttctaatgcaggactgaacgatctttttggccactacatggaagcatggaggtcatggtactcggatctcaggcgagacagagcatcataaaaccagattcaggccggtccgttgtaaacaaaattcttgtaggcagataaactcatttgttgatgcatggttagggatttttgagttatacaagatgtcacaaaaacaaaggctagtgctggcctttgattgattgtatttactcagtgcaagaaattggaaagtcgtttcgtcaataatactaggatacctgattgtcgatttgtttaacgagtcacctgctgctggcaacgcattctttgaatttgttccctcttttcttttcgtcgttccctttgtgatcaggtgtcaggaccgggcgctccaattaatagactgttaattcgttaacagaaaagagaatcagactaaggttagaaacttcttttatgcatgtaaacgagatgacttaggtggtgtttaggaaggcacgaaagcataagtcccttccatagagactaaaatttttatgagtttagtccctcctttccaaacaccaccttattactttcttggatgagaatgtaagtattttttatataggcatgggtacttaaaaaaaaaaaggtagatagagataattagagaatgattgcgattggagattggagaagaaaatgtaagtgaagagaataattgtgatttgtttagaagaaatgatatgtggagaaatagctttattttagaacagattagtgtgctacaaagagttactttttttagtggaaactattagcaaaatttattcaactaggatatccagcttagtcatccgtcaaacagaaaaaaaaaagtttcggaggaacctaaaccaaagtcgtaaagcaccttctttagctagcctatgagcaactttatttgttgaccgccaaatagttacattttgcgatgtaggtagtagcacataattaattaattattattttaaaaacttcaaaataaatcaatacaattttaaagaaaaaagtattttttttaaaaaaaaacacaccgtttaaaaattgtgcccatgaagaaaaagggagtagaagttgacaacacgtactaagcttcccagcaagagtcagctggaatgcggtcaatgtgacaggaccataaataaagaggttacataattgcatttgtgttttctgctgaaattgttttccatgtcgataatatatacaatgtatatttctttccatgtagcaaaattcggtgcaaccaatcggcatcagcagtgcaaaggcagttcattccccttgttcctgactataccatcatgtaggtacagtaatttcacatgatatagacaatgagtatagagaatcaagcagggtaatgtaacactcatcaatcatcagacaaatagtattagaacatttgactagtcattgaccacaaacacatatggtaacttccaacaagaggcatttgatgtcctccgatttatggatgagacaacatatgtaatgcttgaaatgggtaaaatccattaaatcaatccgcaatagtaactaatagcagagcaatcaacaaccaactaaattccttcatcattttgttggctcagtgaagaacttgttgatagctggcatgatctcaggggtcttgtcgcgcacatagtttcttagcccatgctctgcgtagcgccttccctcctcatggttctcgagcactccagctgccctccctaccttgttaaccctgaataaaagcattttattatttcaggcttacacttcattgttgacaaaataagcatcagccgccgagggttcgaattatcaccataatcaatgttacccttgaaacccaagggtttaattatccatcaaaattcactatataagacaatggttaatacactacgacttcctgtctatgacacaataagatttaagcactaataaatcctgcttggtttaaactggaattgaattatgcttggagccggtttggagcagcgaaagattaacaccaacatgtcatgagttgaacatactaataacacataagctcatagtgaagacagattccacacacacgccgacacgaaatacattgtgtctagccatgttagcaactctttggtctatgctatcatgcccaagacgcatagaaatttacaatatacttatcatcataatcaccacgctttctgtaaaagacattcttaacgtcatgacaccgtaccaactactccacctctataaaacaaacaagaaaaaaaatatgtaaagagtacattttcccaagcaaattgacacatggcaagctcatccttatgtttctctaccagctcaggtacaggtttcttaaattgtctaataacaaaccctaattaaacaaaaaaaaaaggacacatcacacatgatatacccactccttggctccttgccccgtaaaatactaaaattcaccatcacaaaatttcacctgagaaatactagcatgtcaatcaatcaagcaaggtaagtcaacgctcagcgccaggtaataggctcaaatcgtaaagaaatcgatgacggtaagctacagtaagtccaccactagaacaggcttatcaagcacagtagatctctcctccaacgagcaaagcaaaaaataaaaataaataaaaataaaaaatcaagcaagcaagcaagcaaagagggcaggaacacgcagtggcggagatccggacctgacttcggggttgccggtgatgttgcggaagagctggaagccgcagatgccgacggccacgcccatcgccgcgaacagcgggtacacctgagacacgcgcgcctccgggtgagcgagcgagcagctaagcgcaaagagcaagaagagaggagtagacgcgtgtgggagcttggctcacctccggtcggacccagcggctggaggccatcgtcggcgtcggcggcggcggagagagagagagaggggaaagtggaaggcgacggtaggagagagagagaggaagtggacggagtgggtgcagagcggcttttatcacagtgacgcagtgtggttcgcttggcgagtttggaggtgacctgtatggaatgacgaaaatgcccctcacccgtttcgtttgggggctttcttcctttgctgctgcggtgctgcccactgttttccatgaagctgtgagcccggtgtaccaccgtcggcgtgctatataatcaaaccaaacctacgatcaacttaatatctattgtatcttctcgctttaaatttcaattcaactcaccttttatggatctaccgcatgtaattgaatccagctatcataatagatgtgtaaaataccttggtatagtggaatatgcttgtggttgcagaggaatgctccggtgcaatctacttgcagtattctactccaagtagaattgatctcgaccgtttattttaaagggcaggtaagtaatctcctaatattgtttaggggtaattttggcatggattattttcttctgttcgatcgcatcaggtcggactccgcatcgcatcgcatcaggtccgactccgttgcacgcagtctcgtcgctattcctcccccggcgtcgccgccttgtccaccccctccgtcgccgtccgtatcccccgtcctctcagtcgccgccttgtccgcctcctcagtcgccgtctgcctcccccgccctcgctgccttctccgctccctccgtccccgtacgtttcccctgccctctccgtcgccgtccgttggccccgccctctccacctccggcaccgttggcgtctcctcccccttcagtgcccttgcctcctccgtcgtcttcctaccgcgcgtggcatcaggtcggaggcaggcaccggcaggcggcggcgcggccggcagctagtcctcccggcaagcggcgtcgcggccggtggcgcggcgcgtcgcatctgtccgacgcaagcaccggcaagcggcggcgcggtgaaatcctcaggtgtccactcctcccccctcccccaccacctgactttctgttccccttcctctcctcagtgttgaacttgtctgaatttttcctctacaaatacatatacttacttgtaaatgactgtgtatactagcttgtaactatactagagaatctacatttgcggatgttaaattgaataggagatttattaaatcgattttgtatgttgagttgtaagcatgaacgataaacctgaacaataattttggtcttaagctgcaaatgaaatacacctgtcacttgaaattccactcaaaacagtttgctgaaattgatgtgttactaatataagtccagcattaaacctcagcaaaggtggcaagttaaatcatatcttgtgcaattgatctttgatcttttctaccaaatgattgccttgtcaactggttaaagcatccagcattttctgctagttcatcagtagtactaatagtacattgaattaatttattagtgcatgccttagttcttttatcatacatacaaaatttgcagccattgtgggggaactgtagtaattgttctaaactcaatagtttagagtggcattgtgagatggatactcttttatagcagattaaacatgtcttcctgaatttggccatctctgcatctgcattacactctgaaactgaggcacttaatttattttagatgtgtacagaggcaaataagctgaaatgctttagaactataaaagaattctttgtcagaaacattacagaaatacggtattgagcttgatttaatccattttcagaaaattacagaattgagctgcctcctgtgtcctaacttgacttgttgctgcttggtttctgaaaataggtcctggatgatgatcatggagctgtggtttaccctgtcaggaggtcagtagctcctcctgcagttcagcgttggggcgacatccctgggcagcataactgcggcgcacctggttgccctgagatgattccggcgcaagcacagttctgttgtttgcgttgcaaggctgcagttcattgctgcttatttatttttaaaggagtgtaatgaacaaataaatttagttgcctttttaaatattaggattaaatgatctacaactggaatggtgacttcattttgtgatgcttgtgtgatgctttaatggtgctgtttgctggaatgatgctattgttgatgctggaatgatactgctactattggaaattgtgctgctgctagaactgcactgttgttgctggaatgaaactgaattgctgttgttggaatgaaactgaactgctggtgctgctgaaactgtaatgctgctgctgctgctgctgctgaaactggttgttttttcatgcagagcctaccagatcaatgagaatgcacatgctgctggaggactcattctgtccatatttttctagttccaacttcgaattgcgacagctctattcggagtctcgaagccaccaaaaaggattggtggtgggagatttggcatcctcagccatcagatctccagaagatgctgattcaggagcgaagcaaaccataggaacagtttcagggggaacatgtcgtccccaagaaagaatgatactgacacatcattttgttctccgtagcatccgattttgatacaacattaacttacacatttgacagtttgacaggatgtaagatgttgcattgagcagcttctttacgaaagattttgcagtgcagaagcacaaaggtgcttcgtcgtggtacgagatgtttctttaaactcgcagaaagtacttatcataaaaaaagcatggtttttcaatcgaccgcgcgcatatattatagcagaacgttattttttttacaaaagaaagaagaagtccccgcatctgacatcgttgaataaccagattgagtatcatttaataaataatagatagagtttaatattaaaaaatttaacacctagcttattcgaaatgaacatctgacaagacaaactaagaatctccaaaataaaacatctcaatgataaatgaacatcttagaatttaatgaaagaatatcctcccaatgcaaagctgaacatcttagatttacttcggagatggcctgtgcatgattccgaaatttgttgggatggagagatgtaaagaatcgctgctagctttcttctgtattcatcgatgtcttcctgcatagatcacaactatatgttatctttcttattttctacaaatgtccttctgtcataatcaaactttttgtttgctatgatgggcctaccatccagtccgcgtactcatatttcatatttgtatccatttgagaaggagcggtatatgaaaccttacgcttcggggtgactcagggcagtaagcagtcaacgtcaccgacgtgcatctgcttcaacgtcgcacctgaacaccgagaacccctttgccggcatgtggttcagagtaagtaagtaaaaatgctgttaacattaaccgttctgttctgaaataaacaatgtatttacttaaccaaaacgagcaatataattggtgaaaaggcaaccaaagttcaaaggaaagagacaccacacatcatctactcgtcattaattgatggtggcataacaatgccaatgcaaatatagccactagtaacatccacccattacaaagcccccacaacaggtgaacattagtttcattcagaaagatgacaactttagacatcataattcaatagcacaacattgcgcgccaaatccaattggtacgacgaagcagccacacgtaccttccaagatggcttcgcgcacttgctcttgctccttgcaaataccgaatgctcccaccagcatcccaatgccatggcacctcggagcacccagtaagcatgcctctctcgggatcgccaacgccatggtggagttgttcagatatagatggatcatctcatccttcatgctacagattaataggaaacagtagccttggaaatcaaatcaaaatttaagaaaaacaaacaacttgagattgaaagttgaggggcagcattaggggagcgcatcttactgcaaatttccgggcattaccttccgctattctccaatggcgagtcttcctcctgctccgaaggaggtgcttgaggcagcatggggacgaaggggagccaggcgtgcattgccattggatccagaggctgcgtcctccgcttgtgggcgatggattgggggctctcccacgcggctgcaggagcgatggcgggcggagatggacggggctagagccgagcgtgggggaggaggccgacggcgagtaaggggatagcgaggaggaggaaggctcggcggcggcgagtggcacggtgctggggtctgaggtggaactcgccacaaggtgtgccgacgcgggtagcggcgggatagggcggagctctggagatcccagacggagatgcgggatcgccgagaggagtggagaagggggaggcggttgatggggaggaggacgtggcggcggtggcgggtggaggtgacgcggcggagagggctggtggcgaagagaacgtggcggcagtgacgggtggaggcgcgacgacgtgaggcgactcgctggagaagagggcgggggacgaggacggcgaccgagggggctcacaaggcggcgtggagac

SEQ ID NO: 27312 - DNA, 4228 bp, Oryza sativa
aggagacgccaggacgggcgacagaggcggcgagggagatgggcggcgacggaggcggggatggaggggaatggcgtcgggatggagtgaaatggcgacgatgcgatacgaatccataggatagggatagggtgagtaagagactgataatatatgataatacccctacgcgaattatttttcttggacgaaaacaccccttcacatttctactcccactaattctggtgggagtagaactagatcttaacccttcaattaaatatgatcaatggcccagattactttctactctgagtagaaagcaccggagtgggactcggtggttgcacaccttatacccaaacaaccatttctatacggtacgagttgtagtccaatatagtgctctgaacaatatattttctttacgagatgatgatgtgtgtcatcttctacgatttctaccctccaactcaccttgcatctgacattgagatatgaactaatgaaccatgtttataactgatggcttataatgctccccaaaaaatgttaatttaatgcaacactaagcaaatgttgatagttttgtaaaattaaaagaacagtagttttcgtgaaattttctcatagtctgtgacatagttggtctatctacattaattaaaacatatgctcgacaactttacgcgtgatgataaaagataggagccttaatacagctactaaaattatcacgataactactcaataatatgtgttcaatacatactgttactattactatgttgttaaatccctaattaaaagcagtcaacattaaaacaaaccacctataaattatcacgcggcttagcattacataccatctcctccaactgatatcgctcatttttacattactactcacaaacctttacctaatagctcgtgctaagctttatcaatctaaaatcaaaatccttaaccatgtaacataatttcgattgtatatttatatttaacgtggtactattaaatctacacgtccatgaccatgactggtggttttgaacttttgatttttgaaggtgggggcagtaggggcacttcagtcattcacgcacattcatcccgtgacctttgttccacgcccatcatccgtgccgaaaagcatattccaatgcacggagccaactatgcaacaaaatgctcgtaacaagtcggctgccatttgttgtgggcggcgagccggcgacaaaatttatttcacgatgagtgcagtgagacgctaccgggaatttctttttttttttcaactaaaaatcgtccggatttgtttgggaaaaagtgatttatttttgtttaggtctgcgtcagcgttatctctaaggtcaacttgctcgcctcgttccggctctatggcctctgcatccggccaaagcagttttatagtaataatatatttttttttcttacgtatgatagatgtctcagtgtgcatgtccaagaaggtatatgtattctcaactttttatcgaaaagaaattgtgactctccaactgctgctgaagaacggcaccgtaaaatgacgtattcgttcatttgatgagactcgtgaaaggctagtttggcttgttaattcggttgttcaatcttaacaaaaaaaaatcaggcagatcagacggagtagaaactgttaatggctcattaattcagttgtttaatctgaacaaaaagcagtgttgtactggcaaagtgagcgcacctagttagatttcttatggtggatccgatttacctggattcaagttctaaaatttatatgagtgtttgtatttacgactaaaatttatgtgatgtttttgtcgacatcaagatgtttatgatgactttgtgaattttaagatacaccgatccattttttagaggtgcttgtaaaaataagatgtgtgttcgtagagataagtgtgcgtttgtaacttgtttctaaataaacaaaaaaatgttggactgttggtagcctctttgtcaaatcaaacgaccacgaatttgacccacgaatgtccacaacgaatacggcccaattttccgtaaattaattacacccatgaattcaatcggcctacctattctcaattgacgaattcgaaccaccaaaagctaagaacaaattcagacctcttaattcaaatcagtccacaaatgaattaagccgacgtctgattcatcactaaatttagcccaccaaatgtcacgaattaatttggcccaccaaattcccatcaatggattcagcccaccaatgaatttggctcacttcgtatggatttggcagtatggacgtggtaaataaataaaaaaattatgaggcccacatgtaagtgagaaaaaaaatgtgaaaccacactactttttccttttcttttctcctttctttttcctcttttctactcctctccgaaggccggcggcggcggagggagcctgagagagagggggcggcgggcggagcggccgctggcgagcgcggcagtgggcggctggaggggggtgaggcggtcggtgagcctgggagggaggaaagcgggcggcggcaggcggagcagcagcgcggcggcgagcgcgagcggcaagcgagcgcgtggcgagcgagcgctgcggcgtgccgccgtgccggaactcgtgccgacgggtctcacccaggccgcaccacacgtgggagcagaggcggagctcgctgtcgctgtcggtctttgcccgctgcccgaagtcggagaggagcgggcagccaccgatggcgccgccgccagcgagggggagggcggcgaaggagcggtgtgacactgcggcggcccttgggggggagaatggcatggcgtagaggaaggtcgggatgcggcagttctgttcttgtccctggtgtgtgagtagttgctgtttcagacatgaaggcagctgtggggaacaagaaaagcaagggcactttctgcgccttctgccacccttctctgctcctgctcatcgtggcaatccagttcttgatgatttactcaccaacccttgatcagtacatggtgatgctaaccacaggttgttgattctgagtcttttttggagaaaagattctgattttgtttttgttcgatgaaattattaatgcagatgagttcatcccggagcctcacctgcgatgtgacttcagtgacaataaatccgacgtgtacgagatggagggcgccatccgcatcctcagccgcgagttggaggtattcctggtggcgcctcgcctcgcctccatctccggccgcagcggcgtgaacacgacgggcttggacgcgaacgcgacgaggtggaagatccagccgtacacccacaagggcgagtcccgcgtgatgccttccatcacggaggtgacgttgcgactggtgaccgttgacgaggcgccgccgtgcgacgagtggcacgacgtgccggtgatcgtgtactccaacggcggttactgcagcaactagccaactactaccaccacctcgcctccctccgagcggcagcagctaccttgtctccctccgtgctcgcccgtcaccgcccgcctgtggcctgctccacccgccgtcctctcaggttcggggggaagaagagaagagaagagagaacaaataaaagagaagaagaaaataaaaagaaaagaggagaggagaggacactgacatgtggatcccactatatgccatgtcagccaaaccaggaaaaaaatagatcaatactgcctaacgaacttttttttttttttacggttttgtataatttaggggcggagatttttggttttgtggttaaaagacctcaaaaaatctcgttaagttgagggaccttcggtgatcttattccttctcataaacaaattaggcccacaagtgaatttggcccacttcattctcgtcaacaaaaagtggcccacgagtgaatacatttgaccgccgctgatcagagaattcaacccataaatgaatttggcctacttaattctcatcgatgaattccgcccacacataaatctgggccaccttatttcgataaccaatttcggcccatagttgtattcggcccacttaattccccgaactgttctctccggcacgcggcggagcgggttgctgccgacagctcgacaggtgttcgatcaaattcgcgcccggagaccgagactctgagagcgacggctcgctgccggcgaacgggacgccgccatgtgccccccggg

SEQ ID NO: 27313 - DNA, 962 bp, Oryza sativa
aggcgaacgcgaagccgagccccacaccgcgccacgcggcccgctccgccgcgcgacaccgcgacgccaccaccccatcatccgctccaccgcggcgagcaccgcgcgctgctgctgctgcgtccaaagtccaagctcccaaaccaaacctgcgcgtgcccaatcgatcggcgccatggccgcggccgtcgtcctcctccgccgcctgcgcggcgtcacggcggcgccccggcgcgcggcggcggcgctgcccctgaccacgagcgtccggggtgtctccgattcgacggagccgctcaccatcgagacctcggtcccctacaagtcccacatcgtggacccgcccccgcgcgaggtggccaccacggcgcgcgagctcgccaccttcttccgcgacatgtccgccatgcgccgcgcggagatcgcggcggactcgctgtacaaggcgaagctgatccgcggcttctgccacctctacgacggacaggaggccgtcgcggtgggcatggaggcggccaccacccgcgccgacgccatcatcacggcctaccgcgaccactgcgcctacctcgcccgcggcggcgacctcgccgccctcttcgccgagctcatgggccgccgcggcgggtgctccagggggaaaggcgggtcgatgcacctgtacaagaaggacgccaacttctatggcggccatggcatcgtgggcgcgcaggtgccgctcggatgcggcctcgcgttcgcgcagaggtacaggaaggaggccgccgtcacgttcgacctctacggcgacggcgccgccaaccaggggcagctgttcgaggcgctcaacatggcggcgctctggaagctgcccgtcgtgctcgtctgcgagaacaaccactgtgagttggaattcggttcaatctttgggattgattttgctgcattgttcgttgatcgctggatgaattgcggatggtttg

SEQ ID NO: 27314 - DNA, 10498 bp, Oryza sativa
atcagattatgagaacaagaagcaattcgtggtttctcgagtataaacgaggtatatgatgacatttgcaagaatggagggagaaccaagtcaagaaggaataggtacaatcacatattttttactatacacagtacttttttactttttagtaaaatgatctttgtagaactaacttcacttctcagagaagtaaaattatataagtaacttcaccatccattgaagcaactgcattttggttcataccttccattttttgttgtgtgcatattggttctacacacgactgagcaattttttccagacaaactttctacacacccctgtgcagtaactttacatgtcatagaaagtaacttaacatgtcactgaaagtaacttaacatgtcattgaaattaatttaacatgctacagtagttgtacaaggtatactaatttgcttatttatttttttttctttttgcttttgttaaatgtagccaaaagatcattgatacaggagaatattatatttatcttagcgatcttgcgaactctgtcaaacctatgggctcactggacaataacacatgtgaattggcattaattgttctgtctgctgatatcaaggacaattcgaagagaatttttcctgccagaataggagtgagtatataaaatttacaaaaatctctttttaatgtattattactatcattgcaacaccttatgtttttttttccacatggtgcagggatatttgttggattcgaagttggacaggaatgagctcaagaaacacttcgatcaaacgagagcgaaccgtcttgaccataaagaattagtaagaaaatatatattccagctgtcaatgacatgtaaagttactttttcctgtctgcttgtagaagtaacttaaatgtctttgcaaattaactcagcatgtctgtggaagtaactttttctgttatattgacatgaaatgttattctgaatcactttttattatccttttatacttactaaattatgattatatttactgaaaaaccttttttccactcccctccctcttttcacttgaatgcaggcattttttcccattctccaggaattgggtaatgggaatcataaggctggtcactatttcgtggtgtgccttaatctgaaagctgaaagattcgaggtttatgattcgctgaggggagaagatgacgaagcgctgatttcagcatatcatcttgttgttgcatccatcaagaccatgtgggataggttttacatgaggtcttcgaagaaaaccatccagaattacccactgattttcattgatggcccaaagcaagataacatgtacgtaacatgcttttttttagttagtgattttcatttattgtttttagtcaaacttatccctgttttgtttttgcaaacaaaaacagccgggattgtggtttttatatgctgaaatttgtggagttgtgggatggcaaacagttgccagcatttgaaccaagtgacatccccaacattaagaaactacttacacacaagatgctctcgtttcaaggaaatcgtgtgcaatggatgcaagtattatggggcaaagagcctgatcctacacttaaggtaaagtaatgaaacactgcattttttttccagaaccagcacataagttatagccacataaattaggttgggtaacaaattaaaatagcatcttggttctgcaaagaactcagcatggtcttcctgagaacttacatatcactgtgaagtaactactatggaagctaaaagtaactttaatgcaactgtgcaagtaagtttcaacaatcttgtcacaacattataagttacatctcgtagctctaattcacttctcagtactagctaggcctttcctaactgatgtctttgacgcctttgcatggaccccaggcttgcgtcttgttgaaactggtctcccttgcttttgtatgatgggggggtcatttatctgtagcgttgggttagttgatgccgaggggatatctgaaattcctcttgcaggatcagctggggctggctgtgcttttttctgtttctttctactctgcttcatagctgctaagtcatcagtcattgagctcatacgctgtagagccatacggtaggctttctcgttgcttgatgcatcttttgcaatctgtgtaaattttgtgcacagattggtatacctgattagctttagagattcagggggcaattgcatttgttcaccaatgcttgtaactggaggcaattcaggctctttaaccatcgtccatctaggcaatatgtaatgttctggaatgtcactcacttggcccacaaaatcagatgtcatcacctgcatggaaaaaaacatatgttttattacctgccaaaagtgcttaatgcataagaagtaatttaatgcacattaagaagtaacttaatgtgcagtgagaagtagcttaatgcacagtgagaagtagcttactacaataacagactgttaccttcagaacatgacagcaaagaatgccatccctttcaaacttacagcattcacagttgtatgtcctatccaacacatttgcagctacaatgaatgcccttgatccataattcctaacaggacctccattcggttctactagatacatgttttcagaagttcgggtcaatttatatgatgttgaagcaatcagctctttttgaaatctgttgaatataggccttgtgtagacctccaatgcttttgtttccatgggatagttaccccacatagaagggattgtttcttctgcttcaaactcattctgatctgttgcaacagtgattttttcttgaatcttcttgtactgcaaaaagaagttgtatatgctattttggggatttacatagcgcttcagcactgcgttaaatccctcactccgtgctgtagtctggaggaaagggaagaaacagtgcataaagtatactgggacccaacactgtctcatttcccaaaggtgtcggaagtgctcattatcttgtaaatgatatgttgtcaacattgcatcccatttagcatcaaactcttgctctgtccagctattgtcaaggcagtcattgaatgcatcacacaatgctttgtcatgatctaatatatggccaatcttcttctgagcattctgcattatatgccagtggcagttgcgatgcttagcatgtgggaaaactagcgctatagctgccttcatagctaggtcttgatcagttattatgtttgtgggctctacaccttccatagcctctagaaatgcttgaaacaaccatacaaaggtttctgtcttttcattccttagaaatccacaacccagctgaatatcaaaaataatacacataaggaagtcagtacagttttgaagcaagtaagttactacaattttgcgtagtctctacagtttgtgtttgctagaagtaaatcaatacaattttgaactatagaacaaacactaaaaatgtaacttgtaaacttagttactttttcacctttttttaaaaaaacaaatgtaacttcacattctactagaagtaacttttatcaggatttgatgtaactcaatgaatgcaacaagtaacttatgatgtactataatgtacaaagttattacagattttttagaattacttttttgcaaaaaaaaggagtacctgtattgattgcccatgtttgtttaacccaatgaatggtgcacaaggcatgttatacatgtttgtcatgtatgtgcagtcaaacgagatgcaatctttgaagtctttgtaggcatttcttgctgctccatcaacccaaaatatgttctgcaccctgtcttctttatcaagttgaatcttgtagaagaaatttgggtcatccttttttatttcctcgaagtgagcaattgtttcaggaatatctctacacctatactcgctccccaactttgacttgaaattgcttatgtcttttctagtgtagggtacattcctagcccctccatacaattcagacatcaattgcataattctaccagctgagagattaactccgtgcagcattgtgatgaaatctttttcctctttcggtattgctctatgtgaccttaggaatttcttgagtgaaaactttctaactagaggatgtgtgtgttcttcaacaaactgaattacttctcacctagctcctttcctcttcactgtcatccttgctttccaggcagcctgtcttgttctacttcttttccttttctttggggggcacacttcacccgttttttcttctggaccacatttgttgcaaacaaacattactttgtcacgttctccatctttggctgacttccttgaagtgttgattttgattgaaaatccaacgcgctttgcgtacctgttgtagtgagcccttgcttcctcctctgagttgaaagtcaaggtgaggtacggcacttgtgtgctgcacggaatatcctgtgatggcgctgactgtgcttctgaatcatctgttctagagtcttcacttgaaattgtgttggcagtagcagttgttgcgccagttgcaacactagtatgcattgtgtctccacgatctgacatttcttcaaatacttgcatctcataatcgccttcaaatatttgcatctcatcattggcttcaaatacttgcatctcatcattggctacattgtgtgcttgtaaacttccagcatcaccagcagtatacatagtttcaaagtcaaaagtgtcgtccaaatttatagcaggaatctccatgctagtgtcagtcggatttatagggaagtatgtttcacttttgtctttatcatcaactagtaaatggtgtactggaggttcattttcaccagaaactaattctgggatactgttgaggtcaaagtccatttttgctgcatgtgtttcaggctattagtaacaaagttagtttatacagagcattcattgaggtaattcagtaatttggggggggggaagaagtaacttttagtttttgcagcatgtcttttttagatgttttataggaagcaattttctcaaattaagaccagtggctatactaatgattttttttttcacaatttgttttgatgcagtacaagatgaaattgagacgcaactaggtgatgcatcatgctgtatatagaaacaaggtacaaaatttgtaactaggaaatgtagattcaagtttatagggaagtaacttccatgtttctaggaagtaactaattgaattgttacaagtaactttctgttaaaactgcactgagactgttaaaattgctatgagaacctaatgcacagtgagaagtaacttaatgcgcagtgagaagtaacttaatgtttcttggaagtaactcattgaagtgttagaagtaacttttctgttaaaaatgcactgagacttctgttaaaattgctatgagatttccaacaccagcactcatgcctatgtaattagggaatacaaattcaaatttattttgggaagtaaagtaacttttctgttcatattgcactgagaggtaactagatgggatgttttcatgctgtgtaaactgtaaactagggtttgtgaattcaagtttatatggaagtaagttgcatgttactagaaattgctctgagttttttgaaacaccaggactcatgccttctctataacttttttttctcagtagcactagaaagtgaatttggggtataaaggaagacagaaatcaagaaggaagacagaaaacaagagtacagctcattactcacaaaattacagcacagattcatatcaatttgtttctcgaagaatacagagaagatctaaaagtttctaggttagttcttttttttttgtggatggatctcaaagaagacggaatttgaacttcatgtgtactttacctagatattttttcttggattttcttctcctccttcccctcttccaagatggcgatttttttctgatttttaccgccgtggcggctgtgtgtggattgatgtcaccggatgggttggagtgagggagagaggcgcattgcgctgttttaggtggggcccacgccagctagcgaggcgttgcacggtgcttgcgcgcgcaagcgcgctctttccttttttagcgatggcgcgcgcgggggccctggtttagcgagcgcagaatcaccagatgtgcgcgtcgcgcgatagccctatcgcgatttagattatacgaattaagaaggcgtaactaggggatgtaaattcaactatatgttaaagtaactttcatgctcctaggaagtaacttactgaagtgttagaagtaagtttctgttaaaattgctctgagagcctactatggaatgtaaattcaattttatgtgaaagtaacttgcaagttcctaggaagtaatttactgaagtgttagaagtaagtttctgctaaaattgctctgagatcttcgaaacatcactactcatgccttttgctccaacttttttttcctagcagcacatacaaaggaaatttgggggtacgagggaggacattaatcaagatggaagacaggaaacaacattacaactcatttcttacaaaattgcagcacagattcatagaatatgtttcttagagaagatagaaaagatctcaaagattctaggttagtttctatggattttttggatggatctcaaaaaaaacagaggatgaacttcatgtgtacctgtgattttttttttggatctactctactttcttctcctcctccgagttgatggtttcctcctcctccccctgttcgtgctttttttctgatttttttccgccgtggcggctgcgtggggattgatgccgccggctgtccgaacttgatgggttggaggggggaaggaggcgcgcagcgctctatcctagccgggcccacgccagctataccacgcgaagcgagagccgtgcgttgcacggtgcatggtgcgcgcacgtgggctttcctttttggcagggctgcgcattcacgcggttgctttttctggcaggggcgcgcgtcgcgcgatagtcctatcgcgagactggtctcggtctagtcgcgtccattaattatgaagtacggagtagtcgatttgattaagcgggatgatttgtgtcggattcgcgacacgagcgcttagaagggagcgaaacgctttgtgcgcttgcgcaaaatgtgcagtgtttttctcgatccggagtagacatattaagggaagtgctatgatagatgtgactactatctttaaatttatctattttattcactcatgaaccaagaggcaacctatacaatgtatcacctctagttcacaaataccaaaatatctaatattctcacatctttcttgaaatttgtgtggagattgtatcttgatttaggggtggctcatcatctctcttttcacttctcttctccacctcatcacttaatccaatgtatgtgacacttttaggagcaacatatagagcattatagtacttgcccttataatcctacgaaacagtttttatccagatgcatagtaaaggatatgtttcttccgattatacgttgctatattatggaatgatggagtagcagactataagctagatatatagagaaaaaatgagagagaaaaacattagttacaaatttgtaacgagcatataaactttaaaacgatatatgtgtacgagaggtaagaccagtattgagaggtgatgctctgaatttctagcgggcatgcacgaagaatgggttacgacataccccctatgtgaaaaaaggaataaacttttaccatacataaaagataaaagttgccttttttttaagagtagtacatgccctgagatctacaagattagcgcatattttcgaagtttgaaaccaataagttaaaattttagtctaagttaagattatagtatttatatggtaaaacaagtcaaaaaaaatataacatttatatatactttttgtaaataagatgaagagtatatttcactttgtttcactttttattactggtgttttattttgaaccaaactttaaatagaccgggtaattttactttcgtggtactttactattttagactactctcgattttttttatccatttgaattcaatttaccatatgtcaaagaaacagtctacgtaaaactgcgggagtttattgacaaatagaagatggcgtacccaaaatcgttcatatgcttaagaaaagagtttgggtgattcaaaataaaacaaagataaaattatcgagtctaaactgaaaacattggtaaaatggtggtttaaattaaaacacggcaataaaaaattatctaagattaaatttatcctaagacgaatgatcaaacgtcatgtcaaactttttttagggcattgtgtactaaaacaggaagtaccaagacaactgtgtttagttcacactgaaattagaagtttggttgaaattgaaatgatgtaatggtaaagttagaagtttgtgtgtgtagaaaagttttgatgtgatggaaaagttggaagtttgaagaaaaactttggaactaagggcccctttgaatcgcaggatagaaaaaacggaggaataggaaaaacataggattcttaccggaattgaagtataaaacagaagattgcaaaacacagaaaaaacacaggaatgttcgtttgattggagcgcaggaaaaacgcaggaatcggatgagagagatagactcaaagaaaattttccaagaggttggaactctcgctaaatttcctccaaaatctatatgcaatgtgccattccataggaatttcataagatttggaaagcttcaatcctttgaatcaaagggccaaatagaaaaatttcctataagatttaaatcctttgaaattcttacataaaggaaaatcctttgattcaaagaatcctaaacacgatgatagttccactgataatactagcaccgggttggcgggttaccaaaagagctgacggatatggctttggtgtaggcgtagcagagaacagcgtgacgcgatggtgacagccccaccggggcagacgtggagaacaggtggcgcgagacagcgaaacaaacgtactcccctccccctcaccaaccgagttcatttctattttaaataagtttatttttaaaataattattataaaaagaaaataatatctactgtgaatagataaagtgataaatagttacattgtgatttgataaagtaaagttatttaggtttttctgtagttttgtattaatatgtgtgagaaataaatttatttagcagcagaggtggtactcctactactgctagaaatttggctatgtttagtttatactaaatttgaaagtttggttaaaactgtaataatgtaatggaaaagttagaagtttgtgtgtatagaaatacgatggaaaagttgaaagtttaaagaaaaaacttgaaactaaacgtggcgaaaaggagaaaggaaaacaaaaactgggcctcctttgcgttgcgctcagctggagtccagctgctctgcccgctgggcgccacacgacgcctcgcttttgcgctcggcagcagaatgcagagagagcttgcattgctgacctcgcattcgcaaccggacatcaaccacttgccacccggaccaggaggggacacctgcgagcctgctgtgtgtgtgcgcgcgcgctaagagccaactactacctccaatttatctatagccaatctaataactcattgttacatactacactattaatacttggtcccacctaccatatatacactgtgtcttagagtccgtgctatagctggctacaaatctgtagcccgctgatcttctctctcctcatttatcttcttaaaatatatttgcagctggcttatagcctgctattatatctgctctaatgcgcgactagtcgcacggccccagtcactagtagcgtaccactagtactactactacactattatttattactagtactactacttctagtattactactataaaaatatatatattttatgtataaaaaaaatacacacatacaaactttatatacgatgtgtacaaactttatatacaacacgtataatctttgtatatgatgtatacagactttatatacaacgtgtacaaactttgtatacgtacatattaaaaataaaaaaaactaaaaaaaatcacgtatatccgtatacagtgtacgaagtttgtatacaaagtttgtatagacctatataaagtttatgtacgatatatacaaactttatatacaagtatacaaactttttatacgtatacgtgtatgctaaaaaaaccaaaaagaaaaaaaccgaaagaaaaaaccggaaaaaaaaccgaatggaaaatcgcaaaaaacaaaaaaaaaagaggaaaaaatcggcgggccccaccccctacccacgcggatgccgcgccccgggggagggggcgactg

SEQ ID NO: 27315 - DNA, 5316 bp, Oryza sativa
tccggcaagattcggcggcaaccagcggcgggcaggctggcggcggcggagcacgggctcggtggcggcgtgcgggctagcggcggcgcgcgggctcggcggaggcgtgcgaggtcggcagcgcgggggctggccgacggtgcgcgggctcggcggcgacgcgggggctggtcggcgggcggcggcgcaggggctagccggcagcgcgcgacctggcggcggcgcgggggctggccggcggcgcgcgggctcagcggcagcgcgtgggcttggcggcgacgcgggggctggccggctggcggcggcgcgggggctggccggctgacggcggcgtgccgcttggcggcggggattccttttttttttcttttttttttcagatctggagctagaagtttgccaaacacttttgatgggtctgtaactccaataggagctagctccaactggagtaggagtttggagctgggagttggagtttggagccctaccaaacggggccttagcttttttgtgctgtgtgtgcccatgtctcgtacggcgcgagccctgctgtgtgctgcttgctcatctactctatttcggtctcacaggaatttttgtggagggacgtaacactttttaaaattaaattatgaatctttcaacacatcggtactttcgattggaggaatgtgaccttttcatagccatataaagttttctttttcttttgacctttgttcgatcttctatcagtatataggagacacgatttttttaatctttttttattaaaaatgaaaaagaccgtccaggaccgggttgctagctactttctgcgtgatattttttagactacgaatctgaacatgctctgttacgcttgcatagaaactctccagagatgaggatcaccaaatgttttagcatcttcaccggggttatttggtatacgcaaaaggcggtaccaccattcctctaccgctgaaggtcccaactttgcaagtccaattggaggccaatccaccgctgaactttggcccagactcgtcaaaagaatatgcaatgtgcgaggagatgtattatcgtttcatgaatggtgtagcaaagtggtcatatctgttggttcaccaccttggcctatttcgtagaattaggtctggtttagtttctaactttttcttcaaacgttcaacttttttatcacatcaaattttttctgcatacacaaacttctaacttttccatcacatcgtttcaatttcaatcaaactttcaattttggtgtaaactaaacacacccttagccattgtaaagaaattacacccgtccggtcttttcacctttcatgaaaaaaatatgatgataataggagtgttagttcatataaagctacatcttctcagccaacttttccagattggtaactgagataaactgtttgtatttcgatatagtatttatttaaataaaacaaaggcaaaaggttgcaatatatattgattgagcagggcaacacagtacgctggggctaatttactagtgtgcttgagagaagtataaaggataagattggaaagatacagaaaatgaagtggggtattagtacgcaattaattaagtattaattattttaaaactaaaatgaattactattatatttacagcaatttttctaactttttaagaaaatatttttaataaatttaggaagcgtgcgtgtagaaaataagagacttttcttccagatgtgcttgtctcaaacgcagtgtataaggaagattatgttttgcgttgttctgtactgatggtggtacaatactagataaatgcattcctctcaacatctattgaagataatagtttttgtaacttagagggtgtttagattgagagatgtaaaattttatcgtgtcacatcaggtattatataggatgtcgcagaggtgttcgggtactgataaaaaaactaaatacataatccgtcagtaaaccgcgatagcaagcctaattaatctatcattagcaaatgtttactgtaacaccacattatcaaatcatggagtaattaggcttaaaagattcgtctcgtaaattagtcgcaatctgtgtaattagttattttttagtctatatttaatatttcatgcaatgttcaaacgttcgacgccatagggtgtaaaatttttgggtgtgatctaaacacccccttagaccattcccaacccaaaacactagatatagtttccataaactccacatcatcaagaaactagtactagacactaatcttccaatgcaaacaccactagtccatacttaaatttaatgttgcttatctcacatgatgtcttagatgttgtgtagaaactgtctcatgcaagatatggtttttttctctttgctcatttattcacttgccacattattttttaggcaaaatttaccacaggacatgcaaaaaacgtgtaattggctaaaagacaccgtgaaaacatgacatggccgatggacctaaaaaaacatgtaattggttgcaggacaccggtcacatttttttattatttccagatcaaaagaggtgagatatttttctacatgcctgacttgccccttctctttccttctttaaacaccggtgggtcccatgtgtcatggacagtgtatgtttaatctaatttttaataggtttttaaccaccaggccccacgcgtcatggactaatttgttcctaattagtagggtgattactatttactaaccataagtggggcccacatctctctcctatcctccttcttcctcacgcacgtggcggagcagaggaacagcgcgcggccggccgacggcctgagctgggacggctcggcatgcggcgaaaaaagcggcggcgctccgccggggtatcactgccggcgacggcgaggaccaacgccgggatctcctcattcagcgaggaccaacgccatggtgacgagcagcgccgggatctcctcgttcagtgaggaccaacggccagcctcacctccatcctcacggtgcagcagctgtccacggacatccagggtctggacggcctcattgccagctccgaccccatcggcttccaggtcggctccttcgccaagagctacctgatgcaggagctgggcgtgcccgagtcccgcctctgggagctcgccatcaccgactactcctccaccctgcagagcggcatcgtggcggccatcgtcgacgagctgccatacgtggagctcttcctctccatcaactgccagttcaggacagtggggcaggagttcacaaagagcggatggggattcgtgagttcttttccttgttggcttcttttcttcctctttttattctacactacaaccaagtactacatatgcaggctttccatcacgactcccctctggccgtggacctttcgtcggctgccgaggaggaggagggtgacgtggccgccgaggaggaggaggccggagagcgaggtaggtgcggaggcaatccgatctgatgaattggcggaggcggcgctccatggcaggggcaatcttgccatttgaaaaatattatcacctcttttgatctggaaaatataaaatattgtctctggtgttctataaccaattacacaatttttagagtgtcaatcagccgtgtcacatttttacggtgtctcttagccaattacgcgtttttttcatgtcctatagcaaattttgcctattttttatcagaggtggcagcttattttataccatagacatcatcctagtcagaaatggcctatatatatatatatatatatatgtgtgtgtgtgtgtgtgtgtgtgtgtgtgtgtgtgtgtgtgtgtgtgtgtgtgttgtgtgtgtgtgtgtgtgaccatttacattttttaaaattttgatagtattggatgtacttagtttgattttgttttttccaaaaatttacgtctctatgagaacaaagttttaaaattcccaaactttagtaaagatgtgagataatgtttagttcattatcctactagctaggctgtgtaaatctaatcaatttatacttctaacttatatttttaaaaaatatatatgttggatcacctatataaaagttataaaatatttcatttttatgaaatactccctcggtaaaaaagcctaattctggatttgaatatggacataatgtatgtttggattgtaatctaaaagtaggttttttttttttggacgggaggtaatacggcaggactaaaaaggatgataaagtgaatgcaccgtctcttctcgtgggcaccgatggaacgatcatccccgccggcggacggacctgagcaccgttgagacgaggaggatgggaggaaggacggaccgggcacgtaacgcgtttgggccacgacatcccattgaattcctcgcccaacctctcgatctctctcgccgtacgacgccttcttcttcttcttcttcttcggttaggagaagtatagtactgtactgatttgaacggcggaatggcagacgacggtggctggctagctagggctattagctgtcgctcaccaacggctactacatcgctgatcctgccgcccgttagctaagctcctcgttcgtcgtcttgcgatttgcgatgcgattccacgacgtttgtcgtgtcgctgcaccaagcacaagaaggccgttgccgctgcagcgcgagattgatgggctgcgcacgacgtgggccgtgaattctcggcctgctatttagctcatatggttgggaggcccattcccaacgctgcaatgctagatgaggaatgagtttactttagatcccttagtccacgtatagctcgagtatacagtaccagggaaacgcatcctagcttgagaacttcatggagatgcatcaaaacagcgggtcaacatataagcacaagtgcacaacgccaacattcacctgagcattgacaattttcatgacccccccaagggaatattacgtctgcatattgccgaaggtcgcactcgcagttgtgaatcacacaagacgatgaaatgacaggattaattccggcagttgattcacctatacataatttatttagtgacagaaaaaggaagattaacactaaggatgccttgacctgtattattaattatttctcctcttgtatatgtaactacagcacaaggcagccaagattctggtggccgtcggctaccctagggaagtacagttctcaccaccttcctgtccacaccaaatgactgcatcatggaatacaagattagttaggattgctgatatattctgggatatactccctccgttt

SEQ ID NO: 27316 - DNA, 1832 bp, Oryza sativa
gtcatctattaaaaaacggaggtagtatatttaaatcaaatgagatatttaaactttaggaaaacagttccataacatttgcatgcacgagaaattactaagatatatggaattctgaatgaattgctcttggcatctgcttacctccaaaccgcagtcattaacatatacatttgtaaagagctcagatggatcgggcattggactttcctgcagtattgaacgtgccatgattcataagcacaagtagttcgaatgaacgaaacatttttgaggacatatataactgcaattcagacctttgctttcgcgatggcagtgtcgacttgcttccttatttctttctccatgtcctaagaagaaacatcatagtagatttgacttaggatttctgtgtttatgttttccgccaaagctaatctcatgcaaggatacactatttttgtgtcggtttgtgcttctcttttgtatctcataatgaactaaaatatacagctgatttctctgccttgaatcaaagaaaaacagcatgctacgtcttgcattattgctttgtgatactatttatatgtaccacaatagtataccttgagttcttgtgtggttgcaaagtcatgggccagtagtagcttcctaaccctttcaattggatcgcgctcctgttggtaacataacacaaacaacttactcagaatgaatgtcttcggtgtaaattaagttttgagtcgagactcgagagctcatggccggccatcctgattcctgacctgtcttatgcctgcaatttcatctctggtgcggtaagtgctccctggatctgacatagagtgtccgtggtatctgtaggtgtccatctcaagaatctacaacaccgagaggatatagaaaagttacatgcatctccaagagcaggattgtgttttctactgattagcggcactgaatctatcgaacaatatgagctaaaccacactaccagcagtgtatttcagcacagcccaacccctgagagatccagaaatgtccataatgtgcacagtcgaaatggcaatcaggaaattcacttacaatcggtccattttcaagagcatgttgcttggcaaatttacaagcttgtttgactgcaagaacatccataccatcgacttgcaccaaacacaaggtaccataaccatcatcacaacgatacaaacaagagcaccaacacggccacctccatgcctgcatatccccataacttcttgcatgcaagctaatcgcagtaaaaataactgcaacccaacttgccgtaggtgtggcaagccacacaaagtaatcgttggcggttggccacaagtgtggtaagatgtgacttaaaaatgagcctacgacatgtgagccagcgagttaatgaagtgtggcaaatcatagttatagcaaaccaaacaccaacctaagaaagtttggcacatctagtactcgaatatgtggcatgacgatttgtggcagtgaaccaaacaaccccggaacccacaactagatcacagagtatggtgatcagagtccagaaggatgttgcactcaaatttactggtcaattatgttcagctcagttctcattgtcacatcaacagatcaactctccatcagccagaaagagttcaaacaactactactcataaaaaaaattcaaataaaacagacgttaaatattgggtacgaaaattcacaactgcgcttaaatgagacggagaagtatttagttaccttcaatcctggcacatagtcgccgcgtttgtagtatgcggggcttttcgatgccctccattccgccgtccccatcccatctgtgc

SEQ ID NO: 27317 - DNA, 643 bp, Oryza sativa
taacaaatctgttaccatcactgataagagtggtaaatgattaattattcgtagcatgccatgatgtcagaaacagtaagctgagtagctgatgtgtgtgaattaacgtgtttttgtgtgtgtgcagctgctgatgagaggggagcacgaggagaggcacagggggacgctggagaggtacagggagaaggcggagcactacgtgtgcgcgtgcatggggcggaacgcggccggcggcgcggacgccaacgtggagcggagccccggcgggatgctgtacgtgcggcagtggaacaacatgcagtacgtcaccaacgccgcgttcctcctctccgcctactcggactacctcgccggcgccggagacggagacggggacggcggcggcggcgtcgcgacgtgcgtgggcggcgggggcgcgggcgccggggaggtgttcgcggcggcgagggagcaggtggactacgtgctggggagcaacccgcgcgggatgagctacctcgtcggctacggcgagaggttcccggcgagggtgcaccaccgggcggcgtcgatcgtgccgtacaaggacagcaaggagttcatcgggtgcgcgcaggggttcgacgactggttcggccgccggggcgccaaccccaacgtc

SEQ ID NO: 27318 - DNA, 7987 bp, Oryza sativa
  unsure (1)..(7987): unsure at all n locations
cagagaaatcagtaatcatacaagtcagttagcttttgcaatgattatagcatatggtaaagtgtactttaaataatcttaagacgacaaagcatcaccgcagaaatacgtccctgagagtattatcatgtgattgaaaagttgctaaagtaggtccaaaaagagggtaaagcctgtcaagctttttactgaagacgcggcggcaagtattaggctaatcagctgagaagtttgtcaaggcaaagttcacaggttaaaaaggggaaatatcttatcagaaacgctaacattttgtgtcacggcatcgtttggagcgtccttaatgcaccagtactaataagtaattagtgggaaaatgcttctcatcgaacgcccgaaccaaattgaaaaatcgaacggggagtctctgacacacatgcacctatccaacctgtatctctatctccaaacatgcacctttaacgatattcaaaacgaattttctctgaaattacttatccaatctacaatccgatcataccgttgtattcgttgtcattaaatctttacaacaagatatcgcatgattatattctgataaaaaataatcatatgtttcaatccattaacattttttatttcatatgtgatagggatatgtttcaatatatgtctttagcgtgttttacataattcacaatactaactattactactctctctcctctctccacctcatgcatacatgcatgcattttagctagtttcaaaacattttttctctcaaactaattatccaatctacgatctaatcataccgttgtattctttgtaattaaatctttacaacatgatatcgcatgattatgttttgatgaaaaaaatatatgtttcaatccattaacactggttgtttcatatgtgatagtgatatgtttcaacgtgtattttcatcatattttataaactttctgtaaaatgttatcagtctgctcgatattttattcactcccattaagtccaattggcaaatattttgcacggcaacgaattttttttattcttgtacatgctaccaatagcgcggagtggtgtgattgcaccgtgcacatcaggcgtccgaaatattcgtggaaantatcgcgacgatccgcacgcanngnagtcatcnntncctaattaaagtagcgccctagcactgtcnnagtcgnncgaaaaaggtaannacacaaatgnnnggcatnncnaccgtnnttncgaaanngtgtcaacgncgctcaccaaatgcattactagtaacgtactacanngtanntgatanntaggtacaacagctannngacntgattcgttccccacaacaatcctaaataagcaagcggaggatttaatcacgacatncgaatgagtcaaaaaaagatgacgaaacaatagagataatggatggattacctatttatatttctataaacaactcagggtaccctgcttacaaattgttcatgcaatctctccactaacaagacgcttctctctctatagtccaaatcccccaaatccgctcaccccagccaccaatatcaatcagaaacagggcgtggtgcctagcaagaatacatcacggcgctcgttcatggatatatactaatcagcgtgattagtatttaggaggtgctggaggtaaccggtttggagtgcgtcggctgccggagttggcaccggaggtcacgtcgccgttttcatagcgccctctgcgtccatcagcgcttcttgaccttgattcgctgcctgagctgggtccgttggatgcggaatcgaaggcagacctccaatcctcacctgggcggttgggtgtccgggggctctctgcaaatgattccgtttaagaaatttgtgacaaattaacagaagaaaagtaacatgcaatctacattagtcaccctatgattcaacatgtagaaatatgagttataaaaggggtgaatggtcagctgggtaactatatcaatgacaggtaatgaacaacattaacaactagttacaaaggagatgtaaaataccatacaattgtatttgctattacttctcaggcattgaaagtatagtaagcttaccagcttcagagatatcattggcataagaagcagccctgttgtcatggacactaagttgacgggtaagctttgacaagagagatgattgtttttggtatttttcccttctacgtttagcattatggtcctcttgcagaagctcttcaatttttgcattgctttgcccactggtaatgacaaaaaaagcaaaggaattaagattagataataatggcattaaaaacagcatatagtataaatagcttaggtgtaccatttaagcaagtctataatataagctaagaataaacaaactgcaaatagcatcaatgaacaacgaagtgctggaataacatgtggatcccaacacctgtcccacgaaactgtatttttgacaatcagttagaactaaaataactaaaatccctcccaaagaatacaacaaagtggtatgacaacattcttctggtgccaatatttctttttcatgtaaccagaaaaaagataatatgccagaatgattctgaggtttatacacactatagggattactaaatagcaagatcaaaatcatatgcatagaaaatagatctacaggattcccatggcacccttttgatccagatggctcatgatgacactattgcagcacaaagaatctgaaactgtcaggtggggaaaaaatgcaaaaagctagaaacagtattatagcctccagaagataagagaagtattcatcaaccttattgaactatatagctggtttagcatatcttcctttgccttctccacttggcacaacacaatagcctgataagagaaggggaaaaaacaataagaacattgccacaatgacagggtccaatgaaatgagcaatgctagcttttttttaatgtaaacctttgggacatttgctgccagactattcaaaacagcctcaacataaccacgaacttcatgggacatccatctaagttcttcttcaggatcagcaggtctccgtgccatagtatcctttgaaaagtgcagggatcagatgtcaattgaaaggtcaaatggaagtaagtaactcatgccaacaacaacaatacaacatgtttatcttaaggaacatgaaataaagttttacagtcttaacatcaaaataagaaagagtttgacaaggagaaaattagagccagagggctaaaagcgtaggaatggatatagctagaaactaccagagcaccatcggaattgctttgtctcatggaaccaccatcagtatttggacccttgaatgatccccctttgctttgaattacagcccgtatcttatttacccactcaactttgtcggccgtgctctcagctttcaatacaacagcactatgagctgtaaaaggaaatacaccatttagacaacaagggtcttataaagaaaaaaatcaagctgaggtattcagggatcttaaccttttagaactgttttgtaggcaaccctgttagttatcttaaagacgagacttgggcctttctctggcccatttgccttttttgaatccttcaaacttttaggaggttcttcctcctctacttcttcaaggttacactcctgcacaatgatgtcaaattcaagttaccaactaagttcattttacagcatttgttgatgtatatgtgatgtttcttccaatatcagatagctctttccaagggataaggcaaaaaaacaaacccaataatggtagaataaattacatgcaaatttaaggacaaggtttgcgcacacacctcaagagtgatgacaccacgaaaatgtctctcctcttgtttcttcgtgtagccaagctgataaaaatagaaggttaaccaaccacccatgcatagaagtccatcggaaaatacataaataaattatcctgatattcctcctgttagtgcaaaaagacaaacaaaactaaaagatgatgattgaactctgattaacctttccgcttttctcattgaggacaaaccacctcctactccatccatttgtttttgcacttttcttcaaaaggtaacctgaagaaaaatgtacaaaattaacgaatatttatatttgcatgtacttttttacaatgagacaaaacaaatgtttcatttcaccaaatggttcaaagggcctgtttaccagagctccaactcctggattcttacagaatgagtttttagactagaatagaagtgctttaagcctgtcttgagcctaaattcaataaaaaatttgtggttttccataatggctagcttgagcacagcatgatttgacacattcttacctgcagtaatttcaccagaagaaccagcaacctgcacagaggacccctcttttgcgtctttgtcttgctggcctgatttgtctttgtctttgtctttcgctgatttgtcttttgtgtctttctcagatcctgtctggggactggaggcctagaaccaaagcatagttatttcagccttgtaatggtgaaaagaagaaataccatgtctaataatctaaataagtgtattcctaacaaaacaagtcagtgtgaatcaaaatccatttaggctgccttaccctttttcccatgggttggtcagcatcctgtggtttcttggaggatcgattttttaattcatcctcacggcgttgcctttccattctgccagtattgttaaaaaaaattgacaaggctcaacattccatagtgtaactgtgtagccataaaattatcttatctttacaaaatataaataatggaaagattgattatcaagcaaagggcaacttgctgaatttcaacaaagagattgtatatccctggtaatcatatgttcgactgattcaagataagggggtgtttggatgctggggattgctttgacaattgttggtatagctcaatttgagcaatatcctaaagatctaactctaaaaagaggataagaatttggagataaatcatccctaccaaagcagaccctagaaaagaatagctgaagttaacctgaagttgcatgtgtccttcagtgttcatggatcacttaaagatacttctttgaaggcgtacgtaggaaacatactaagatttccatgctaaattcataacatcaaaatattacaggaaatgaatttataaatcgaatgaacacaaatattttatcaaaaagtaagtatagaaattgaacagggagaaatgttaactaactattggagacaaatgataactaaaattgaagggggaaaactagccaaaaatcaaccttctttgcactagacggatgaaatgctgaggaggaacaaaggcgcgctccatatcaacaagtgcaacaaccatcttttttgcatcatttttgaagctgtctagtgcatttgatgctattgcaatgaccttgcgaaaggaaacatagattttttactcacatcagtcaacaataaactctaccaacgtgaaactcgaaaggaaagaaactctaaaatagctaggtgatacctcgcgcttgaatggaggatatcttccaagtcctggtgtggcatttgctgaagcattgacaatgtctaacaatacacgatgtacctagtgcattaagaaagataactattacttttcctaggcaataaactaagaagttcacaattttcaatacaaagataacaatatacaccagtacataacatagaaataccacacaacaattgataacaccaaataaacaaaaatctgaccatatggaagtatggaactcaagcagataggtagtcccatgcatccgtatcttatttgttgaaacaatggaaccctaattttacctcttatctaaaaaactcaatccatagaacaaattgctacctcaatcaaatgcacccaacccagcctccaaaagtcaaatttaggataacgcttttctggtaagagaataaaaagcatcattttcttattgcagtaacttacaaacacaaacacattatttctacaacgttcttagccttgagaggaaaaaaaggaacagatctaaacatgttatatttttattggtaacaagactttatttgaataaagtagaacatacctcttcaacacagagtcgtgatggctcctttgccatatccaatactatctttatcaaggacctcaaccctttctctggagatatcaggtacggttgataaccatcggcttccaagacaatctagaatgtcagagaatactgttcagtgttcataaaagatgggaaaatgcctgatagtagcactaatcctgaaactggatccaatcttacccttttaacattgctgaggtcaaagtgcctgtccagtggcagctgtttaattctctctgggaatttcccttcaaaacttgcaacaactttccaaccagacccctatttatacaagacagtatattgttattgtaattgcttgtgcagtttaggaaggtatgattaaaatctaagtaggtttgaagctctttactaacctcgccagatgtaatatgagcaagaaacttatcctcgaattcccggcagagttccaaagcaacagcccgagtcccttcagcactttgtaccatagattctcccagccgtgccagttcatcttgaaccatctgggacttaccctgaagactgaagtagcagcatatgaagcaattgtatgtaagtttagcactagaccacacatagtagtgaattattccctccattaacagaaggcatgttagattttgcacaaggattaaaaaggtgatgaaattaagaaagatgtaagagcaaatgaattgtacactttcatgattgttctgtgtgtgagaatactttgtgtcggtggaaaagtggtagaaactaaatgcgtacgagagaggtagagggagggcgggaaatggtcggcaaacactcactaaatgacatgcagtatgtacgagggaaccaattcgaattatatgctatattatatcaacgaaatgagtaacagcactgtagcaagaacatgaattcatctaacaccatgcagcatcgataaataattaagagatgctaggtacaatatacaacagtaattgaagcataaagcacaattcttacccactcaataggttaggaagtcgcactttcatccgtttacgtatctgcttagcaatggtgtcaaccagagctattctacctagtttactttttggagctccagttaagatggatctgagggtttcagcttcagcattccatgctgtttctagtgagttttcagaacctgctgcttgagctgacgcaattgcaactgattgtcctatcagagcaacccactcgatatctggaaggttttttgggcccttattcgacagaagggcctgaacacaagctatagtttttgcatctccttctgcttgatcaactttacttatcacacctacagttctggtgcctgcaacaaatgggtaaatatcacttgcgatgaaatgaatgaatggtactatagaagatatttactcctgaaagacagaccatctgcatcaatatccttggccagcctaagagctcgagatgacgcaacatcagctgcttgcattgcaggtatcacaactagcagtattgcatcattgtgcccagcatattcattaatctgaattcagaaaacagtcagaattctgcagcataaaattggaaagcatgaaaacatcaaagaagaatgcatgtggtgttctctctatagtagatgagtatgaacgcttcaagggaaaattcaatctatgaagtaactgcacattgtgaagtttcctagatgctaccatttttcagatatatgaatgtcacggatcatacaagatattcatgttacctccccgtaaaaaaagttattccttctaccgttatactcacatagcatgtaaactgacagtaatagtgagtggttaaa

SEQ ID NO: 27319 - DNA, 986 bp, Oryza sativa
tactttgcaattacacatcacaagattctctgtaactttctttttaacatgaagattctttataactttcttcagcacaaaatacaaacagcatataaaatgcaatgaacttcaatataacaacccaaattttatctctttgatctgtgcgccatgactacaaggaatacctcaccaagtcctaacatggcagtatatcatacatatcattctacactatattatctacatttctaatggaacaagaggcaggaacgggttagccagaatcgccatgttactcgcggacgaacctgtactcgtccgcagcttgagattgatcccctctacacggcccctactggatccgctggacgcccccttgctgagcctgtcctgcagcgaatgccgcagcgaacctgagaacagcagacatcacaaattcagcgccatatccatctcgaaaacccacgggcgcaagtacatccacagaatcgagcaacgcaaagtttgcgagatcccactgacttgcggacacctgctgcgacttgctgtcgatttgcagcacgatggacttgctgctgaggcccgggtccctctgcaggtccaccacaattggcgccctcgtcgccccgttctcccccgtcggctgcaccccaagcaccaccaccacccccaaatctaagaatcaaaaaatggaaataggcgaagagctagttgtcgggtagtagtagtagtagtagtagcacgagctcaccagcacggggtggccgatgaggctgttcagcacggccgacttgcccgccccctgcacgaagcagatcagaactggatcagatcgggggagcgcacgagcgagcgagcgagcgggcgggcggatcgcggcggctccaacggcggcggcggcctattatacttacgacgttgccgagcgcgacggcgttgaggaaggtggaggggcggcgtggggcggagtcgtcggaggggtcgtcgtcgcgcagcagcga

SEQ ID NO: 27320 - DNA, 1988 bp, Oryza sativa
ccgcctggcgcatcgcctccgacagctgcgcgagctcctcgacggcctccatcgtctcccgcgtccccgcccttcctctccctctccctctccccgcgccggatctcgacggatcgggggctcccgctgctgctgctgctgcgacggcggcggcggcggcggcgaccagggccgaggcgacgcgggtttgaaatctgcgtggggatgggatgggggaggaggcacgagagacgtgggggcggtggatttgggcgagacgagaacgagagaagagagagagagatgggggcagtagagactagagagagagagagagagagagagagtcgtttgctttgcttgcttggctgcgaaggtgcagagcgacgcggtgggggcatcggctatggatactggttgggccgggcctgtcgggatttcggatggtcccccccgttcggcttgggtggaattcgaaaaattttgcgggattggactgggggagaccgggcaaggcctggaggccttcctgggtgtgtttgttcggttgggatgggatgggccgagttggtgggttgagattcggactctcattctttccgtgagaattcttttgggggcattctactcatggtcctcctcatcttcttctacctctggcggttcttctccgggaagcgggtcgctgtcattgtcaacgggcgtgtcattagaggacacatcaccgctcaccgataaccttatcgaggcgttcctaaaccctaaacacaaaacccaaaaccgccagctgcgggaagaggacattgcgccgtctctgtcgtgtttgtgtactccggtgacaacactagcggcagccagggcggaaaggcggtggcaggatgcccgatatacattgtggagtttcacgacggcgacggagcatggctcctccagctgtgaggccaccaattcgacaccaactacatcggcacgtggctagaactccactccacctacacgctctgtcgcgtcatcgtgttgctcctcctcgcctccttccttgagcatgccaagaacgagcccaagatgtcgatcgatgtcgaatggatggccatgctcttgcagttgatgggctagacaagaacaactagctggatgggtggggcaccggatgagctggcgtgcgagcaggatcctgaggacgacgaggcacttgagtgccacaacggcattcctggcccgctgcatgacgctggcatgtggggcccatgtgggtctcgctcgccgcgtaagccaaaactgaccactatattgtcaagggatcaaagttgacacggtattttgagttgggggataggctataccggatattttggtttagggaagaattttaaacttggtgattgagatctaaagtgaacttcactactacaaaagcgatttttctatacaaagatctctttagattgcagatggaccgtaactggtcgcgtcggcaaaaatcgtcctcccattttcgtgtgaggccccttaagaatccgcctaaagtctaagtcccctcctcttttcccttctcaacactttaacatttttcatccttatcctctctctctccttgttatttcaaccttatccactcctcttctctctctcattcgctcatgcacaacgcccgatggtggcccggtgcacgatggtggtggcgcacgggggcggtgggctcggtgggtgccacttcaggcgcggggtggcgcgagcagctcggcggatgggagcaggcgcagcacgccacggcggcgacgggcaacgccagcacggcggccgggagcgatagcaagcgacagcgcggtggccgggagcggtggcgggcggcggcagcgcggccacacgctcccctagcagcggtgcccctcccccgtccggatccggcggtggaggggcagtggagaccacggagagaggcaacgacgacgacgagttgtggtggtgacgatggcaacgatgatgagcggggatgcagctaggttttc

SEQ ID NO: 27321 - DNA, 2419 bp, Oryza sativa
tcatgttcctcctactccttgagaattgagacctcgccgtccccccgtctccttcctgatcaacccagccacctccccacgtccatactccatcgccgttgctgcatactgctgcccacacggcgaggaatggcctcgtcgtgtttgtgcgccgtaatccaccacactatactccaccaccatgacaagactgacatcgatcactagcacgagctcgaggacaataacatcatgatgagaacaagtttaatagtagagctaactattggctatcagtttattttagatttaacatgtacttcaagattggctctatattttctctcctctctctttctcccatcttaaagtacgtgtattatagacaacacttcttatttttctttgtctctattttccatataatgttatagttgacttataatctactgttatctttgctctgagatggtatccaatggtatagcaactctttcctttaattattatcgttatttcctcatatttacggggtgctattttcctcagacaagaaagaaattaagtgaataggttcctcattatgtgtttttttacgattatttggttctttttttctaattaagggtacctgtttggtttgatatgaaaaacacatgaatcatatatctgtgtttttttagtttaatagtgtagacaaatttggttttttttaatacctacatatagaaaacaaattatgtaacaaacttaggaggacaaagtaaataaataatgtatgcaataaccccttagaaatcaagtgttatattccaattaattatgtacctattaagggcctgtttggcacaactcgaacttcaacttccacctctcgtgtagttggagctcagccaaacaatttcagcttcaccgaaaataggagcggaactaaatggagctctctcacaaaaaaatgaactagagatgtggagctgggtttaggcagctccacaactccactccaaacccaactcttgaagctaaacttaggagttggagctttaccaaacaagctctaactgtgcactacgttcctgattcctccttattttctaatgaaatctacaagactggggttgcaaaataaactctactcccatgtgtcaaatgctcacaaagtttcaggttacttgtccatttgagctcctttggaacgctaaaatctaaggctgatttcgttcacaggagataggagagactgcgactcgttttctgcgcatacacttttcaaactactaaacggtgcgtttttttgcaaaaaatttctatagaaaagttgctttaaaaaatcatattaatccatttttgaagattaaaatagttaatatactcaattaatcatgcgctaatggctcacctcgttttgcgtatcttcccaatcttctcaatcccctctccctcaaacacagcctaagaatacgggaatatgaaaaacacagaattgaaaatgttgcgttgaatcctactggtaacaaaagcatatgaattactcaaaacacaagtttggattgatacgcgggaaaaaatataggaattttgagattatatgtttacttaaacggagcgagagtggaaaggaaagagagattgcgttcgaattctcaaagtaaacaacaaaaacatgaggtttggacctcatgttcaggtctaggagtgtattccaaaggaattttgtaactccaaatcctaaaaacgaaacaacctcaaacggaaaagatcctaaggatttgaattctctatttttcctttggaaatcttccaatccaaagaagatcctgacattgcttttggcctactttgtgtgatggtgacagtttggatgtcgctttaaaaactactctagcttaattaatcatcattaacgaccgtgtctggctgcatggtacagtcgctacaactcagcgcggatgcgaaatactttgattgtgcggagtattgtgctgcagtcgtatgattgtttccaaaataaaaatactcccggcaccataaaaacaatttcgtaaaaaataaaggaaaaagtacgaattaccccccgaactatcgcggttgtccgaattaccccctgaaccacaaaatggacattcttcacccccaactatgaataccggacgaattaccccctcgacccaatccatggtggttttggtctacgtggcgtacacgtggcagtccagtcagcattctctttataaaaaaattatgggacctacctgtcatacactactctctcttctctctcttactctctctctcttctctctctcactcacgaggcacggcttcccctcctcccgtcacccacgaggcgcggcttcccccctccctcggcagcggcgggggatgaggagctcgccgccgctcgctcctgcctctgcgccgccctgccccgcctcctcca

SEQ ID NO: 27322 - DNA, 2333 bp, Oryza sativa
aaggcaaggccagttgcaagccacccggtccggctcctccgccactagtcgcccggtggcgcgggcaagctccgcatccacagtcgggcgctcgggtgagctccacctctgccgccggccgtcgagcgcatgtgcctcctcctcggcagtcgactgtccaagcgcgtgagcgtgagagagagagagagagatagcgcccgttgccgccgccgctcctaccgccatcgccaactgccaccgccgtcgccaactcggttcgaagagagagagagagctcaacaccttccccacctcaacacctcttagatcttggtggtggagggatcgatgagcgcgctgcgggcggctcaacctctacgagctcggggacgggcggtggctcgtcgtcatcaccctcatcccccgccgcagcctaccgccatgcgcgtaagagagagactgagagagtgaggatgagtgagagagagaggagagagagagagtgagtgagagagagaggggaatagtggaataggagtatgacatgtgggtcccataattttttataaagagaatgttgactgaactgtcacgtgtacgccacgtataccaaaaccaccgtggattgggtcgagggggtaattcgtccggtattcatagttgggggtgaagaatatccggttttatagttcgggggtaattcggatgaccgtgatagttcggggggtaattcgtactttttccaaaaataaataaaagggtcaaacttagacctgttggctgttgccatggcagatcagctagagtttgtttcaataaattcaagcatgcatatattggctaactaactgtgttttcagttcagcgtttggatgttatgaattttcaatggcatgtaaaatgagaaaagttattagccttagctataacaattaatcaagtattaattattatagatttaaaaatgagtttatttttaattttttttcacaaaacgtatcatttaaccgtttagaaaacgggctaatgaaaaatgagaaagttatattttagttgctacaagaactcatctaagtactcactcgcaggtacttctagccagcaaagaccatcatagctgatggggctcaacacgaggagcgagaaaaaaaaatcatcgaaaagaaacaaattatcaactccactttgagataaataaatgaacggtcggagcaaacggacaactcttaagctatcaaacgtcatcgaagctgcccaaaaataatcccctgtcaaacgctggtgatagctactgtacgttgctctatcatatgctcgcactagggcggggttaacatcagccgcgagctaccaccacggcacgcaggaaaatggcagatgcagaaaccaccagcagaggaacggctgcgacgcccggtccggaataccgcggccagccgaggttgcaagagaccagggcacacaaaacaaaacaccctatggagttcggagtattatgcatgtacatccatgacagattacatatttgcgtaacggatcttttgcattttgggacaactagtgtcatgtatatcattgtttggtccctactgttgctagttgcacttctcgcgatcacttgaaaaatagatttgacctcggtatctttgtgatataacaataaacctcatatcagtgatagatatacatggtattttaaacaaaacatggaaatgagacctttttatgaatgcaaaagttttataggattcttaccgacaatagcttaattcctaaggtttttttacgcttttcttttgtggctactttgtcaatcttacaatatattggcctaattgttcggaggggctcagtagataaaggaggtgtgtgttcgtagagatgagtgcgtgcgcgttgtgagcgtctacacttataccatgtttgtcaagatctcacttcatgttgtgagtgactgattcggctagggtttgccggtttggactttgaattgttttcttttgggccttatccagatacctgtagattgggtggtgcgcctgttctactggcctacttatcattgtgctatatccctagctcgagttggcgtgttaaaccacagctcagcttgttaagaaaatactacgagtcgacgtagtcgagccaagcgagccaacgagcgacgaacttttcgttccgcacacaaccctagtccaaatgcgctatttctcgaattcccagggtcccagtcgcaaaaccaccccccaagtcctcctccagtttccacgtccccgccgccgcagaccagactgggaaattcgccacaaatcctaggggcttcgccgcaaaaccagcaacccaacaccaccccc

SEQ ID NO: 27323 - DNA, 5546 bp, Oryza sativa
  unsure (1)..(5546): unsure at all n locations
ttccacccccgaaaccactccaaaaccaaaccaaatctcgcggcgcatggcggcggcggcggtggcggcgaacggcggcggcgacggcgcgcaggcgtccaacgcgcccgcccccaccaggctcgcgtcggtctacagcgaggtgcagaccagccgcctcaagcacgcgctccccctcccctccgtcctccgctcccccttcgccctcgccgacggccccgccagctccgccgccggcaaccccggtcagtcccgagcccgactcttctgtggatctcgccctcctcctgcttggttggtgttcgttactggtgtgagctttagatttgatctggttgtggtggtggtggtgtgcaggtgagatcgcgaagctgttccccaacctgttcggccagccgtccgtgtcgctggtgccgtcgccggagccggcgtccaccaggccgctcaaggtcggcgtcgtgctctccggcggtcaggcgcccggcggccacaatgtcatctgcggcatcttcggtgagtgcgctagtgttctcgagctgtttgttaaccctgtttacccaaggctatggaggatcagttctctgtacaagcgaatttgaagctcgtggtttcgagatgggggtgttcgcgatctggatagggnaanttcngtgnngtntnttntnaagctagttagagttggtgttctccaaacaagctttggcatcgaacgcgcacagttcttagatcttgatcgattttggttgtttagcgagggccagaattaagagatctgcttattttttgattgtgagttgtgtcccggttgcactgaaaaatcgaataggcactaatgatatattgtggttccaaatatatttcttgatgaatttgcttgccttgtgtcggaccagattacctgcaggaatatgcaaaaggatccgtcatgtatggattcaagggaggtccagctggagtcatgaagtgcaagtacgttgagctcactgcggattatgtgtacccctacagaaaccaggtatagcaacttagattcactaagcatgctattgggtcgaaaattcgacaggtgcctattctctgattttctgtaaatcatgttagtttagtaggtggtgttaggtaaggttctggtgtagaaaatatgataagaccctttttttggtgcaaataattacattctcattttcttttttggagtatgatcatgctaggtgtcaagtactgctgatggttaggtcgctgcatgaaatatacacacttttcctttttaaggggctctcttatttcaggtacgattttaattttgtttctctttttgatagggtggatttgatatgatctgcagtggtagggacaagattgaaacaccagagcaggtatatctttgcgcttttatgtgcaaatgcttatttaatccctttatctgcctttcagggtatttggctattttgttgcctagtttcactagcattttcttattttaaattctgtcatgtatttgagcagttcaagcaagctgaagacactgtaaacaaacttgatttggatgggcttgttgtcattggtggtgatgattcaaacacaaacgcatgccttcttgctgagtacttcaggttggcccctaatatgtgtaaccctgttcttttgcttcttaggcaattttctttagttgctgttgacaaagacctttgtgtactgttgatgctctgtcaactgtaaacaggtcaattccgaaaggaaatacagaaaaaagttttccaaacagtaacaaaaagctcttatttttgttgtatgttgctgaagcatattttctgcatgatgttttctgttaaacaagcattaagtctgcaatagcattgagccattaactgaattctgcaacatagagaatctagatattattctcgatagttttattggcaatattaactatatgcttgttgacaagtgagtgattgtttaactttgtagggggaagaacatgaaaactcgtgtcattggttgcccaaagactattgatggagatctgaaatgcaaggaggttccaacaagctttgggtttgacactgcttgcaaggtatcaggttcttgatccttgtgcatcagttttcaaaatttcagctaattctactgtagattgtgaagttttcacccttatgaccttgatgcacttgctcaactgcacatggtgaaattaggacattttgcacataatatgaaaatcatcacggcaataataacaagttgacgatttttcctcaaaaaagttaacgattgatccatcttctttttcagatatactctgaaatgattggtaatgttatgactgatgcacgctcaaccgggaagtactaccactgtaagtttctgttttggttgtcagacatatgccaaactatgatttttgttttcctaaacatggaaagagagttgataggagcaaactatgtttagtttgaagagatcatggataataattgccaacagtagctgtacatggctattaaagtatactgtcatttagtttatccataactaaattgaagaaggtcattacatgctcagcaacctagtaaagtagtatttattttttcgtacattatacaacaaggcctcaaacatcctcataatgctgtaacaacatgctgctaacatataaaatccttgagtgtcaacttctgcagatggttaatttaacattattttgtctatttctgacacaatactaataagtatttgttatgttcatgtagttgtgaggcttatgggacgtgctgcttctcacattacattggagtgtgctctgcaaacacatcctaatgttgcactcattggagaagaggtttgtaattcttatatatgatcttctacattgacctgacactccaaccttttcctagcttgaatactgttccataatggtggaatcatctattcatttcgattcatgtttatttcatgctgatttcatttacactttttcctaccaaatgtgatgggcatgattggggctagtccactaggccttattgaggttcgttgtccctggacccagttggtgttgcatttccatggaagtcagcatcacaatcacaagggcaagcggtagatagacaatggacacttgtttttctgtcaatgctaacaactacaataggtctcctttaaagcggattattgtaacaattgtatatacgttaatactactgcagtatgttgctgtacagtaacattgcaggtcccaattcggtgttggcacatagcacaaacctcgtactttatatcacagtttggtactaaaaattgactcgagtaaaatgttgctggagatgatctgcagtttttctaaagtgcacatggcatattgtttgcttattatcattaccatttcagaacacttcttttttgtactgtaggttgctgcaaagaaggaaactcttaaaagtgtcaccgactacattaccgacattgtctgcaagcgtgcagaacttggttacaactatggtgtgatccttatcccagagggtctgattgatttcatcccagaggtttgacaatcttcattcacctgtgatttgtgttgtcacgatttgcattactgatttcattctgtttctttcctaggttcaaaaactcattgcagaattgaatgaaattttggcgcatgatgttgttgatgaggcaggggcttggaaaagcaagcttcaaccagaatccaggcaactgtttgacttcctgcccaaaaccatccaggagcaacttttgcttgaaagagatcctcatggaaatgttcaggtaaacagttatagtcctcccttcgctgacatgactttttgctgaagagttggtcatactaagtccctaactggtgttggaaatttttgtttttaggttgcaaaaattgaaacagagaaaatgcttattgccatggttgagactgaattggagaagagaaaagctgaggggaagtaccccgcacatttcagaggccaatctcacttctttgggtatgtatgaattgttgcattttccaaaaaaataattccatctctaatgctgttgctgtgtaattttgcagatatgaaggaagatgtggccttcctactatttttgattctaactattgctatgcgttaggctacggttctggggcacttctccaatgtgggaagacaggactgattacgtcggtatgcacactatagttccctgtcacttgttggatacccagattggaacctaagaacgggctttgtggaagtgatgtttgcagcatgtttgtttacgaaccagcgcaggcagatgaacttctaatgatatgatcatgctcttatgtttgtatttttactcaggttggcaacctcgctgctcctgtggaagaatggaccgttggtggaactgcattgacatcgttgatggatgttgagaggaggcacggtaggtttctacagttccgttgtttgcacttggagattagctagctatgtttcattaaatttcttttgaccgtttattcaaatacctactatgtgattaaatcttcaagttacttttggaactaatttgggtcagattttcatataatatgcattgcattacctgtcatttccttgtttaaatcataaaactaatgtttttttttgttttctgcaatcaggaaagtacaagccagtgatcaagaaggctatggtggaacttgacggtacgaagcacttctattatcaacgctaacagtaatgtgatttatggacctttacccaaaatctcatttcatctatcatccattttcaggggcaccgtttaagaagtttgcttcattgcgagatgagtggtccctcaagaaccattacatcagccctggtacgtggacatgcaatagctagcaagtagtgcaaaatgactataacagcaacatagagaacaatgacatgtttaatttcttgcgaaacaggtcccatccagttcagtggccctggaagcaacgatgcgaaccacaccttgatgttggaactcggcgccgaggcatagagagacacgacgataccgacgtgtaccttttaaattttttgttcttacagttttgaaaagttgagatggaacctcgcagagtgacctgcaggctccatatttgtggagtgctcaataagaggttccattgggagtttctgtggagtagagatatgtgtaccaataataactgatgttagctttgcatgatccattgctccatttttacacagaagttaacttggttttattgtagctctgggttttgttcaactggatgcgacgctataattatgggttttgttcaactggatgcgacgctataattatgaacataaataatccaggttgaggggcggttttggttttctttacttgttattatctcatctatgttcatacatactcgttgacgatcgaccgtcggcatcagtttgcgttaagcttaaagctaaccatagcagtattctcgccctttctccaattccaaaggtcatttttgcatgcacattgtggacgcccttacaatctcattgctt

SEQ ID NO: 27324 - DNA, 21266 bp, Oryza sativa
tcagcctccgcccccgccaccgccgccgccgcgccgaggttgccgccttcagccgcctgaccgtgagagaaagaggaagagtgaggagagtgagagagagaagagagaggaagagcgagagagagagtgtgtatgacaggtgggtcccacatttttaaaaatatagaatgctgactggactgccacgtgtacgccacgtagaccaaaaccaccgcggattgggtcgaggggggtaattcgtccggtttgtatagttgggggtgaagaacgtccgattttgtggttcagggggtaattcggacgatcgcgatagttcgggggataattcgtactttttccttcaattaacttttgtttgcaagacaattcagacatgaatgcagatgcagctcatggttcggtttgttcgatgctagggattttcacgctttgtgtttcaatgtacttaccactccgtactattcatcttaaaactttaaactcatcctatcttgatgttttgacttcaaggttttaactataggatattgcatgatgttacttttagaagaaaacacttttaaatgtgaaaatttgctgctggacaccacattaattataatattcatttctggtttaataggaaagaaaccgcgtgaaagttttgaaacatgtcatgtttccatctcctttgtttctcttagctctctctcgttctcggccggcgagcatgcaatacagatgaagttagctttgccagcaagcattgaggcagcgcaaatccgcaacgctaggagcgggactgggtcctagtgttgccagcaagcaccgggtcctcttgcggcaattaaagatttaaatctccggctatagctgccgctaagatatgccacttttaccgctaaataatctatgaagctaatagctgggtttagcgagagatagccgctaaattggccttgagttagcggcatgcgacagctaaactttggttgtgggttgaaattggctacgggcctaaggcccatctacctctcctataaccctaacctcactctctctcctctcctcgatagatggcgacagtagctgcgcccggagccctaaaggcagcggctatggcttcgccctaaggcgacggagttggcggcttctacagcgcgtggcggcagtttcatgcggaggctgcaacggtggcagttacgctcgtaggcggcggagttggcggctgcggcttcgcccgtaggcgacgcctacacgcggtggctgcgatggcggtggcggcggccaccgtgcccgaaggctgtgacaatggcccactcctcccccaagctggtaagtgatcctgatcttgaatatgcaactactagctagtaattgattctgatcttgaccttcctgtgataaactgatgattgatgaactatttatgtcaagaactcatgtgtcaatttatcatgtactcatgttcatgtatgaactatgaaaaaattatcatgtccatgtgatgaaatgtgttgtactatttattttgttcatgtgatgacctatttattctgtgactcctttatagtttttgcaaaacagctaaatagcttagctgcaactataccccgctatagctaatcatagctgttgaaagcccaaacagctaaaggccttagccgaagatttaattccttggcggcaactgttccagggaggcgaacacgtcaacgacgatgacgctagataggacggtattgttagtggcaggtcccccagatggatcaggttgcgcaatggcacgagctagtgccaacctaagcggcaagcttcgcagcaagcggccgcggatccagttggagagtttgcatggcgtgagcgtggatctaggcggggagctccaggtctggcgtaggccacctctgcggccaccgcctctcttctctcctccattcctcagtggctgtcttgagccttcttctctagctcacagaaggagatgtagacttgacatgtgggtctaggggtctttcagaactttcatgtggtttctctcctattgaatcggaaataaatattatattgggtatgctgtgtagcagtaattttttcatatttcgggagtgtcttccctgaaaagtcacttcgtgccatgccttacaactaaaaccgcaaatatgttttttttagcaaaatttgcctatcttaatataccccatatgtccaaaagtattaaacatattttattttctgatttttctcaaataatatattcatatttgtagtctctgtgcatttaagacttaaatacaaagatagattaaatgaacccaagtagccatcttaggtcttgtttgatggagtttaagatcctgaggagcggctagttggcttttaactcattttgtggattttgtaactacacatttttataatatagatgaaaatttggattgtttgaaggagtttttattctgaaagaaattgcagctaccaaaaactttcttaaatatacccttaatatttattggtttcatacatttatacactctttggtcttaggatgagagttggtttctccttagtttcgatgataaaagaaataaatctaagactttaatatagaagtcgtaataattggttgaaagtatgctgcataaagacaagtgaaaccttttttttagcctagcctcgtaggctaactatttttttaaactaggctaaccattaaatagaagtcaaaattgaaacaaaaattgtccatatcgacaaacatttggaaagggagccgagttcatccatatgccaaaggggttcccaaatgctgtgctaaggatgacgacagaaatgcaggataaaaggctgacacgttcgtgtgcttgccgctttggagtctgctttttcttggatctcggtctctctttagattccatacacatgcagcaacattgcaacaatcttttctgccccctctttagttcccaacttcagtggccgtgagttcacttcttattcaaccaatcctttgttgcattgtacagtactagaaatagtggcgcgctgcgctgcgccagtcaatgatgtcactgaacaattaatatataattactctaaggtccaagagaactacaaactaaacattgaattaagcataacaatcacaacacatcaaagaggcttactaattaccattaacctgtatacaacacagaaggttataaatttgctttattagttacgaaataatttcagaacattttacactggtacactccagcaatgaaatgcactcacccaacatctaaactactctcccccactgatggaaagtatattggatatgctttgtgtggcatatattactgctgaaaactccctcccaagtagtcctacaacagtaaaagaaagaagattagtctatgcttgccgatgacaatggtttgaaggttgacaaattaagtaatgaattttacaatcccataggaaagtatactacagttatcctgcattcagtcaaaattataacaccttttggggagctctgttatctctctatcatatcaagttatcaacagcggtgaaaggaacaaccacgcagttgcgatgctaaaataacttttcttgctcaaattttgaggtgctagtgctagtaaaagtgttttctgcatttaagagaagaaaatggatgggcatatggttggattggaaaactttaactatgcggtaatttactctatatatttgagaaaactaattaagtagcatatagaaagagctagtttacccaattaatgcatttaaactgactattcattgatgcaaataggtggcattaattgtatggacaaagattctttttatagttcaaggtgaatcaccaggataccacatctatcctaccatcactccttagtgggatgtaggaaatcatctctattttgaactgcaaatactttgcgactattctgagctcatagctagtaattcagttttaaaagacggatagctgaatataattatgaaaacttcaataattccatcaaaataggtattgcagaaggcctggatgagtaaaattaaaataaaaagttataactcacaatagagaaggatgatagggaaatggaagggaaaaaatatcctgcagacaaatatacaccatattagcatgcaacccaaaattgagcatattaaccattcaatgatctaccagctaagagaattaaaagtgtaaagaaggatctaatccatttggtccaatgatatatagcaatgctaggataagtatagcagtcgtacaacaaaaatactgaaaatggcatgtagatagtagagtatcgaagcaaatcggatcttcctgcatataaatcatccatttaacttaaaatctagttctattagtaccaaatctaagtcatctagaaactacattaagaactaagtgggcagagagagcaaacatacaaagaaaaatgctaatcagtaagtgactgaaagcctacctaatgcttgaaatacaaagagcatcaaaacacatattatctgtacattatctataagagctcctctgacgttacatatcatgcaatttgaaatgtcccatttgaattatatgactttatgtagaattgcaacacatttttttgctatgacttgtccacacaatagaaaaatggtaacataagcatatgctatttttatttcgatgttgaatttgaaaaatagaacatatcagtcggctagttcgtacaattgcttccatgtaggaaaatataatatgtcaaagagtagtgaagtattatcaatgcaaaacagctttaagttcagttaaccaataaatttgaaagcagcaacagtaccaaaacacataagtcctgatagtataagttggtgatctgccttagtatggatttgttccctcacacgcgctctttgcaaacacctagaacattgtccctctgtaaaaagcacattatgcatatcctccctgcagccaagtttagaaaataaattgttgattcaatattaagatgcaaaattaggatcaggggatattcatagatcgatccaggtttttatttaatgatggataaagatggtaccagtcagtagctgcatgacgtaggagacggtgatggccccagcagctgagttgatgaactcggcagactgtttgtcgaagtaatgaatgacgacttgaactatgtaactaaacaaaatggtattcatgcaaatggggaatgatggagtgaaggtgaagtagaagaaacagggttggaagggaagactgggcataggtgttcaccttgaaaggagagacggtagatcagcttgtttgaacaacagcagcgcctgacgatggagacggatacgccctggacgcttcaggagttggcatccggaaggctcaaaggattcgcatgagatggggaaataccacatctcgagctcgagctcgcagaccatcgagatgatgctatctattgatgctgcccctatggcaatcgatgtgggacgaactgccatcgatgggctgacgacgatggaggaaaaagcctgcaaggacgcgagaagagtgagaagaagagaaggggagggaaagagaggggcacgcatgccatgccctcactccgttgcgcgaggcggggaaccggtggcgtgcgcggatgcgtcgccgtccgcccgcgagagggctacgacagcgtggcggcggatgaggccatatgtgagcgggccgcgagcgctgctagggttttggctgtgtggggatatgttgggaagatcttgaccgtctgttgtcctctcgtcgatctgatggtggtggaagagccggcaccgtaggccaggtggacgactggatcgatcccaatgcggcatcgaacggcgccatggtaggtgaaactcggacgtgattaaccggaagaacagggttcgaacgcaattaaccggaagaacggggtatttttggaaaaaaaaaccgatgacatggcgccttaattttccagcactcccacgacgtttagagagattaatataatcgtattgttcagtactgtaaatatctctgaatgaataaatatacatgaatttcacaaggtatgtagttaaaaaaaaagaaaattattcgtggtaaagccattatctagatttctcggaagtctatttgggagggtagtgcttactccctctgtactcgtaaaggaagtcgtttaggacaatgtttaagtcaaaccttgggaatataaatcatgaataactctcaagttgttgagtttgaaaatgtaaaaattatatgaataaatttgtcttgaaaaatactttcataaaagtatacatatatcacttttcaataaatatttttatagaaacaagaagtcaaagttgtgttttagagactgtgtcgctgtccaaaacgacttcctttatgagtactgagggagtatttcccagtcttcctctctcttatgtttcaggagttggacttttaacaaaatagacctagctttttttaggtttccttttctgttttgttcccctgttgagatggtcggtccgatcttcgtgttgtgtaacaaactttcaaaacttcttctaatatattaacatgcatgtaaggtttttgcgcgttcgcgaaaaaagacattatttaggcttcttgaactactctcgattatttgatattgttaatagttaaattgggagcactaataataggatacaaatctgagcctctacataacacacacagcccgttctcaaggatgttcgagaacaatctttggctctagaaccgaaccattttttggtattgtacacaagcaaattaaagcattaagttctagctggtgatggatcgatgagccatgcgatgttgacgagctgttcaattagatgtcgttcattcctttctgagcaatggtgctgttctttccttacattctgttgttaataagtgcagaattaactactgatgaaatacgaatcgactaattttattaagattgcatgataaaacagataatttgagactcatatagtatttgaagcaatcgaataattcagacgtcaatgccaatcaaatgtataatttggataaaaactttcacccctaaatcccgcattgtgcttcacccctacttggtgcatttggagcttaggtggctgcagctggccaaaatattcaaccaatttggagcttggagctttgggagaagtggttcttctgttctttttttgtttaaatatgtaacttttattcaaccgatatgctcttgaaatttggccacgcccacatccaatgcctaggaggaaaagcaaatacaatgtatttaggcataaatcattgactcgagaaaggcatctctaatgatccaacttagcatgggcacaattttctttaaaacctcatcaaggtgtacttgtattaagaaggagggaacactgtacaatagccttatgggctaggagttacatgtaagaaaaaaagaaaagaagaaaaaggggattggaaggactatgggatgtccaacatgtccgagtttacagttgctttgttaagattatatgtagtgccaccttgttcgtttggcatcagggacttgatgccttttgctccacccgcatgccagaataaaatctcgtcggtcaccctatctatgatccgttgtagcggtagcttttcattcctgaattctcggttgttcctcttcctccatatttcctaggatactaggatgagaattgacttgatgcctgctcttttttttcctttgttgtcgctttgacgttttggctccaccattcctcaagggatggtgtgtcaaaccaaattctacggtttttgttggaggaggtgggtccgtgttgccactgtgtcctagactttcatggttgttggacactcattgaagaggtgatgtgccgttccgaggttcctccagaagaactgacataagtagttgttgggccattctttttgtagatcgtccaaatcatgttttgtagtagtagccatgcaaagaacttgaatttcgacggcgcccaacacttccacaccatacttgctatggccaagggggccccgccaagggattgcatctggtacgccaatttgacaatgcattatctatttctcttgactgtccatttctagcggatgctatccgcagtcccttgcgttagcgtgatgtttgcggtccatatgcattcaaacacttggaagaattcagcgacgagtgttatggactggtcgtgtctaatgtcatcaatctattcatcaccttttagggcctctgggactgcctgtttcttccttcttgagtgtttgtataggtttggggcgattgttctgagggggatactagaggctcaggttgtttttcaagagagtgcctttctgccgtctcccaaaaaacctttgtagaggctacaaatagatccatgtcttgttcgtcccctggtgtgggcatgcctatccatggtttgttcgagctaatccactcataccatagctagcgtagctggagcgctcgtccttttttattttttaacgttagagactctggatccaccatacttgatcagcatgcagacccttccaatacactttgcacttgcctccatggatctcattgcctccatcccatcccattggaattttctcctggctttgtcaatttcctaggtgagttgcttgggatcttgaacgttgtcattgatacagaccggcattgagcttaggactactaggaccagttctctctttcctaacaggtgctcaattgagttaattaatacatgaatttgtagaacaaacatactcaaaagccacctagtacaaattaaagttgactgatactatcgtactgtcaacagtgacgttgacagtgaatcatctcttgcaacgacagatgactccaatgtcactgtccaaaaatactcctgccgaaccgctgtaaacacacagtggcgatctacccctccatctccatggccgtttctgaataaatctccagacctaacaccaccatgttccattgaatgagaaaacgggcagtaagtttctgcaggagagaccaagcattgcaggcctaattctagcctccggccactacgacatcgcagccaaggtgtttagatccagcgatataaagttttggcgtattatatagggtgtcgcatggggtgtttagggaaacggatcctctattgtagagctaatactgcacaggtgctatagcgatcaaagcaagccatccgattagattaagcggctctgattccgtccttaaacaccgaaaatatttttgataatttggaagctaacaaactgattttaaggaggaaaagtcaagatcaccttgatggagggaaaatcatgaatcctccagagtacttggcgccaaattaatacaggttctccttttgctttcttcctccttgggacttggtgccaaaaggagatacagaggtttcactttgccttgttctgtccagaaactttgatgatcagataaagtaagccatcagtctccaacaaacaggtatgtatgccatgtcttgtactctttttgtgatcatgtcctcacaaaaaaaaaaaaaccaaaagcattgttgtgtgattcttatgattggagtggatacactctacactcgtgtagcgctaaacagagtatacctacagatctgaggccttatggcgaacgactcaaactccaaccatcataattcaaataggtgagatcaatttcattcaggtcaacatagttttatcatctacatttttcttttctctgactatgttgttgatctcattactgaaaaggatcttaataatgaccacatagcaatccatatttaacactgtatttctttgttgtaaaaaaaaaagagttgatccctgtttctttttacaacacaaatataattcctagttggattcctcaatttggcatgaaatttaaatctacaaaagaggcatgggaattttggacttattatggaggtcgtactggttttgatgttaggataaattatgaaaataagagtaaagttgatggagtaattacttctgcaagatatgtttgttccaatgagggataccgggcaatagacaaaagagatcacaacaccaagcgtcctcgtgctgaaacaagaacaggttgcaaagctcggatcagaatcacagtagatagagaagtgggcgattattcagtatatgatttagttcttgaacataaccatgaacttcaattgccttcaacatgccatttgatgccatcacagagaaagatatcatcattgcaagcatttgaaattgaaacaatggatgattcgggcattggaccaaaagctgcacatgagcttgctagtcggcaagttggtggttcagtaaaccttggttatacacgtcgtgttctcaagaaccatttacgaaccaagcgtcaaagggagttgatgtatggcgaagccggaagtatgttgaagtacttttaggacaaagttgcagagaacacttcatttcattatgcccttcagttggattgtgaagaacaaataacaaatattttttgggctgatgctaagatgataatcgactatgctcagtttggagatgttgttacttttgacacaacatttgggacaaacaaagaatacatgccctttggtgtctttgttggattcaaccattttagagagaccgtcatttttggagccgctcttttgtatgatgaaacatttgattctttcaaatggttgtttgagacctttttagctgtacataatcaaaaacagcctacaacaatctacacagatcaagatattgcaatgggaaaggcaattgaggtggtatttacagaagcatggcatggattgtgcacttttcatataatgcaaaatgctatcaaacacttacctcgtaccaagaaagaagacaaacattttgtctgatttcagtgcttgtatgtatgaatatgaagatgaagcaacttttgaggaaactttcagtaccatcagaagcaaggtgcacaagcagacttggctaaacagtatatataaggtaaaagagaaatgggcggaatgctacatgaggaatgtttacacattagggatgagaagcacacagttgagtgagagcttaaataatgacttgaaaaaccatctcaagtctgatcttgacattattcagtttttcaataatcttgaaagagttatcaaaggaaaacgagacaacgaattagatgcagaatatgaagcaagaaaaaaattgcctagaattaaaatgagagttcctatattggtgcaagcaagcaagatttacacaccttgtatatttgaatattttcaaaatgaatatgaaagatccatggctgcatacatcaagtcatcagaacataatgaattcattgttgcaattgaggctcctggtgaagcgtcaacatttgaagaggagtgcaaagttgtaggcaattatgcagagcaacaggcattgtgcacctgtggacaatttgaaaggactggaatattgtgcagtcatgctttgaaagtccttgatgtgatgaatattaagtctttgccaaagagatatattttgaagcgatggactcgagaagcacgagttggtgctattgaggactgttatggcaagattgtcgtataagatcccagattggaggataggtgccgcttgaagtttcttattcacaaatttcttggtatagctattcgagctgctgaatctgaagagtgcagcacactagtggacagtgttctagagagcatgaggaaagaagttgatgaaaaaacacctaatagtcaactaggtgaagttgcatctgaagaagcaaacggctctttgcacactgcacgtctgaagaaaaaagaaactcaaaagtgtagcacaaggagaaagaaaaattggcttgataagcagcatcccaccaaaaagaaggtacaagttgtacctgacaaacaaaatatctcggtatgttacttacgaactattcaattagactatatatgtactgattatatatagagtaatattttatctggatggttttgcttagcagcaagcgaaggattgttccatagcacagaaccaaattctggtggagaagactaatggaacgaatgagaagggatctgaagaatatggatggatcaatagctatgcagaactactgagggtattccacttatatatactaaaacttatatatttagtgcatactgtctagcagcatcaatattatttttctaattactctaattcattgtatagggtgatggcatggagcagaacatatttgatactacctggaattttgggttcaatgcaaattttgatgggagatagctagatgcctgggtatcaaattgagaataacaaatcaagccattgaacatttacttttgagaacatccattcattttttttcaatgccacagaaaatttatgctatgcattcttctgtcagtgtttagtactgaaactatttgcacacatgcaagtacctttgtacatgtttctatcagagcattgtgtttaatcttcctgaaaccttttcttcagagcactattttatagagggtgtaaatgaacgatgcaacttttttagtgttacacaacttttttagtgttacactttggaataagtgtagacttcatagtgaggcgatgctctgcttatgatattgtctacacagtgaggcgatgctctgcttatgatatttgtagaatatgtgaaatgggaggcatatcgttagatgaacagcacatcatatatgtataaacagagtctgaagctttcatggccttagccatgtaactgtcaagtaagtggtgggcagattgagcagaatcagagccatccaatgtaatctgatggcttcatttgatcgctacagcacctatgcagtattaactgtccagtagacgatccgtttccgggtggttaggcactaataaaaaatatttactgtagcaccacataattacaaaattcgtcagtaaaccacgagacgaatttattaagcctaattaatccgtcattagaaaatgtttgctgtaacaccacgaatcggaggcgatcgacctcgctgcgtggcagcagcgagcgacaggtgatttttactgcgggcacgtagtacgccggcggggatgcatgcacacctgaattcagtggccagcgttatggagaggtaccaatgcaaggacagtaatggcggccatattcggcgcctgtgagcatgtttaggaaagtttctgtcagctacaattttttctataatcaaaagctttcttaaatagtttagcatttttatctaaattctaggaatttgcagttactgaatttaaaaaataaactagaagctgagaaatcagcttatttagattctcagaaactggccactaataaactaattctcagaatcgagaatggtgctacagtgtgtcaagtcagtggcggatccagaaaagtttcagagtctagacaaatcttatgacattaagggtgtgtttagttctttgggtgtaaaatttttgacgtatacggacacatatttgaagtattaaacatagactaataagggcatatataaagatagagacaggtatgagctctacgctatctagagactaacatcctacaacagttggggacaatatggtctctatcattaatgtatcaaaatatttttatcaaactcttctttcctttttttcaccaccatgcaacaaaatttactctaataaatactaagagtcgactctgaaccgttgtcatgcataacaaccatatttctctttcctcctttctctttcttccatgtcatcaaatttacttgcatggtaataaaaaaaagatcattgtacatgccctaacaaaacaattgtacatgccctaacaaaacaatttacagattatgcctgtaaattacgatacgtatttattaagtctaattaattcgtcattagcaaatatttactgtagcatcacattgtcaaatcatggcgtaattaggctcaaaagattcgtctcgcaatttctatgtaaactgtacaattgattttttttcatccacatttaatgctccatgcatgtatccaaactttgatgtgacgttttttgccaaatttttttggaatctaaacaaggcctaagtgtttgcctaagtgtttgttacaaaaattttgtttccgtttataggaaaacattcaaattctattgcgcgatccgccctggtcgagcgtggctggcaaagtatagaatgatggggagagcattttgcttcagattgtatgtctgtgtagggaaattatttgtggcagtcagctatcaaattggttctcgcttataagtcgtcgggaaaaaaaaaattcgcgccaaacacccattcataaataggccaattttcctaagtagattataagttttttgaattggttggtgcgtgcaccttatttaaaaatcattgtgcggctcaattatccccacgatcttagggcaacaaatggcatcgttgcataaaaattgtaagggcaaggatattattccactcctttttaccagaaaagatattacccatttaaaacatcctcaatatctaggttcatcccttccaagcacaataaaacatctctaatactaagggtgtgctcttttcagcttataaattagattctactattttccgttagcacgcttttcaaactgctaaacggtaatttcgtgcgaaaactttctataaaaaagttgttaaaaaaatccaacaaatttattcataaaaaatatatattaatacttaattaatcatatgctaatcgtatttctcgttttacgtgcggctaaactgtccaccgccactgctgaaacgatcgcaccctaagactcgggtcctatgtaaatgtcaggttggatcctatttataatttggcacattttttaaataaaaaattgggtgttaattgtgtccatttacaaattacaacatgggagtattttgtgtcggtgtaggcaggcaggtgcatgatgcctggatgatcataaaacaacattggattctctggctaacaacatcacctaattagtagtactagtatttgcgatgacgaaaacaagcactacctgaaaatgacttatctctacaatatgcaccatcaatccatccatcatcaccaccaatttaccaatgtcaatggttggctttttcatctttcttttccatcatgctgatgttttccatgtgacatttgtgtaagagaggatatattaattaggggtagtagatgctcatcagtggacagatggaggagttcatcacacttcatgccgggggggggggtaaaaaaagaaaagaaaagcaaagtgagaaggtgaagcaagggacaaaagaaaacagacaatgatcagttgcactgcagtggtagtgcacttggcttgcagtttcaattctctagctgttcattagttggttgcctccagcctggacctgacttgtgatcctgtctttgtataaagtggatcaactttggcatataactggtcatatactactttacactaaactaggcttctcatttttgttgcttcaagccttctactatagtatgagctagcatcatctattcagctcttcatcagtagagctgattgtgtagtggcctagtagtaagtagtaggtaagttattataggcacatcctgtttagattgcaaggaacctaactaccaacccaacaaaatgattttgacttaatcaatacttaaaaggaaaactagttcagaattagaactgacctcaaattctgaatgtaccttttgtttcaaatgatttggaagcaggcgggaaaccaatgggcagatgttgtaggagaactttgaagcctcctgtcacaagtctcttgtgtggagcattgatttctgaccaaaaacttgatacaagtgaaatgaattcagagagtatgacatggattgttctcaatcaggggccgggagaagaattcagtgcatgaggacaaggttgaattgatgatggagaaggcatccaaagataggaattgtagcctcacagtttcagcaccatcaatcaccagtttcatcacatttcaatttggtgtttgcccccagttttgaattcgacagaaatgccagccagctgcattcagtttgtgctcttcagtcttcacatgatcggcatgtttggtttgaactttgggcatttcaagaataggagatccaatgtagaacttcatatctgatagaacaaaatggttctgctccaggttcaatccaattcagactcagatcatatactaatttgagatcatgaacacatcacataggaatgaaagaataatcaataattgaacaaaaattccaggtctttcctaccaaagaattgtacaccgccaatcgagcgaattgggaaccccaagaatcaccacccaaaagaatcaaaatcccccccaaataaccaatctgaattccgccgaaaagaacaagatcatcttttctctctatccattctccccccatcctcgcgcggcaatcgccgcggcctcccttcaccgccctgtacagccgatggcgaggggtggcttagctcacggcggcaacagcagcagcaatgcaatgcaatgccatggaggatcaccattgcaattgccatgaacccgcgcaaccaacaaaagaattattgtgtcccagtatggcactacagctagagatcctcaatttctaccaagagaacaccaatgcgggccacgtcgtcgacgtcgacgacaacgccggcccggacgccggcgaggaggcggcggcgccgtcgtccccggcaacgtagaggtcgtaggacttccaggtgtggtcgagcgggcacgggttgccggcgtcgaggcggtcccatggcttccccttgcctgaccagtgcatgaggctgaccggcccgtcgtggagcgggcggcagctgccgcgcacgttgtcgccgccgaggccgtgctggttccagcggtggtcgacggcctcgacctcgccggcgaagacgaggaggaagggcggcagcgagcccagctcgtagatgcgcttctccttctggatctccatccaccgctcgatgcggtggcggtagttgccggcgcgccagcggcggaggtcgatgaccatgacgccggtgttgaagtagcagggcgggcggcggcggccggcgaagacgcggcggccgaggcctgggtcggaccagaacgccggggtgaagtagcgggagaagttggcgtggcagtactcgggcgccgcgacgacggcggcggcggggaggcgcgtctcccagaggcgccgcacgtcgtcgacggcgagcacgtcggagtcgaggtagatcgcgcggggcacgcagcgcgggagcaggtcggcgaggtggttccgcgcgtagttgagcggcgactccagcgcggcgcgcacggacgccgagatgagccccgccacggcctccgccctgaacgcgtagatctcgaaccgcagcgacgggaacgacgccgccacggcgcgccgcaggtcaccaccacccccaacctcctcctcctccgccaagaagtggaagaagagcgactccgggcaggaggcgtgcttgagcagcgagtacaccgccgccatggacccgcgcaggtagtgcgcgtccagcgtcatcgagatgtgcaccagcccagcgtcacacacccccgccgccgccgtcgccgccgcgggacacccttccccgttcctgtactccggcgcctcagcgaacctcggcagcgccgccgcctgagcgcagacggccagcagcagcgccaccgcagccgccgccgccgcggcccgcgccggcatcgcggtttcttggattcttgcagcctcctcctcctcgtcccgtggtggtggtggtggtgggagcagcagcagcagcagcagtaatggtgggcagcgagtggtcggtgaggcgtcgtatgtatttctctttgtgtctgcgcgtcgcgtggatggatggatggatgacagctgagctcggtgcgcgtttctccgagggggagacgaacggtgtggtgttagcaattcggacgaggggttttaatcccttgcgtgattgggatacgcgttaattagccgctctgtccctctatctcatctcattttaaggttagcggtagatttatatgtctagtgtttaatcgtttggcttatttaaacttttatgataatatttttattactacttcttccgtttttatgatataagagattttaggtgaatatgacacatacaaatatagagtatatctaggttcgtagtattataatgtatcacatccatctaaaatctcttatattatggaataaagcgagtagataataaaatataaataatactttatgtatgacttattatatatatatatatatatatttggactattaacgtgctggttcagccatgtgttgtgctccagttgtgtgcatctttcttctttctttttttgggatttccaaggcttgattgtcttgatagctgttgcgcatttgcatgttctaaagaatatttgtgccgttgtaatttgggttgtatttattctagccgacacatgtagatggtgggtgaatttctagagcggaccatgggtgactcgagtatcataatattatatatctgagctgtggtttgattcgtgttatacattaaaaatattcgtctgactatcatatgtatgcttatgtcatttttactattttgattcacatctcttggctatggtgacatctttcaagactatcttagtttgtcttttcgtagcaactttttttttgtcgtaacgtagggttaacaacgaatatatctggtcaagacttttggttgaccgctaaagatatttcagcgagtcttccgaatataatctcgtcgcttagatttagggggtgtttggtaattaggtactaaatttagtagctctcacaaagggacttatatttttataagagggactaaaggttatcttgcacgatgaaaaattctagcggcttttctatggtggctatgcctagatatacttggtaggtatagcattttacctttagtcccttaccttttctatgagtactctcttcgtcccaaaatataagtatttttagtataatgacaagtcaaacatttttaactttgactattaatagcaaaaaaaataaaaaatatcactcatgtaaaattaatgttactagatttatcattaaacaaactatcacaatatataattctctttatttaaaacatcttgcttttatttcatagatattgttggtcaaagtagtatatcagagaccgtgtcagattctaaaagtacttatattttatattttgagacggatggattaggagtactagggtatcaagctgaatgcatgaatcacttcaataataataataataaacgctgcaataaaacaatgttttgtcattggccagagagcttgggctgcagttggcctctactctaccttggggatcttttactaagaacacttgtcctccacggtcattagcaaaacatcaactgtttctaaacaaagttaacatatcattcagcaatacaagtatctagtgtatgtatctatgtacctctactacattagaatggtcctaatctagcgacttcaacgcccgtgtgatttggcgcagagtggcaaccgaccacccaattacccctaaggcactaatcatgctgaacagttgaatggttagtataaatccattaggacgaagaaaggactttcatgtgtattaaactaattataacattcaagaaagtgattcactggggttgatcggcttccatttacaacgttgtttcgcagcttcgagccagtttgattagtttgatagatgcaagaggtagtatatatgtagtagctggctgtgtggttgggctgtaaactgcagttagacaaaccaattgtcttcaaaatataaggagaaaagcccacgcaccccgcaaaattctacatatatataaaagggagatctagagtcatgaactctaaaatttaccatctgatctgatctcttgaatttataaaagtaccgttgtataaccctttatttcgtctaatttatatgtataagtacgaaattaaatgtgtagtttaaaatttcaggatattgtgagataggctttcaagtacttcctctatttttacataggagtatatctgtaggtacacccatttgtttttataaggccctatttagttcacacgtaaaaactttttacactgtcacatcgaatgtttggatacatatatggagtattaaatatagacaaaaaaaaaattatacagattgcgtgtaaattacgagacgattcttttaagcctaattgctcaatgatttgataatgtggtgctacaataaacatttgctaatgacgaataaattcgtctcgcagtttacagacataatttataatttattttgttattaatctgcatttaatactttaaatatatgtccgtatatccaatatgacgtaagatttttcacgccttgatctaaacccagcctaaactgcccgcacgaaaaccggatatgggaagttgggaactaaactccccgcacagaaaacggagcggtccattagcacgtgattaattaagtatttgctaattttttttttcaaaaatggatcaatatgatttttttaaccaactttcgtatagaaacttttttaaaaaaacgtactgtttaatagtttaaaaagcgtgcgcgcggaaaacggggaaagggttgggaacgtgagattgcaaacacagcctaagtacaggcgtgtgaacgccagccaatcacaagacagggagccggtaggtgtaactttttcaggagtcacagcgacgacagcgagagcaagtctgaaaatgacagtggttgtcactcgtcagccggaaaattactgcggatccggggatctaaacccacggctcgccggaatccgatggtgttggtatagccccactccctccctacaactgttccacgtgggccaccggcagctcacgctggccggggcccacctgtcagcggctgatcttcggctgccgagccgtggaccacgactagccagaggggcttggtccttgggatgctaggcgtgcgtgagagtaggtacaatagcagactgtattaatacggctataacagaagaaaagaggagagagagaagaaagcgggctacagatttgtagccggctgcaatatggaatcaagatgttatgtgtgtaagaggtgggactg

SEQ ID NO: 27325 - DNA, 3373 bp, Oryza sativa
tagttaactattgtatgaatagctattatattggctataaatgttttggagcgctattgtccttgctctgatggaactgaccgtgcgcacgtgtacggcgtagtatgggattagaggattaattatcgtaaaatctaaacggagaggcctctccgtttagcgctatcgcgcgacgcgcgtgacagccgtcgatccgcgcttggtgatgtggcgtccatccggcgcgctccgcgcgtcccgaccggccgaccgagcgagctcacgcgtcgccttttccgaccgaacgagcgagggtttactgttcaaatgttttgggtggcgctcgacgagagagagagaggcagagagtgagagagagagagacggaggtggcgtgaatctccggcgaaatccgtggcaaaggggggtgcggggagttgctgctgtttcctcccgtcgcgtcggcgttagcggagtcggcggagccgacggtttcctctcatcgcgccggcagttgcggtgggaagcgtaggctgcggcggaggtggttttctctcctccaaatccggctgccatttttttcggtaagttgtggcggtttcgttgtggtttttttgagccgaggaggtggagtgatggggctgtttttccgtgcgttttttgtgccggggaggtggagagatttgggcagtttttcactgcgcaaattgcttctcaaacctcccgttttgttctcccctattccctcatttcccctctctctccctcattcatcaggtgctagttcatcctctcggcgagcgcaaggttgcggtggaattcgccccctcaagcgtcggcttgtggatctcgggttccatttgaaggtatttaaatttctctctctctctagcttatgtagatttttctggttgcaagttgattactagtgattactaacatccaaaatgaatttccaaaattattactaacattattagttgcaagttgattattagttgatcgatggttagttgcaagttgattactaacatccaaaatgaatttccaaaattattactaacattgttagttgcaagttgattattagttgatcgatggttagttgcaagttgattactaacatccaaaatgaatttccaaaatgattactaacattattagttgcaagttgattattagttgatcgatggttagttgcaagttgattactaacatccaaaatgtatttccaggaatgggaaaaagaaaaaccattgtacagaaaggcatgttaggcaaaccagagccaagtgaaaaaacaatgggggtttcacaacgtgctaagaaaagaagtattggagatgatcatgcagatgacatagagcaacctcctccaaaaaggagcagatcaaaggtattaagcatccaccttttttatgcattttttgccctcaagcagtgtttcgctttttccaatgcactacatttttcttatgatgcattaagttacttctcactgtggattaagttacttctcactgtgcattaagttacttcttttaaaattcctatgagatttctaacaccagtactcatggctatgtaactagggaatgcaaattcaagtttatttttggaagtaacttgcatgtttctaggaagtaactttttgagttttataacaagtaactttctgttcaaattgctctgagaggcaactagatggaatgtatcatgctgtgtaactagggaatgtaaattcaagtttatctggaagtaagttgcatgttcataggaagtaacttactgttttgttagaagtaacttcctgttaaaattactttgaaattttctgttaacaagtaagaagttacttctcgatgtgcctgaagttacttctctctttgcattaagttacttctctatgtgcattaagttacttctcaccgtgcctaaaatatttttgatgctgctgcttgagggcaagttattttctagaactaacttaatggcaagttacttcttggttcagttacccttttttcaactgttttatatatgtttttgaaaaaataaacaaatgctgatgttttttttatttttctttttgttgttttatacatttgcagtaagaaagtagcagggcttcacctatgaaacttataaagttgtatccccatatgagtggcgaacaaaagcgactaatagagggggctggcttccatggcctcgtagatctcaagtgctcgaagctcagacctgatttgtgcagctggttgatggagcatttcaatccagcaaccaattagcttgtattccctggacgtggagccatagatgcgaacgaggagtcagtgaagtctgtgcttggtatcccaatgggcgacaaagatgtctcataggagatggaatctgaagctacagaatttatgctgaatttgcttggaatcaacgatggtatctcaccatcactgacttctcttgggattcaattggagaagttgaagttagcagatgacaagcacctgcgtatgtggatcatctacgccatttcttctgttttagcaccaacgacagcaacaacagtcagcccaagatgctatccttctgttgttgatgctggaaatatcaagaatcttaattggtgcaagtttgtcatatctattttgcaaaaagctactaaagctgggaagactaccaactcagcatgtctcctgtatatgatggtaacaatgctcgcctttttttattcgatcactgtcccaatgtaacttttatgttttttagaagtaagttaagttgtccaggaagtaactaacatgttcctaggaagtaacttctttctgttaaattgttataaataattttctgtcaagtaaattctctctgtgcattaagttacttctcactgtgtattaagctacttcttactgtgcattaagttacttcttcatatatgccctgccacatctttttttccaatttatttttaaatttaaattacatctggaagttaacatattttgtaggttttaaatcaaacaagttatgtactttttttaattaatctaaatgctctaatttcttttgtagattctttatttggactcgctttcgtttaaaaatctcaatgttccagtggagggttatcgagctactgtttggacgaatgaattgataaatcaagcaatattagcagacacatcagcagacggctcctttggagctttaccagtgagtttttttatagttggcatacttgcatcatttttagttttttgtttgttcgtaacttatggattttataattgaaaatatagcttaggagcagttttcagcatgaagggaccaatttgtttgggagcaatgtagatttttcaaccttcataaattcaaatgtgcccaatagtat

SEQ ID NO: 27326 - DNA, 9047 bp, Oryza sativa
attagttgaaagaaaaccaggagctaattatacaaagcaccaggttattagcttctaataatctaattaagtgagagtacaccactggtgagttgtgacacgcaccttgatcgaaaccctcctccactacactcgccggatggttggtgcagacagcagcaacccaaccgctcgtctgatctgccttctgcttaccttccttccctctcacgcgacagagagcaatctaccatgtttgctactgcaaatttcagagaagacgacactgaccagatgctaagagctactaactcttttgttagtgtgccaacctctgcaatgtggtcatcaatcaaagcatgtatatgtgtgtaccatctttgcaaaaaggattccaaaatcaaaatgcctagcatgtaggtccaacgactatgtgcggttttgatgttttgggttagtgctggtgttcttggatttggactgttgatggttctttaattttgacagttcaggagaggacactgaagaacatccagttggatgttggcaagctaattaatcagaaggttcttgtaattgttcctccaccaaattgtctggtttgtggttatatgctttacacattgaattagagctttttttttgtaatggtgattgtattccattttagagttttacacatggatattcactaattattctacccaaatgttgcagtgtggttacaacttacaacttaatttggtcattgacttatattggagattggagttaatcaatatacatgactctacccgtcaggataaaatattaccgtcaatattaatttacgtacatatttttgaaagacttttaattgtcgcactaataaatttatgtctcaagtctgtttgagagtgtggtaatgaaaaaaaaaagaaaagaaaaagagtcagctagctatgtgtacatgactctcaatattataatctcttctccgttagcttaatgaacaagatttagccagtgatgctcatgtccttcagacacatctaatcatgtcgttatgacgtcacacgctcgctttaaaaagcaggcatgctgttccgttagatgacacatatctttccttgcttttatatttttcctcttcttattttccccctcattcctgatgatagtcactctccaaaatggtttgcgagccacttttcatgggacgtcatctccacaaagctacgcaaatttagtacagaagtatactgttttctcaccttacgattaatcacctaattcagaaaaagattttctcaacccctatagatttttgtttaagatagtagataatccgaccttacttcaaaagaagctatatccacttattacaaaattgttgaataaaccaaaagcgatcttttgtatgaagtaattatgtacttgcttaattttgccacgtatatatataggtctatatataaagtttgacaatgtctagctagctaattggtttgaaatatactctgttagaaaaaaaacactgtgtagacatggaaaattcaaaatatgactgtcacattgctcaaagtatcacatcaattcctactgccctaacaacctaacaagtggaacaattacccctaaccatgtaggattagtggaccaaatcaatcaatagagaatatttatcaaatcagcttattggcaacaagatatggtccacaatgcatcaaaggaccagcattttctccttgtccagatggaggaaccctacatttgcaactaaacaagctgcaggagggaataattcccccaaaaagatgatccctagctagttgaagccagtgcaatgaaaaagacacccttttctttggcattttttttctcaagccatggtaaagctaagctagatacctcattgtcaaaagggaatcaagaaagaaagtttggtaattatttggtatatatatatatatatatatatatatatatatatataactcactttaaagatatatctttgtcctctttatatggtgggaaatgaagaggaaaaaagccttgttcatactggtatttcaaaatcaaactacaagactagttctcactggaaaactagtttgtggcatatggctaggcacaaaattgtgcatatggtctacccagttcaagtcgtatactagacattgttgtacatatcaaccaattttagaagaacatatacgtatgcacatttaatgcgagtgcgtatgctgtatgcatacccacaatgagagagtgtaattacgttgtacttcccaactgtactttctaaaaaaataccggttcacattgatttagggcacaaattcaagagaatttaatggtgtattagcacaattgaaaagatccatacctgaaaacaaaaatggttaaactgcaatggaatttattaaatttcccaaataaactagtgtgcggttttccttttactcatttacttatgaaacaaaatttacagctatttctagaacaactgtcagatgccatccctgaatgttcagagctatcttgatcactcgagagaatcaggcggctaacattgacaaacaacctaattatatatatttgatttgccaacaccagaacctataaaactatttgagtcaaatcttcatgtacccaagatatatataaaaccaaagaaggattatcttcagaagtatatcatatcatccacaaaactattggagcaggcatacattttattttcttttgcagacttgtacataatctgtgacatttacactaaggccgagtttagttccaaattttttcttcaaacttccaacttttatatcacatcaaaattttcctacacataaactttcaacttttccgtcacatcgttgcaatttcaaccaaactttaaattttagcgttaactaaacccaccctaacgttggttacttgggcgtgcatgcgtggacggcatttagcctaggccctttttaaagggagtccaaagggaggtgcaacagagtcgttgcaccgactgttctgaattcaatgtaacccgaaatgggcagcctaacggccaaacaaattaagaatttttgttcatttcgccctttaggatagtactatacaatagtaacaatggcctccgatccttccgttctggagttccctttcctatgttgagcgcgctattccagcgaaatctactataagaactaattaaagccacgttctaaaatgtggtttaaaacaaatgattagtcgcacgtaaaatgtgaaaagcgataagtataggattgattgagtattacttattgaaaactataaaaatggatttgttttatttttaatgcaacttcatttctacataaaacacaacgtttattagttaaacgataagggtaacagtacttgtgtacacaaatgcaatactttctgaaacttggagaaaattttacccggaataaatcctccgtccacaaccgtggcagtctggctcgatgacttgatctctacctctccttttcctcgtgacacgcatatagcgcgaggaagccatgctggctaccggcttaggccctatttagttcctaatacaaaaattttcacacttacatcgaatgtttggatacatacattgagtattaaatgaagataaaaaaccaattacacagattacatgtaaattgcgatacggatcttttaagcctaattgtgccatgatttgataatgtggtgctacagtaaacatttgctaatgacggattaattaggcttaataaattcgtctcgcggtttcctggcggaatctgtaatttattttgttattagactacgtttaatattttaaatgtgtgttcgtatattcgatgtgatagccaaacccaaaaattttcccgagctaaactagccacatagtcgcgtcgacttttgatcccgtttaagaacttttctaaatggtcttagtttaggtaagtttttaagaaggttttgatataataagttaatttttttatacagaattgatttccctagctaactgtatatttaactaagttgtactatatgctggttataagagaaatcactagaaggctcatgtttcttctctctttatcccctctcttttttatcgaataaaatttaaatatatacttttatttttaacgttttgcatttatatacatgtatggagaagaattgcgaaaatatacctctatgacagaatggagatgcgggacggaggtagcgccgctagctctgcgcagcgtccgcgcggcaccgtcgctcccgcggaacgtccgcgcggaaccgcacggaatgcctcgctcccgtgcgccacatacgcgcgaccggcgtggcaaagcaagcagcacttgcagcgcatgcattcagcgaaagcaacgcatgcattccttcgctcgatcggtcccgcactgctcttctgcatgaccgccggttccgcggaatggtggtgcgggaccgagatggtttcgcgtatcccctatgcagtagatgtatatttgttcaaaatttcatcgcattggtatataaacgcaaaacgctaaaaattaagaatttttgttcatttcgccctttaggatagtactatacaacagtaacaatggcctccgatccttccgttctggagttccctttcctatgttgagcgcgctattccagcgaaatctactataagaactaattaaagccacgttctaaaatgtggtttaaaacaaatgattagtcgcacgtaaaatgtgaaaagcgataagtataggattgattgagtattacttattgaaaactataaaaatggatttgttttatttttaatgcaacttcatttctacataaaacacaacgtttattagtttaaaaagtatgctaacgaaaattgaggaaaaagccaagttaaaactgagtttagaatgctcatgatcgaaaccaatgagttctaatgtgcaaatatagttttggcatatatttttctcacggtcgagctctatcatgcattttagaaatttttatgatggtagtatagaatgatggtgacttttatgatattggagtagtacagaactatgctatgaaaatatttgtggcagttttaatagaattttagtgatattagaaatttattgttgacgttgtcactttgaccatgtgttaagatggatattcacgagtgtttgcgtatacgtcttctgtataattcatttccaacaaaatggcagaaagttggtcctgatcaaatcactattttttgttggcactatgcaaaagtatccctttcataagccgaccagcaagcttgtactcaaaataaatattgacctgtaaatttaattgcttttccatcattaagccatatagtattaatctgtcctgtttagatgggactaaaacttttaaaacttttaagtccctatcacatcgaatgtttagacactaattataaatataaacgtaaactattaataaaacccatccataatcttttactaattcgcgagatgaatctattgagtctaattaattcacgattagtctatgtggtttctcaaaaaaaaagtctatgtgatgctacagtaaacattctctaattatagattaattaggcttaaaaaatttgtctcgcaaattagctttcatttatgtaattagttttgtacgtagtctatatttaatactctaaattagtgtctaaatatagagactaaagttaagtccctggatccaaacaccaccttaactacacctaggagtgcttgtagttgtagttgtagtcatctactcgctccattataaaatataacaacctaacataccaaaattagacacaacttaggttgtgttcgatacatagggtttggaacacatctccttcgcacggaaaacagaacagtttattaacgtgtgattaattaagtattagctatttttttataaatggattaatttgaatttttaagcaactttcacatagaaattttttttgcaaaaaagtaccgtttagcagtttgaaaagcgtgcgcgtggaaaacgagagatagggattgggaacacactgaaacgaacgcagccttagtactataaatataaacaaaaatctatctatattggagtatattatgttgctataatctgacacgggaagtagtatttgtagcgtactgtactcgatcccgtacattctcccacttcaactcgtacgtgtattctttttctaaaagaaaatgtatggtatggataacctcctctctagtctctaccgctcaactgaatgtacgtagacggtccccgttccagattggctagcgcatagtactgacctactcctagcactactgatgagtgtcaaactagggtggggcccactgccaccgctggcgtcatgctgacgccagcacatcaagctccccgcgaacccgatcgaaacgcgctcgtacgtgtaaacagtttgacgatcgatcgatcaaataaaaataaaataaaaaaaaaaaaacaacccatgcatcgatctcgtggccgccgaccaccgtggccgtggggacgcagcgaacaacgtaccgtgtctcaccggcgccgcctccgccttttttttttcttttcttggtcacgaacaggacaaagctcactagtcactaccagggtttacgaatgcatgttttgttttacgtgctgcagaggagaggttcctaaccctggcctcctctccaacacaacctaagatgcagactctacgctgattttcattagctcgtttttcaaactgttcaacggtacttcctccgtttcataatgtgagattttctagcattgcccatattatatttctagattcattaacatctatataaatgtggataatgttagaaagtcttacattataaaacggataaatacgttttatatgagaactttcgatataaaagttgctttgcgttcgtttggagaacagagagtttgtttgtttcgttttccgcgcacacgctttccaaactactaaacggtgtgtttttttaaaaaaaaaatttctatatgaaatttgctttaaaaaaatatattaatctatttttaaagtttaaaatagataatactcaattaatcatacactaatggctcacctcgttttgtttatcttctcaatcccctctccctcaaacacagataaatcattttcttaaatctaaaataactaaaactcaattaatcatatgctaatagttttctcgtgtctatccatatttaatatttatcttaagtgaattcaaccgtgtcagtttaatgtggtccgcggaatgtggctgcctcgggagtcatgacacggcaactcggcgaacaagtgatgtgattcggttatgcatggtttgttggggcgagatggtgaccgtagtgtgtcttctagtatagtacagctactgtgtacttgtatagcatactacttggatactactcgtccatccatgaactgaatggaagactgatgtggattgtagtagcacatttatttgcttcgatcgcgctggttgttcttgtgataatacgctaacttggatgcatgttttgtatgcgagatttctcgatacaagagaaaggctgtgtttagatttatgggcgaaaatttctgccgtgtcacatcggatatatggacacacgtttgaagtattaaacgtagtctaataacaaaataaattacagaatccgcctataaactgtgagatgaatttattaagcctaattaattcatcattagcatatgtttactgtagcaccatattgttaaattatggagcaattaggcttaaaatattcgtctcaacaattagtcacaatttgtgcaattagttataattttatcctatatttaatacttcatgcaggtattcaagcgttagatgtgacatggtgaaaaattttagggtgggatataaacaggaccaaagagtagttccgatgaaggaaaaaaaagtcaaagatagatggttctccaaatgttttgtggtctgttcctatcataaattgtttcaaatgaacctttgccaagcccaaggaaacatagttggttggcatgaaatagatcaaattaaaggcatatggtatgttaaggcacctagcagattcgatacaatggaggaatgtcgataggatataccctgatttcatagatgacacgagaaacacgaggctttgtttgtgtacagatgacatgcatgaatcattttagagatatgagcaacaatcatagcatctggccagttcttatcgcaaactataacctaacaccatttttcaaattgtatttggattaataggttgtgatggctctcttttaaaagatgcatgggcgtggtttgataaattcttgatgcttgcaaaaactgatgttctattggatatgagaattgatggaaatatgtgaggcatactactatgagacttgcaaataattgataattaggattcatgtgattgtgaaatgtatgtgaatggatgtatgtatatataagtatgaggattcaggaaatatatctctgtttctgtcgatttacagcgagcatggctagctatttcctatggctaaccaataaaacaaatttgttatttttgttaaaatcttactgatggcggggttacaacatatcaccgccacgacgagtcatccgtgacgggctttactctactcgctctttgaaccatattggtggcgggttgttgttataacccgtttaagatgtcttacatcggtgatagcagttcgttcgacacagataagttttgcatatcactgattcatgactagaatatcagcaaacaaagataagggtaacagtacttgtgtacacaaatgcaatactttctgaaacttggagaaaattttacccggaataaatcctccgtccacaaccgtggcagtctggctcgatgacttgatctctacctctccttttcctcgtgacacgcatatagcgcgaggaagccatgctggctaccggcttaggccctatttagttcctaatacaaaaattttcacacttacatcgaatgtttggatacatgcattgagtattaaatgaagataaaaaatc

SEQ ID NO: 27327 - DNA, 1133 bp, Oryza sativa
cgccggcgagctcgcccacgcccttgacgccatcaagtggggcaccgactacttcatcaaagcccataccaagccccacgagctctgggccgaggtaactaaatcactctcattttcactctcattacccagttaataacgtacttacgtagctactactaatcaaccaaacctgagagaaaattagaattattcaaaccatgcgaccaacatgcacgcatcgattggctagctagctagctgcagttggcaaaaagaaagaagatttttttttgtaagatttttttttgttttcttttttaaaaaagaaagaacatttgttaggtggagcaacaggacaaagttaagctatagctgggagtggttaattcagtgtctgatcgagacgcgcaaatctcacaccacaccatccccccatgattgtctcctcctcctgctcgcatcacatggaatcgattagaaattaacaatccattcttttctttttagctaattaattctctccatggctttgacaatgtgagctcaaataatgattattaaccaaccacggtgatcgtcgatcatggcgtgtgtgtgcaggtgggagacggcgacaccgaccactactgctggcagcggccggaggacatgacgacgtcgaggcaggcgtacaaggtggaccgccgccgcccgggatccgacgtcgccggcgagaccgccgccgccatggccgccgcctccatcgtcttccgccaatccaacccgcactactcccacctcctcctccaccacgcccagcaggtactaattaattactacttactaatcatccccctctaattaaccccgattaactcactaatcaccgtcttaacaaccacggtcaaaacggtaaatcttttttttttcaacgggttcacatcgaatcgaagacgtgttcctctcctcgttccccgtgccgcatgtgccagctttggcttggccagccggatgacgtcagcgacaccgtgtgaagcttctgtcggtcgtgtgacgccgacatgtggggcccccatccccggtggggtagtagattctccgtggaaggacaaagacatcccgctgctgctaagcacgttgacgtttgcgtcgaattaggttactaattaggt

SEQ ID NO: 27328 - DNA, 757 bp, Oryza sativa
aacgattttttttgagcttttttgctcacaaaagcatgcattgggtagttcaggtgtgcacccacacggtgggagagaagagatggttgtagagttagcaagctgtgagttttaggcaaggcagaaacatttgactccttgaggaggtggaagattacattcataggccggttgtccaccactccctggcccagaccacgaccatcgtcctgagttagtctacgatccaacataatctccagccatccattttttaagcttgctgcccctagtgactgcttggagtgtactgaaaaccgattgcccagcgaatcctgtaaaaatgcaagtgatggcattgggtagtaattgccctgcaaagggatcttatcatatgtctgcctcctactcatctgaaagccatttagatcagaatagaagactccttggttgtcaatatctgtcttgaatctgacaatcaactccttgtcattaaatacatggccaacaagttcaacatggtattccttctcaatcagcatatcctgtatagagtctccacagctataaatccgtgtgctatgtgagatgggtgacttatgccactgtgtctttggaagggaatgagcctcttgaaccaatggcccttcactaaggatgaaatatcccccttcctcaacaatggattgtgcttcccctattggtttgaacaagtatgccccactaccgtggctgcggtacatgccatttcttcaccaacatcggtgtgttccccatc

SEQ ID NO: 27329 - DNA, 4450 bp, Oryza sativa
cttacgggcctacggcgagacgatgatgcggcagaccggcagtggcggtgatacggcgatgcgacgacgccggcgaagaggaggcggctgttggccgacgcgacgacgccgacgaagaggcggcggctgtggcgaaggggcgaggcggcggcggcggcggcaaagaggtgaggtggcggaggcggcggcgaaggggtgaggacgcggcggcgaaggggtgaggcggcggcggcggccgccggccgggatgcgtgggggtcgggggaaatcggggaatgggagtagtcggctggctcggctgcctgttgcctgttggttgttgctagctagctaggatttgcataacacaatagtacagtacacacgtagttgggctgggttgggctctttgggctgattctgatgaatggttgatgaaggactccggatatccgggaaaaatttctggatagtttccgaccgttttccgtttccgtcgaatatcacccttactgtatttattttcgtatccgagaaaaaaatccgtattcgtttccgaatccgaaaatttccggatagttccgaccgaattttgccgtatccaaaaattggtccgaacggaaggaaactatccgaaccagtttcatccctaggcacaagtaaccacatctagctatgttctcaagggatcatcatctgaaaatttaacgtttgtgtaaatatatgtagcatatgacaatactccttattttgaaaatatgtaaatgcctaacaatacataaaacactaaattcaattaatggcattgtaaatttgccgtattagaaaaaggcaattactattcgtgaaaccttgtgggtgccactgaaactttctaagatttgaaccacggcattgccaccgagtttcctgtcatcttctcccccaaatcctgttccatctagatccagggaagaagccgtgaaaggcgaggaaagcggtgacgtgctcgccttcgccatgtcgaaccgctcgacgacgccggtgagctgttctctagtcaggaaacggtcggcgtggctcctctgttgacggcggagggcggcagcgacgtggacgagaaggtgtcgtgactgcctctcatgagggtggttggccgcccaggggcgcaacatctcacaatctcgctgctgatcttccaaactagcggcccttggacaccagcacacgaggcaagatgcagccgcgagctcctatagacttcatcgggacgtcatcgctcggcggcaacgcaactagctgatcacaggggtctgctgttgtccttcgccctgcggcatctgcgtggactgcttcctgtaggatcgaatcacaagaactaagccaaccagaagggggtgaatggttggtatacccaaaaaccgaaaacttttagtggaaataaaagttacccttaaagtcgatggagatcggtctgaccaaagttgtcttgccggtctgaccgctcggatgccgtcggtctgaccgcccgtatatcgccggtcttatcgccgcttgctgccggtctgaccgccggtagatcgccggttagaccgccaaaacccggtgaaacacaaatcgaagaactctaaaagtggatgacgactttattgattctctctgtgtttacaaagtgcaccaacagcactccttacaaaatattcgactaaactcgaaaccctaactcaaaactcaactcaattgctctctaaagcgataccgggaagcctcacgctccccctctatttatacatgaggtcggtagcctaatgccacgaaccaaactcatactaagagttctaaacaccttaggaaaccctctagtacaagaaaaaaaactttacataaccaatcgtaccaaattcggactccttccaaattcgactccgcatcccatacgcacacaatacctccatcgtatgccatatggaatctccatcaaccacgtgcatcaactctagccttagtatcccgcatgatctctgaccaccacggacgtcgtcttatccccaagctgattccaggtccatcactgcgaatactctcccgagacatcgagtcacctacacatgaaataaacaaagaaatcatattccgagaccaagctatctccaacttgattcattagtagcaaacaaccgtattacatacgtttagtatccatctagaagtcataataatgaaataatcacggatattgtaacggacccaaaatttcaggggaatttttttgcgaaatgttttaagtcatgctcttctcgattcttgcattggagtgatcttgcttctaatctttcctttgattttggacttaaactttatttgcaaagttaatagctcccttttaaattctataaaacatttccatttgttttctgtaatatctaactttggctctaaattatatttcctttgaatctattcccgaacacctccaacaaataccctttcaattcccgctcaaccatctctagagcacatgaaatatcaatctctctagagttaatacctttttatttagagtttaccacactaccaccaaatctagttttatcttccacacatatttcccctttgaaatatcgtttatctaaattatccattcgagatttcaaagtttattatttagcttgggccaatacttccccgattgacccgactctctgttatatcccattaaccatttttatctttggactaaaccagtataactccctttttgttggaatttattttggatcacacctctatctaaacctatccccaaaaacctttatttcctctacatcgatccaaaacattcaagggtcaagttcctattttgatcaagccgcctgtttgattcctatggcttgatttcctcctcggcacaagaactatactatcacaaataattgagtgattgctcttgtgctaagaaacttatttccaatcccttctattcaaagtccaacttcgtttagccacaaatatttcatcgagaatccataccccatattttggaggctaaaatcctagttatttacctccatctatttttgacgtcatccaaaatttatccaaagttagaagatcaattatttgtgttccttttcctcccatttgattatttcaatcttacatttttaaatattaaagaaaatcttttgtgacaacttttatatttggttcttattgaattctataaaattggagaatctttatttttatccttttcaaaatttatatcttaaaataaatatctttgattttattttaaaaatatttcaaactccttttgctttaaaacccttattcaaaagacccccaaatatttctcttttaaatctattaaaaccctccattcaaattttcccttagttttcatctcctttgaaattccatttcaaatccctccacacaaaattcctaaaacccctattcattttgggccgaattcccttcaattaacccaatcagcacaagtctacatgtctccttcccccctcttgggctgtcagccgagccgagccgagccggcccaaatcggcccatggccgagccgctccctcctcctctgggtgcacttggcgcacgcacagggcgccgccttcgccgccgtctcgccacttcccgatgccgcccgccgttttgcgccgccgccgtcgtcttgccttcgacgcgaaggatccgtcaccaacgtcagctgcgacatcacgccgccgacgtcagccgccgaatcgaaccgccgaatcaacgaatagagctggcgccgtgctccacttctccacgccgccgtcgccgggttctccttattttcttcctccgcaaccgccttacgccaccgcctctcgccgcctataaaaggatgacgaggtcccctcttccccctcacataaaccgagctcctcaagctctctttctctctttctctcccatgtccggccattagtaccaccggccgatctccctcaccggagcttcgcaagccaaaccctcgcgccaccaactccgcctcgtcgaggtgattccacttttccctttcccgatcactccaccttgagataaaccgccaccaccacgttctcttatcggccggtctgagatcttgctaccgccgttccggccatctccctctctccctccgccttccaccactttccccgggtgcgcgttgctcggaaacaccatctcccaccggcgttcctacctcccggccaccagagagccggcacctcgctcgctctcccttctatttcctctcggctgccagagagaagaaaagaagaggtagaagaaacatatgacaagcgggccccaccttttataaagtaattccattttcttttatccagttccaatctttgagcatccatatctctccaaccattgatccaattagaaaaattctttgacctaaattcatctattttcaaaccctttattttgataccaaatttcctattttaaaatt

SEQ ID NO: 27330 - DNA, 6089 bp, Oryza sativa
atttaggtgacactataggatactcaagcttttaacattgttgctatttttatgtaagacttttcgattggatgaggcaaggtgagtcggcacctacccactggatggttcagatagaaaagaagaaaatgaaatgaaatttccgatacatgagttgattcaactctgaaatcacattataatctcaaacgagaataattttatttctgatacaggctcttggggcatgggttgatgagttcatgaacacatatgacatcgaccattggaagaagcagtgcgaaaggcaggcacatggcatcgagtggatttatctcggctgagactttctcaggaactccgtagctccggtgctcacggtggatgttgcttggttcatcgcgtagagacatgtgaccgtcaacgagatgcgtgcagacattaaaagtgtctcctgatctcgacccctatcaatatctcaccttgcatcaaagatttccggtgtcttccaagcccaatatatatggataaaggtcatcgagcattagcttgcatgtcactgacaaaccatccgtagtgcgtgttttgtgacatgaagctgtaggggcgccaaaattatgtactgttcatctctctgccgttgtataagcattcctgttgaaaaaaaaaaaagagtgaggaggttgcacactagcataattaatttcagtgtagatcaacgacaggcagctccatggatatatattgccatccttcttaagtttttggatgagaaatataaatgaatgttattagacatcgcaattcctttgaacaaaaatgtaagagattaaactcatttttttatcaatccacttgattgctcaatttaggctagaatcagcccatacagattcaatttgtttttatttctaatttaccaaaaaacattccatgctcatcagaatgtattctcgatttgcaaaatttcaatatatttattgtttcaaaatttcgctgaaacaacttaaacaacggaagatcagaagcaattaccagtctaattaagatattggtggtaacgggtcccaaccaactggttctttaatgttacaatccaactcaatccttttgctcaacaatctctacaaacttaagcctgccctttttacacaacccttaaattttaaattttgtatgctaagaagttaggccaataactcaaccacccaactttaattttgacagaagaaatgctaacatgcatcttgttgacagaaataaaggaaaatattttgtcttttttcgaccagtccacttcagcacacagtcaaacgaggtcaacatacgggatttagaactgacgacaagaaattcttttagacagctcttaacttttactgcccgactttttagagaaagataaaatccgaccacacagagaaacatcttcctatccagaaaataggcaaacaaactcacacccagagaaacatactttacatgcagaaaaataaaccctctagtttctagatcattaggtagaactaggaaggtagcccgcgtgaatacgcgggtatgcgtcgtacattatgtctgagacacttataagagcgaaacatctaccatgatttctccataaattgttttcgtcgatatttaattttataattttctaacctattagctttatattatactccctccgtcccattttaagtgcaatacatgagtttttgtgtccaacttttattgtccgtcttattttcatttttttataattagaatttttattgttaagagatgataaaacattaataatactttatgcgtgacttatgcttttaaatttttttaaaatttttcaaataagacagacgatcaaagttaggcacggaaaatcatgactgcatttaaattgggacagagggagtattatatttaagtaatatttataagaaattatttataatcttcttcatcatttgaaaagaatgtatacttattttttttagaaaacatgtcaacgaaaagtaagtgtaaagtaaaattaagatatttttctttttttaattgcatatatattatcatggtttattcgaggatgaattgggtgagatatgaagctccactaaatatatgggtttatatagcttaatatgattgatgtagtttgaatgtcggtccatctatgaacatttcatgtagagtggataagaggttccacgcaagctaacgttaatacgataacgacgaaatataattgcacaataatacttctgaaatgtgacataccatgaatacacgcttgtgttttcttttataagattaatctaacggttagaaataacagttctaccggtttaaaaggtataggtgtactccaagaatgtagcttaaaaattatggttgtttaaatatccaacattattatgaagtgaacgtagctcaaccggttaggttccttgtgatggaacttgcccgagtctagacatgacaaattcttccagtggtaggcgacgtacctgtcgatagcgaggtgtacgtggtgacttcgtcaatctcaaaatatatcagcctagtctctcagaagtactcataggggtatttgtatgtgtgtgttcaaagatatgggtgcgcgcgcatgtgtttgtactttgtttaaaaaaatttcaaacattatttctcttttattttagtagatacaacaatagggaggggacgacagtgttatatacatgtgagggtgagggggaggtgaagattatatttttctattttttctaaatgatttatgtgaaagccaatgacaaggtgtttcatttttttatatgaatttttaaggttttctccattttttataggacgtgacacactgtgacttaagatttttttttaaaaaaatagatttaatcgttaaaaataatggacaagtcaatttaattgttttttcttataatttaattacaatatctaatctaatggtttattatagatctagtttacatgcatatacttctgtatatattatgtagtattatattttatctttttctatattatacaaaatcctattttagaccatagttttttccacgggtactacgtacgcaatttttttttgggctttatcattttttatcatacatagatgtctatttttttttcttccagctaacagtaggaagctttatttgttattttaattgcccagccaccgtttgcatatctttttttaggaaaagttatcaccattttaataataaatctaatctaatggtataaataaacgggtacaccaatttaagtgaaaatcgatggtgagattagatagtgccacatggcggcctaagagtatttgtaggaacgccacgtggcggtttaggagcgtttataggaagtttaattattcctagttcactatcggcaccctcaaagacgattgcatcggtaattagtaagttgagtactattatcaattctggcctccattgggccagtctcgactcaaccatatgtgatgaggacatcactttatcggatatgttcataacttcacacgttccaatgataattcctagtccaagtccagttcggccttcggagacagcactgactttaaacggacctagcgccttcatgccaacttcgatttgggtgatcttggacttcatggaaagcttatctcgctacctttcaaacgcatccggtctcatgtccaaattcatctcgagatgatggaaatcgccaaaacaaaacagtgctgttgctgaaaccgaacttgggccttgggctttgtaatagattagacccatctcggaagtgtctccctccacctccacgaattagcacttaaccctagctttattttcctctataaatagctttgtacatcctcaaaaacaattgggttttgtttagttgaattttgccaagtgacattcaccttgtctctagtcctcgttcgattagtcggcgactttagattcagagccctcaatagttggtgtcttgatttgccgggtcgattagatctaccacttcaatcgcaactattccttgtgcttaatcacctattcacaatatttagattgcatcttatcttgttcttgtagtgttttctcgtttacattgcagggatcatcaaccccgcgtcacggttagtacgacatcgtttgtggtgtagcaattgcacggcgtcctggacttgttttggttggtagccacgtcgcaaacgtcgcactcgatcaaagctagagttatcccctcacccaaaagatcgggccacgagagagagcgtcatcagttggtatcacagcttcagttgcctggtgaggattttagttttatagatttattatttttcctacccatcacccacaaaattgccgcaccactttttccatctccaaacattagttttgagccttgcaattttcattcaattttgctttattgagttttggtccgctgtcgtgtcggagtgctcactggtggagaaaccatctttcgtcgtacggctgatttccacaatagtcccggatgcaataaaaaccggggctaaagatgatctttagtcccggttcaaaagggtaacgggcatatttgatctttagtcccgattcgaatgctatcagggcatgtcaggcccccccgggaaagatcgtaactttagtcccagttggtattaccaaccggggctaaagatcctggtgatctttagccccggttggtgctaccaaccgggactaaagtcccacccctatatatatgtcttcttcctcctccagctgcccgagcaagcttcaaaatttcttcaaaaaagaggagaggtcatgccaaaatttttattgaatttattttggtgattacatacaaatcggaggtgcctaaaaggtttgcaacttcatcgtccaatgttttttttgtcatactacatttgcacctatgttttgcacactttttttgtctccaaaatttagttgtaagttgatgagagagaaaatgtgtgtggggaagaaagaatatatagaaatttagttcatttgctaaacaaggttttataaaatagttgagaaggaaaactctagtgaaagttaatcttaaataatagaaaacaaactaaaatgaaaattaaaagaagtaaaacacattaaaattagtttaaaactttacaaatagtttttaagaattatttggtgtaatattttatgatttttgtatgaataaagatatcatataattattgtatgactgtcattattgtaagaataattatttgtgtatggttttttttgactcatgtagatgaatcggcaatggatgtacgctgaccagcggtccaaagagtttattgacggcgtgcactattttttgagggtggccgaagctaacaggcaaaggggttttatttgttgtccatgcaataagtgtaagaatcagaaggagtattctgcatccaggactattcatttccacttgtttgagtcggggttcatgccaagctataattgttgggcatcccacggagagcaaggtgttgaaatagaagaagatgaagtggaagacgacaatattccggactttgctcagtatgttggatttgaagaaaatcaaacgggcgaggaggaaatagctgctgatggtaacgatgttgcggatgatcttggtcagatgttgcatgacgccaaggaggactgcgaaagtgaaaaggaggcccataaattggacaagatgttggagggccacggaacttcgttgtacctaggttgcgagcaggggcacaaaaagttggataccactctggagttcttgcaatggaaggcaaaatatggggttagtgacaaggcatttggcgatttattgaaactcgtcaagaacattcttccggggggaaacaaattgcccgagacaacgtacgaggctaagaagatagtctacccgttaggactggaagttcataagattcacgcatgtccgaatgattgtatcctatatcgcggtgaggagtatgagaacctagaagcatgccctgtttgcaaagcactacgatacaagattagacgagacgatctaggagaagttgacgggcagctaacaaagaagagaattcctgctgatgagctacttgc

SEQ ID NO: 27331 - DNA, 962 bp, Oryza sativa
aatccttttggagagataagcagcggccatagcacttggcccgttacgatgtgtatctacaacctcccccctggctatgcatgaagaggaagtacataatgatgccgattattattcaaggccccaagcaacctggtaacgacatcgatgtgtacctaagaccactggtcgaagatcttaaacaattgtggaagaagaaaggtgtccccgtgtgggatgaggacaaacaggaggagtttaacctacgagcgctgctattcgtaatcatcaacgattggcctgcacttagcaacctatccggacagtccaacaagtggtacaaggcttgcactcactgtatggatgaaacagaaagtatgtatcttaagcactgtaggaaggttgtatacatgggtcatcgtcgattccttgcagcaaaccacctggtacggaagaaaggcaagcacttcgaacataaggccgaccaccgtacgaagcctaaacatcgcagcgggaaaacagtgtttgctatggttaaaaatcttaaagtagtgttcggaaaggggcctgaaagccagcctatagagagcgaagatggtcacgcggcgatgtggaaaaagaactctatattttgggagttaccatattgggaattcttggacgtacgccacgcaatcgacgtgatgcacctcactaagaacctttgcgtaaaccttcttggcttcctaggtgtatacgcaaagtcaaaagatacactggaagcacgtaatgatctgaaacatatggaacaacgcggcgaccttcacccggaaccaaagaaaaaggaaccattacttgagtccaaccagctacactcttagcaaggcagaaaaaggaaagtatgtttgaatgcttggagagcataaaggtaccgtctggatactccaccaatttcaagcaaataataagcattaaggaaaagaagtttcacaaccctaaagtct

SEQ ID NO: 27332 - DNA, 989 bp, Oryza sativa
catgtcgaaggaaaaaacagaggagcatgtggaaaaacaaaagacaaaagagaggagcatgtggaaaaagaagtcaatattttggagactaccatactagaaggatcttaaagttcgccactgcatagatttgatgcatgtcgaaaagaatatatgtgagagtttaatgagattactgcttaacctaggtactacaaaggatggtctcaacgcccgacgagatctggaagaaatgggtgttcgctcggaactacatcccataaccacggaatttggcagggtttaccttcctccagcctgctacactctctcgaaagaagagaatattgatttgctaacatgtttgagtggtataaaggttccatctggttactcatcaagaatcagtaggctcgtttcactacaagatcttaagttggtaggaatgaagtcgcatgattgccacgttcttatcacatagctgttgcccgttgcaataaggaatattttgcctcctaagctgcgacacacgatccaacggttgtgttccttcttccatgcaatcggccaaaagatcattgatcccgagggactagatgaactacaggcagaacttgtgagaaccctatgtcatcttgagatgtactttcctccaactttctttgacataatggaacatcttcccgtgcaccttgtgaggcaaacaaagtgctatggtccagcattcatgacgcagatgtatccttgcgaaaggtacctggggatccttaagggttatgtatggaaccgttcacaccccgaggggagtatcatcgagagttacaccaccgaagaggtcatcgatttttgtgtggactacatgtcagaaacatcttcaattggattaccacgatctcatcacgaagggaggcttgatggtattggtactgttggaagaaagaaagactgttaggtcggatcagaaggtacgataaagctcatttcatggtactgcagcattatgactgatg

SEQ ID NO: 27333 - DNA, 13148 bp, Oryza sativa
tccgccgccctctacgccctcctctccaccgccacctcgacctctccaccgccgccctcgccgccgccaaatccgccgccctctccgccctctccgccaccctctacgccctcctctccaccgccgcctcgacctctccaccaccgcctcgacctctccaccgccgacctctctgccgctcaccctctccgccgaccttcccgacgccggcctgcaccaccgccgccgcactcactctctcgaccgccgccatccatttccaccgccatctccaccgtcgccgtctcgacctctccgccgccatctccgccgccctctctgccgccatctccaccctctacaccgccctctccaccgccgcctcgacctctccaccgccctcctcgccaccgccctctccaccgctgccgcctcactcactctctcgaccgccgccgggacctcctcttagttgccacgccaggaccgtcgtcgccgccaccgggatatcctctccgccgcctcctcctctcgaccgggacctccacggtgagcccacgcccccccgcctcccctcgtttactattggtcactgattaaccccctcttctcctcctcagcgctgccgtgccgagaagccgtgcgccgtgcgctggccaggactcgtcgtcgccgtgcgccgcctcctctgctcgtcgtctcctctccaggtacccctctctctctctcatgccgatgaatggaatggtgcagttaatggatgaatgaatgatgcaatggaatggatgaacgaatgatgaactttggatgaatgatgaattttggggataattgtgctctttttgaattgaaaatgcatatgtataattgtgctctttttttgtcattccgttcagatttgttgcaactgttatttaaaacttaaatgtgtagctagtttgaaacttgaatgtggatactgctttataattgaaaatgcatatgtataattgtgcagtgtatactgctttatatgttgttttgttcccttttgctagaactattgaattttggggataatgtttacatttagctgaaaaatgatggattaatagattggcaacagtgtagttagataggttgggtagctagctagaaatagtttgtctagctagctagttaggggtaatgttcccttttcctataaataaagcatatacagggtttgaaatttagttcaaatggatgaattgatagattggccgtagatttaatgtagttccgaggttatcaaaccatcacagaatacaaaatgcatggggaattttggtggattggtcagtgtagtccatggacggaaccgacctagacaccaaaattctccatgcattttgttttctgtcattctttgataattaaggaactttattaggtttagggtttgaaatttagttcaaatgaaagaattgatagattggccgcagattaccagcacttgttgatttatatacccttgttgtctatgaataggtgaattgcatgaattgttgtttatatacatgatttatatagccttgctgtctatgaataggtgaattgcatgaattgttgtttatatacatgatttatatacccttgctgctgctgccacataaattattgtgggctgttttattatctacacttgcccctgcttgataaattaattgtgggctgtgatgaatgctcaagaacagaaatacctctaaacttaatctttaacttaatctttttttaatgcataagaacagattgtctacacttgttctttttttctgcataagaacagattatctacacttgttgatttatatacccttgttgtctatgaataggtgaattgcataaattgttgtttatatacatgatttatatacccttgctgttgctgccacataaattattgtgggctgttttattatctacacttgcccctgcttgataaattaattgtgggctgtttaagaaattattgccatgtgtatgataatttttttgatgccttgctgtctatgtttgcccatgctgctgcctatggttgccttatgttaaatggcgagtgatgaatgctcaagaacaaaaatacctctaaacttgatctttttttttaatgcataagaacagattatctacacttgttcctttttttatgtacacttgttcttttttgatgaactgctacccctgcgccccttattcattttttctgcatagattatctacacttgttctttttttaatgcataagaacaaattatctacacttgttctttttttctgcataagaacagattatctacacttgttctttttttctgcataagaatagattatctacacttgttctttttttatgcataagaagtgcccctgattgcctgattttgttgaattttgatgattgttataaactgaattgccatgtgtatgataattttttttgatgccttgctgtctatgtttgcccatcctgctgcctatggttgtctatgttaaatggctagtgatgaatgctcaagaacagaaatacctctaaacttgttctttttttaatgcataagaacagattatctacacttgttcttttttttatgtacacttgttcttttttttggattgataagaggagactatatacacttggttcttttttacactttactttgggttgctttttcctcctagcagctgatttcctcttttttttcctttcatgcaaatgatggtaattgatacataatttagtacaatggtaggaagtttataagctttttcgcgaaaattagaccatgacaacgcccggcgcaaacccgccctccccaacacctgcgaggatccaggaagaagcaaacccagccacggagacagttgccgaaggtcatcccttgacaacggcagtcgaaaaacccgacattcatggtaatttataggacaaattttcaccacatgaccacataaattttagctagcaccccttagcaaatgttgccttctgtttgtgcagcagaattgccgcaggaacaacatacatcgatgtcgggcgggacaagtgcaagtaggtcgagtagaaatccctggtcacaaaatatatggccgaccacagtgctagttataagagaggttgacgcaagtggtaggcccacggcgcccaggactgtcattggaagatggtctaactgctgcgggctagcggcacgtgaaaacttcgggatcctccataaagatatcggcaacgtcacagaagccgagaaagagcaagcttggatggcaatggagaaatggttcacaattccggctgaagcaaaggataggctcaagcggaaggcattccagaagttgggtaaagcttggaagaattggaagtcgaagctcttcaccgagtttgtcaacccgcccggcaatcatacgccgttcgatgaatagcctcaaataaccgaggcggtgtgggaggatttctactctctcaagaacacccaagagtttagggaatcaagcgaggcacatcgcctactgcaacagcggaatgagcacccacatcggcaaggaggcaatatgggcccaagaagatgcagccgctgcagcagcgaatgtccctgccccgttttcagacatccctgaacaaagagctcgcaactgggcgcgggcaaggggtaaggtcaatccagacagctctgtcacatttgagaacaaaagtgatgccgtcgtctatcaggaactggtgagttcactacttaacctaactaatttccattcgtacaaagtagaagtttgtataaacgactcctttttttctagttgggcttggttgctgaacaagcttcacaaagcgaggttgattccgcgccgaagaggcacgaagatgacatcctcacaaaggcgctcggaaccaacgaacatcttggccggactaggggaattggtagcgatgtgcactggaagcatggactcccacagtacagctcccaatacagcaaacggaaagtctccaaggaagagagggacgctcgtttgaaggccgaacttaaggttgaggtcattcaagaactagaagctagcatgaacgctagggtggaagaaagggttaacaaggtcctcgccgacatgaatataccccgaggcacaacacctgctgtgcatccaactcctcgtgcacaacacgacgcgagtctgtcacagtataggagtagttgtgcatccacagaggtgccggcccctggtctcccggtcgcaccactagctgcagtggaccacatagaggtaattgatgttatccaatccatatctaataaaaaaacatttacacgttccaatattaaattcagactttcacatatgcagggcgtagcacagtgtgtcctactggcgagggtccacccaactttcgctcccgaagtcgctgagggcatggctttcaagccctcggttacagacaaggtccacggcgcagacctgctagctgggtatgccaaggtgtccatcgatacagtaaaggacacctggtcaggctatccgctgcccgtgccccccaatgatgaaatcatgactttgggcaatgcgcgcaagacatttatacaatggcccaaagaagacatagttgtgaagatgactcctcatctaagtcgaccgacggagcttacacctcccaagtctaagctatcaattgaggctccccgtggaccggcattgtcagtacctcattctcctggtggagctgatatggacttggcagatatagctcaaagcttggctctaataaagaccacaacaaaggacgatagctccccaccacttgtcaaaggccagaagcgtgaacgcggcaaggggaaggtcggggagttgccgccggagccaaaaaggggcaagactgcgacgtcgatgccggtgagcaaagcggggaaggtcgtgagggcgccagcccaatttgagctaggcatgccattggtggaggacaatgtgttagccgtgatgggtattgtttgccgagagctacataagcaatacatggagctaagcaatgccaagcggaaaatgagggagtcatccatagttggacatcacgaccaccagccgttcctatcatcgcctgcctatataactataggctttgatgacctcttcgaccttttcaggatccggaagttggacactggtcttctaaaatgctactccttgtaagtgcataccttctatacctgtgatatgattggactatatctcctaattaaattagttctaatacgtaaatgttttaaggttgtgttggatcgagagtcgtcgccttggtaaacaggttgggttccttgatccatccatggtgaacgaggttaatttacgacagagtttcactaaggtggttgactatgtcaaccagtgtttatgggcccatcaagacaaggagtacatcatgtgcgcacacaaccaagagtaagaggacaatacccttcgtgtatattatttttgaagttaagattcttaggactaacgctacataaccactacgcaggcgacattggattctcctagtcatcgtacctaagtggactagggttacctaccttaactccaataagtccaaagattatgatttcactgaaatcaccaaggccttaaatatggcttggggcccatatgtggaaaagggtggtaggcacaaggagggcaaggacgaactttaccatgacaccaagttcgcatgcgcacaacagatcggaaaccaatgtggtttacacgtgtgccacaacatgtcaacacttctaagagaggtgaaagatttcaaccctgaggttgttgctaatggcgaataagctcatttcaataccaacattgctattcaaaacgtgctaacatcttatttattaaacagaaaggtagagctggcctcaagatctcacccatcaaccccccgctatgagaggcgaagtgtgcgccttcattctggtagaaataatgaacaagaaaggacgttttcacgtcaaatagactcatgaacttggctagataatttattgtgatgtaaaaaagatgttttcataatttcttgtgatgtaaaaaaatatgtttttatggagtgcaatgtaatttactttcatatgtgcaatatttatggtagtttactaaattgtcatcaaatttgatcaactactatctacattgtactattcatctattttctcctttttttttccttattgacaggttgtggaggtcgaggacattatggctttaatccatttggtaagtatatgtgcggttatatgagcaacgaccaaaattgtgactttcaaggggtgtgaatttgctgtgcaaaattgtggcatttgaacttcatatgtgaatgatgtcaatttttgatatggatctgtgttgttggggatctctgatgtttgagatggatctgtgatgttatattggggggtgactggaatatatccgtgatgtatcggtgtttgagagggcatggctagcaaatcctgaggctagccaatattcagcatttattttttttttggaattaactcatcagtgacgggtcagaacaaaaatccgtcaaaggtaacatcacctgtgacggactagcaaataaaggcccgtcagaggtgacctacctgtgacgggcctttacttttagggccgtcacaggtagatcgcctgtgacagcttctaactacggagaccatcacctctgacggcctttatttaaagggccgtcagagatgagtcacctttgacgggtcccaactcgccctaggcaagcggagaccaacaccatgagaatatatgacgaaataaagccatgtagtagatgacaaaaaatagatggatcctatctgactcaagcgtccatcaatttagcttttttctaacaattttttgagagcgatttgttttttagtagatggtttttttttcttgcgcggatttttaaaaccattttttttagaaatggcacgttttttctgatagttttttcctcgcatatttttttaaaaaaatattttaccgaccatggaaatatttttttctcgcgcatttttttatttttttattgaagatggaaaacctttttagcgtgttttttttgctttttttctgactttttcctcacacgtttttttgaaccgttttattttctcgtgcatagttagattagattagagatagagaagagatatataccgattagaaatcggattttgtttcaccagggaatgggacgaacttttttagatgtcttttcagatttttttttcgcctttataggaatcggactttttttccgtttttaaaggaatcagatctagtgtttttttcaccactttttttttttgccttttatatgaatcagatttttttcccgtttggatctactgtttttttgccacataggggaaaaagacttttgttgttattgtttttctttattttcttttttgtgtggcttttctttttctttttatgtacctttgtgtctttgttctctcttttattatttttttaataaaaacgacctcaagtaccttattgtaagattatagggactcaaatataaatataaaaattacaaggactcaaatgcaaaactacaaaccaaaaattaaaatcaaatgctctcaacctgtaagttccgttttttaaacagatcttcaatccggcacatcaatttttttcaccaatctagagtcggacttttttttgtttcttacagggaatcggatatacgagtcggacttttttattttattttttgagctatttttttacggacgtaggaagcatctctttttttattttttatatttatataagtagcagagaagatagagatagagaatcggagaggtttttttttaatttcttttgccctttttttaccgcgttaacggagttggattcgtttttcttttcccttattttcgccctttttctggatcagatggatttgatttttcttttctttttctggttttttttgcccggttttttttcggacatatttggtttttttcgcccttttttttccgttcggacagctttgggtttttttgccctcgttttgtttcgcctggttttttttgacggacgatgaaaacacctcttattttcatattttcgaagtagtagagatagagatatcatacatatgtataatttttttctttaaacacatatgtatatttatcatcaaatttctcctcctaatatttgtcagatgtaattacagtacaatcgtagtgtaattacactgtaacttacatataattacacctgggaataaatcctttcacatatgtgtgtgctgtgatttttttctttctcactagaacaaatcttataatagatctaacgattcaaaattacgtgaaacttacatacaagttacactgtagttacatgcaagttacagtgtacttacatacaagttactgtacttacactacgattgtactataattacatctgtcaaatttttagtacaaaatttatcgacaaatgtataggtggtcccatctttaccataattgatattgcagcacgtacacttctccctcctctctcccttcccgagaatgctatccagcgaacagtggcacgccctcctccccgcgcggcgcgacatgtgtcgcgcgcatagagggggcggcggacggcactgcgcggaggaactttttttccttttttttcagtttcgcttcttttttttgttttgttttttttctgtttttcttctcgccttcggtttcatttttttctgtttttttctttccgtatatttttcggttttaatacgtatgtatgtaaactttctatatgtacaaatgcaaactttttatacacgtatataaaatttgtatatacgtatagaatgtttgtatatgcatatacaaattttgtatatgtgtattttttgggttcttatacgtacgcatatcaattttgtacaaatacaaactttgtatacgcttatacaatgtttctataagcgtatacaaattttgtatacgtgtattttttggggttttatacgtacgtacaccaattttgtatacacgtatacaaagtttgtatgcacatttataaagtttgtatacgcatattttgttatacttacatatacaaattttatatacacatattttcaggtttttatacatacgcacacaaactttatatacatgtgtatattttttatacattaaaagtgtatacatataaaaaattatatatatacacacgtatgtatatagtgtatatatatatatatatataaactttgtatacacgtatacaaaatttatatgtatgtatatatggtagtatatgtataggagtatatatatagtagtagtatagactagaggggggcagctgatcgcgcgcgcggagcgctgcgcgactagtcgcccctcctccccttcttctcttcctactacattacaccacaaattttttttttagaaaaataaaaagttagaaaaatttatggatagaagtactatatataaaaaatttgaattcaaatttaaatttgaattggctatgtaaacttttgacttataaactttggatctgtataaactttagatgtatagaaatactatacatagaaaatatttgaattcaaattcaaatttaaatcggatataattcaaattcaaatttgaaacgggtatataaacttttgacttataaactttgggtctataaactttaggtgtataaactttagatgtatataaatactatatataaaaaatatttgaatccaaatttaaatcggatataattaaaattcaaatttgaaacaggtatataaacttttggcttataaactttgggtctataaacattaggtgtataaactttagatgtatagaaatactatatataaaaaatatttgaattcaaattcaaatttgaattggatatataaacttttgacttataaactttagatgtgtaaacttgaggtgtataaactttaggtacataaatttactaaaataggaaaataatgcggtgccaaaaaagaaactaggtggagggaggggggcgctacccgatcgctaccccatcgtcagggcgatcgatcgcccattagaggtttcgctttctttgatcaaacagatacgtaggtgtttcggtcttctgggcattttttttccaattaatgaaccaaagctgccaaggtaagtttcggctatactggtatttcatggcggtactggccgtcctgtgcaaacactagtaaaaaaacccctataggtaccggttgggaaccggagataggtgtcggtttcccagccggcaccaatgacgtcatagaagcgacacctttgtgctctcccgagttaaaaaaaaagaagccggctccaagccgagcagatggacatcaataatccccattcaagcatgattttacagatcacaaatcaaatcaagcagatgaatgataataatcccaattcaagcaatccctaatccagtccatcaccaatcacatatatgaacaaaacatcaacaacaaacaacaataattcccaggccagcaatcacagatgaagaacacaagcaaatgcacaaactcgcttgtcaatccaccaagtcacctctgggtccatctccacgcaaggtcgccgccgaggtcctctccgcacaaggtcgccgctagccgccggagagcgcacgaggttgcctcctgctgctgggtcccctctccgcgtgaggtcgccgctggccgccggccaccgaccgccaggtccctcttcatgctgacgtcgccgcacccatccctctctgtgctgaggtcaccgccggtggggaggttgtcacgccctgaagtttttcccttcttctttccttaaaacttgttaaataaatcgtccggagaaatggttcaaattaacctagagctaattccctaactaatgaatgcaattaataatcggaaatagcgtggtggaatttttcttgagttccccatgccctaatgcattaacaagatttttagtggaattttcataggccgcaatatttaatcccaggaatcctttttcctttttcttctttttattttcccttttttcccacttcttgggccgtcggcccagtccaccccgtcgcccgcgcgcgcccctctccttcttgggccggcccgcgccccttctctcctctttgggacgctgataggtggggcccaactgttaggtcgtccccaacctccagccacccgcgccccgcagcaaccgccgcccacgccggcgccccacctccccacgccgctgtcgtgtcccgccttatccgcgcccccactccgcccgcacctcgcgcccacatcgccgccccactcctccacctctcccgctctcgcgtgcgcgctcgcaaggggcggattcaattttgaatcctctctctctctccactctcccacgtctccggccacataggggccatccccggccacgtccgcctctcccgtgcctataaaatccttcccccgagcctcctctccccctttccgctctcgccaccctctcccgtgcctcctaccgagcccgcgtcgctcgccgctagcgccgccgcttgccgccgcctccagccgcgcaccaccaccgctaaagccgccgccgccgctagcttcaccgccgcgtgggtcatctcggccactgcctcacgttgccgaaaacccaccggaaccccatctccctcgcgagccggtgagctcttccatttccccgtcttcggccggcatccctgctcaccgtggactctttctccccctctaacctctctcttttactctcttagggtgtcccggagctcggccgtcgcccgccgtcatcctccggacactcgccgtcgccgttcgttgtcgccttctcccgcgctagcgaaaccccggtgaggccccccgcctcctcttttcccctttcctctccttcctcccgctgccgccgcacagccgcatgggccgtgcgccgccgcttccgcgccggtcgccgctgcctccctcgccgccgcttgccgtcgccggcgaccgctcgctgccgcctctccccatggccagccaaccggctttgtgccgagccgagccgagccctgccgccaatcacggcgtccgatcggcctcgggccgatccggaccgtcggtcccgtggaccgacggtggaccacccgcgtggtcccggtccacggtggaccagccgcctcatgccgctgacatgcggggcccgcctgctggcgcccccgcatccactgacgtcagccctggtcaatattgcgcaataaattgattaaggacttttctttattagtaaaaacacagattatcttctaaaattcatatctaattcatccgagctccgtttaagtccattcaagtctcagtaaattcataaaaatccctagaatccattaaaaatggttttgtttcctgtttcagtagtcttatagcatgttttgcttgtgtgctttgtttgtcgcgtagatttcggccgtttcgtcgatccgcggtttctcgaagacgttgctgtggtgagagcaaggcaagtcatgcattacaatcgatcatattgtacccaatttacaaatatcccatatttctattaaatgttgcattcttttacaatgtcatgtgggatgggtcctattactcagccatttattgtttaccttatgccattgataacttgggtatcaaaatgactagatgttggtttaagaaatgcttagccatgcttagttcaactagtataaaaatggggatcacattattacagagactttgactattagcatagctttggattggtgccatcgcaatggtgttagtcaattaaaatacactgaatggtgggctgtgggtgcatggttttgctggtcgcactcatggcaattaaggagtgggtaccacaagcgggagtgggtacctgcttgatctgaagtatagctcgaccctttcctaggcaccagtggcgaggatgggcgtgatggagttgggtcgaccggggtgtccagttgtccaactgccagattcatcgtggcgcaagaggggaccgcccactgccttttgaggggtgggggtgaaaccttagcgtggtgtggatggttaggggaggcctatgcggagggtctggtcacgatttccccctttg

SEQ ID NO: 27334 - DNA, 6379 bp, Oryza sativa
  unsure (1)..(6379): unsure at all n locations
gcctgtggagtggagtcgccccgctgcagaagtcaaccttccgagtttagctcgcttttatcttttccgctgcatttgtaatcttttatatttttgtaagacatggatatgtatgtcaacaattgtcgtttatgtacactggctggtcctggataggggtttaatgcatatccagcttggaaattctggttcgtgaatttctgggcgtgacacgcccgttgcgggtgacgtagcttgccggcttggagagggggtggagggggagggggaggagagggtggcggatcggaggaggaggagagtggggagggggccagaccgncagaggggagggggaggggagggcacggcggaggagggggccgcaggggacggcgggggagggggaggggagggcgcggctgaggagtgcggcagaagggctgagggggccgaggccgcagaggggagggcgcagataaggttaaggataaggatggagcgtgtgcgcgtggatagaccaggtcgatcggctcgactcgcccgggtcggctcgacttggtataggtgccctttttttacagaaccgacacctataatatattataggtgttggttctcttaaataaccgatacctatagtattggtaccagttttaactaatgaaccggcacctatactactttgtaaaggtgtcggttctttatttttttcatcttgtggatgtgggaaaagtcctataggtgtcgtgttttacatgaaccggaacctataaggctgatacctataaaggtttttgtagtagtgaaattctgtctgtgaaattataacaagggatttggggcaacaaaccaacagtgaaaatcatttttgctagcagcccacttaagtaacttgcaacaaacatcggtttttgctcgtggtaaggagcactgactatgggatgaaattccctatgttaaaatctcgcaccgatcttatcttctcctactttcacgatcttatctcctcccactctcacttggactctccctgtccttccccacctctcctcttcccttcccctaccctgtgcccccacgttctccctcacctcttgtcttccctccccaaccctgtggccccacctcacccctctctgacttctcttcacgtcagtgaccacggtggaccggtgacggcggcgacaacggtggactacgaggggcgtgggccgtggatcctcggccaggaggggcgcaggcgtggtggattcggccgccacagggccacgggtggtaaatcctatcgtcagagggccacggtaacgttgccctccctcccctcactctctcagatctgatggccaccctgatttcccctctccttcctctctgtgatccgatggcggcgaccttgcctccccccaccccccaatgcgacggcggcttcctgcagtctcgaggttcactcgaagacagcggacgcagcagcgacggcgatggcgacgggtggcagatccggtggtgcgatggttgtataccggctataccctccctctcccatatttggccgtagggagatggcggtggcagtagccgaggggttggcagagaatggaggatcctcaaatctccaacctccattcttgtggcatcctcaatctactggaatatatatttcactgaaaggcaaagttctgtcatatcatactcaactgtctctccttttctggtcaaaattcacgatggagatttggtctatagcttctgttacaacacttcaatagggtgaaaatgaatgaaaatgtgtgcggcccggtgacaggtagctgtcgatgggcggcgctaggccttgtgaccagtgggtgagcagctagttcggggagggcgctgagactcagttgggcgtgattgaatgcgtgggtcgatcggcgacaacgttggccggagatgcgaggtggtcagtggcagtgagtgatggagtaaaacctgatgattgtgatggctggaggcggcacacggtgggatctcgccaaagctgcttgccaagggatgtcgaggaggtcaacaaccggaacaaaatgacctggtggcttgctgggaggttgggggaggatggcaatgacgcgcgagggatgatgacgatggcgtgccatcgagaatttccctcaccaataaaaacaagaggatggggcatgtaaggttgagcctccgggacttgtagtttggagaggtgatttaggggcttccccatattgagggctctagtagggaccctgctggacctgtacttttgatatcaaccgtaaaagaatatttggggactatatttgaggatcccgctggagatgctcttacgaccctgaacactattatgatccacaccttgaatcatactccaccttgtaggatcgaacaatatgaagcaaacgaatcagaggggtgtgaattgttgtagtacccaaaaaccaaaccttccagaggaataaaaaattagatagcgatcggtgaattcgctctggtctgactgcccaccatgtcgttgttgcctctcgccgctgccaatctgactgccatattcccactggtctgaccgcgccggtgtcgtcggtctgaccaccggtgttccataaatcgaaaatctcccaaattagattgaatctttattacttctctatgtgtttacaaagtggaacaacaacactcctcacggaaatctcgactaaacacgaaactctaacttttctcacaacgcaactctctcaaaatcgataccgggaggccataccctcactctctttatacccatggtaggcatcctaaatccacgaaccaaccttgtacaagatgtcctaatcccctaggaaaccttcacgtacaagaaacggacattacaaactccaattgtactaaatttggactactccaaatttgactccacctctcatacgcacacaatatctccatcgtataccatatagaatcttcaccaaccatatgcattgatgtcaaagcttgactacttcaacatctctggcccgagagacagtgtgtgaagacctgatggaccgttggtgcctacagggactatacatgtgagaccatcgttatacagtaaaggggcggggaacggttaacggacactaatgtgtgaatggagagattgttgaatcgtcccccacattgattttggatggtcaagagacctaataagtgggggagcaccataattcattggctatcttttaggtgggaaaagctttttatgattctatagaacccagctgtaccgaacaacgcaatcaattcttatatacgtggcattccttactctacttatatatgacaagacaggaagaacaggatgtgaaggagataaagaaattcgatagaacatcaatgggttcttgccgtggtagctaggatgcaaatcctctacagtactgctgatgcagtagcagtggttgacatgtgggtccgggcccacatgtcagtgtctgctactgcatcactgtggtagctagggttgggagtaaccgggaaccatcttattacacacaaccatcttcctacaaaattctcagctgattatttgtcaggttagtaggcttcagtatgcacatctacccgtcacggttcattgattatattgatctcagaaggacggtacagcatagattagtggaaatttcaaaataggcacaattgcatccataccctcactttgaactctaactactgttttaccccccacattttagggtttgcatttttccctctctttttgaatatgaaccaattgtttaccctcatttttaacgtctagtttaatagtgttagttttagaacaaaaggacatttatacccttagttgatgttgcttttttgccccaacttttatactgcctgcttctcgtgccggaagccccgttgccgtctgcctcgccgcgccggaagccccacggccgcacaggccatcgccacgccggaagctccacaaccgtcgcctgccattgccgcgcaagtgagatggaagcctgcgactgccgcctacctcaccgcacaagggagagggaagtgtagccgccgctacaccggagacctgtcgtcgactcgcgctcaactgctgccgcggccatcgccgcatgcacttcctgacagaactgccgcgcacgctggaatcgacaccatcgcggcggttcccgccctcgccgcgcatgtcggaaccgccaccgtcgccgagcacaccgaagccgttgccggtcgccgcctcaacacaactgagctcagcgaaggaatgggcttgggtccttatccattcactcaagggtacaatagtaaattaaatcctttttctgtttcaatttgtatttttttaacccaaagccatgggtgtcatctaacgggtgtcaagagtgagggcaaacggcgtgttcgttttcaaaaagaggtggcaaaaatgcaaaccctaaaaagtaggggtaaaatagcagttgacattcaaaatgagggcatggatgcaattgccccttaaaaatataagtaaaaacacttcaagcaaagtcaaagtactctgctacttgctaaccgaggactatgtcacggtaatgattcgccatacattccacttgctcatgctttgctccaagcttgtgtttcattatagaatttacttatcatctgctcctccatttgcttccctctactccactaactattcaatttctttgttatatgatgttgtttagttacatgaccaggtgaagtgttttggggatggactgataaaagaatagctactaccccaattttttgttgctctgtcagtaatgtgtatgaagttcagtacatgcattcattcatcccattaaacatcagaatcaaacaaggcgcccattgaactcggctatacaattcttgaatgactgaaatgtttattagacgataaatttcctctgtaccataccatctgatctcctatgctctataaaagagcagatgaagtgtagtagcaacctgtttttcttggctgatgttgagagatatgaacaacaggagctcattgtgtttagccagtctactcactgcttagcttgctacgtacggtaggcctgggtggcattgggacatctcacataagccagcggtaagctgttgactgaccactctgcagttccagtctcaagcaagttacagactcagagtacatcaatggacatgtttggtgttcaagcctgaaccatttgatgttagcaaccggtttctccacaccttgcagagttttccagggttgtttggtacttgcttctcgagtggatctggtcatctcaacgtcgagaaacccatctccggtctactcagttgtcttgcctaggggaacatgaaccttgtaaacttggaacaactgatttgggtgaggcggtggctgaataaggttactttgtgatcattcgcacgagcacggcggagcagagcaagacactttgactgaaacggagaaggcagggttgggtttccttcgcaaaattccagcagtcgccgtcatcctcgaaacctctcgccgatgacactgtgacgctctccacgaacacatacgcttgcaagctaggcgacgcagccacacagcacggcctgtgccagcaacgatgtgtgataattaataagattactgttggagatcgtctaggtagcctcttctatctgataaactggtacctagcatctctactgacaaaataaaactgtcacaaacagaaacatcagcacattaatttggtctcaatttctctttttgcttcagtactacctagctaatagagaataataacagcattagcagtttgttaagcgttcaactcagctgtacagaactactggagaaagcgctcaattttcagaaaggatcctgcccttcttgccatacttataaaagacaacaccaagtattataggccgagggggagcgatgaagaagagtcgatggagattgattactctagtgtcttgcctattgtaggcttgggtgcagtcctattaccgataaccagcttcataccaaattctttgctgatcatgtctcaaatcagaaggcacaagtagggatgaaaacggatcggatacggtcggaaactacctttatcatattcgttttcatattttttctcggaatcgaaaccggaatcggaaacccggatacgaaaacggaatcgaatattatcgaatacagatacggagcgaatacgaatcgaaacgaatacggtaacgaatattaatcggaacataaaaccccctcaaactgaccttcacaaatcaataaagaaatataacttcttgttttttctaatagagcatgttacatttgcaaagatcaacaattaataatactataacgagaaacatccacaaacttgctgcaatg

SEQ ID NO: 27335 - DNA, 1858 bp, Oryza sativa
aaattagtacacgatagccacgagtatgtgtggggtaactaagaaacaatctatcggtagaacgtgcctcaaacttatccaaatttttagatttcaagataaagcacttgcaacaaaaacacgcaaatgtgaaactttgggttgatgtcaaaatcgatgttcataagaagtttttccaagtttagatctcaagaaaacccgatttgaaatataacaagcagtattaattgcctcagcccaaaattttctaggagttttatattcatccaacatcgttctagccatctcaaccaaaacacggtttttcctttcaacaacaccgttttgttgcggaacacgaggagaagaaaattcatgttcaagacctctttcgttgcaaaattgttcaaaaaaagcatttttaaactcaccaccattatcacttcgaattcttttcaaagaaccaggaaattcaagatccaatcgaagaaacaaaccacgaaagtgttgaaaagcttcgtccttagttgccataaagaaaacccaagaatatcgagaaaaatcgtcaacaataaccaacacatacccctttcctccaaccaaatggacttttacttgggccaccttggcccttgtgtataacctttcccgggccttcccgccttcacagaaacaataggagcatgtgaagaaacaaccatcacaggtgaaaccagattttcaaaatcagctttaaacactcttccatagcaagaaatattcaacactgaatcaccacaagaatcaaaaactttacttccagttttcttaaagtgaaactcaaaattttcatcaacaatttgtgaaaccgaaaacaaattgtactttaagtcttcacccaaagctacattcttcaattcaaatttctcatttaccttaaccaaacctgtagcgagaacggcacttgtagaaccatcaccaaagataatcgattcagtctttgatgccttcttgagtgaggagaaccaatttttatcaccggtcatgtgccgcgaacaaccggaatccacgattcacacgttctccttccttgccaccaaagcctacacacaagcagaagtcgaagcctcagtactggggttagatgataataaaaatttaggaatccagtactgagacacacgaccagaaatccaatacgcatatatccacgtgcaaaatcaattttagaattttcagaaaaattcctccgaggccgtctgaccgaggtacagtggccggtctgaccgggggccggtctgaccgccgctgtaccgccggtctgaccgatgcccggtctaaccgacactcagtagccggtctgaccgcgggacccactgcggtctgaccggtttcctcgagggaaaaccagatttttgccactttgattttgcaaaagcaatctctctctcctttttctgtttatgagttaatctgaaacaaaaaccaataatatgtccatcttttccaaaaaagaacaagtatatttttcacgatgattagacacattggtagtattagaagatttagcaacacaagcaacaacaggagattttgcatgcacaacattggattttgaagaagatgcactcaaggtagacatgataccagcagatttaaacacagttttgttagtatcaggtttaaccaaaatctcaccacttctagcaccaacacctaacacaacaagaggatgtctagaattatgagcataagggttaaaacctaaaccacgattatgtgtgctaacctttgattgatccaaaattatgttgaggttcttcttaccatcagaaaatcttagcaaagaatttttcaaataagacacctctttttccaaattagcacaattttcacaatc

SEQ ID NO: 27336 - DNA, 24585 bp, Oryza sativa
tcacaaagtacatgtgtgcaaaacaaaactataagcaagagaagatctatttttcaaatcatgtgcagcattaacatctctaatttttgaaatcttattcatgaaaacctcacaattttcgcaatcatcatcattaggaataagagattttaatctagcaatttcagatttaaaagattcaatgataaattcctgttttctatacatcttctcacacttctttttttttttcactcaagatattaatagcttcctcaaaagcacttacctcattatcttcatactctgtgtcagattcaccacacgccatgatgcaaacatcggagatgttctttcccttatcatcatctcgactttcaccatctacatcacttagtggctcgaaggtggcgcaaacttgttgaaaagccttcctgagattctccagcttcctcccttgggatgaacccttcggcttgttgttgttggtcttctcaccatctttgtcttctcttttgcctctcccaagcttaggacaatgcgaacgaagatgatcaattgaaccacattcaaagcaacgatttggaccacctcttttcctgttgctggcattattcatagctcgagcaattctgttagcaaccaaagccaaatccttctcctcgatctgttcgagttgatcatcggatgtggcaataaaaatagcaagaaaagaaggcttagatgaagaagcatcaacatccaaagaagaagaaaaagaaaccaaagcacttgacttagaatcaacttttcgagaaagaacattcatctcatgtgttttcaattttgtgtaaagcgaatccaaagtcaaagtagacatgttaacagactcctgaatagatgtaactttcatctcccaaatagacatatcaagaccattcaaaaagtgacgagaaatctcagattgtggataattagcatcataagaagaatcaacagatctaagatcaatcaaaattttattaaacctagaaagatagtcatccaaagcttctccaggtttcatctcaaatttaatgtactcctttttgaaaatatcacgatgaagttctttaatgttatttgttccttaatgaaaattactcaaagcattccaaatctcatgagcagttcgaaagtgcgcaacacgatcataatccgaacgataaataccactcaaaagaatgttgcgagctttacaattttgttcaaaagcagttttttcagcagcagtattaatagcttcaggaatcacataatgatgagaaacttttctccaaatattataatcttcagccataatgtaagattgcatcctactacaccaatgagaaaaatccattccatcgaaaacatgaggcttagttgaaaacctagcgggagtagccatggcaaaaactctagatcgataaaaatccaaagaagaaaacaaggctctgatatcacttgtaggatcgaatcacaagaactaagccaaccagaggggggggtgaatggttggtatacccaaaaaccgaaaacttttagcagaaataaaagttaccctcgaagtcgacggagatcggtctgaccgaagttgtcttaccgatctgaccgctcggatgccgtcggtccgaccgcccgtatgccgccggtctgaccgccgcttgctgccggtctgaccgtcgcttgctaccggtctaaccgctggtagatcgccggttagaccgccgaaacccggtgaaacacaaattgaaaaactctaaaagtggatgacgactttattgattctctctgtgtttacaaagtggaccaacagcactccttacaaaaattttgactaaactcgaaaccctaactcaaaactcaactcaattgctctctaaagcgataccgggaagcctcacgctccccctctatttatacatgagatagctagcctaaagccatgaaccaaactcatactaagagtcctaatcaccttaggaaaccctctagtacaataaagaaactttacataaccaatcgtaccaaatttagactccttccaaattcgactccgcatcccatacgcacacaatacctccatcgtatgccatatggaatctccatcaaccacgtgcatcaactctagccttagtatcccgcataatctctgaccaccacggacgtcgttttatcccgaagccgactcccggtccatcaccgcgaatactctcccgagacatcgagtcacctacacatgaaataaacaaagaaaccatattccgagaccaagctatctccaacttgactcattagtagcaaacaaccgtattacatacgtatagtatcaatctagaagtcataatcatgaaataatcacggatatccaaacaaacaacccgaaaccgaaaccgacacagcgccggccggtcagaccgcgggctggccgatccgaccgcgcgcataccgccggtctgaccggcatacacaacccagtctgaccggtcacataaaatgatagaatccagcgatcacctgtaaatccaatttatctccaaaaccacttcgtgaataaattccaaataacaaaccaataatctccgatgcccaattgttcatcacaaaataataatcaaaaacacctttgattttacacttccgggagcttactcgtgccaaagtagatggattcctctgtgtcgcgccacgccgccgtcgttgcgcccactgacttcaacaaccaggccgagtaggagcgcgggagcgggtcgactccgtcgtgtctgacgtgacgaaggggcttatccatgatgtcctcctccctcccggctccatcgacggctccatggtggtggtcgttctcgccagcgcggtctacttctcggattcatttgttctgttgtgtgaaggctccgattttttcatgcgatgctgctctgattttggggcgcggtttggtcttccatgcttattggtagcgctcggatttggatgctttcaaggacaacaagggactggcatggagccttccaatgacggcagatcatgctgttttaaaatttggatatatagtatgtcaatttggttaacggtgtggtctagtgaaattttaggaccatgatatctgtggttatgtggtatgtgcttaaacaaatgtgtttcgtgcaacatgaaacataatagattttgtgaaatttactattcggcttattttctcggtttataagcccatagcttaaccaaccaaacagcttccatcgatggtagcgatccaattctaaggtaagctaaaggatattttacttcaagagggttttcttacacagaacacccacttccagctcttgatttagatgtctcctgattgctcaacatataaaatataaaggacatgatcaagtagtacgtagtacagattgaggaagacatgaaaaagattacatggagattgttcgccctaatggcttgctattgacatagtagatagctcggcttgggaggcaccaggaactgttctactatcatgaagaaccagttgactagtacatttgatggtacgaactcttgaccatttgatgctagcaaacccgcttctgcatcttgcgtgcttcttcaggttacattaggtagagggtggtttgatgaggcgatctgatcagctaaatgtcgaaggcacaagctccatggcagcttgctagatctgttcgtaaagccatcgatagatcaaacgcaagcactacatatggtggtggtggtgtggagatgtgatgtgcgatagtgagattattcactagaagggatatcctcatctcaatcgggtggtaagcccccatctcaatcgggcacagcgtccgttacaggctagaagtcactgatgtgaagagttatctcaatcgggcaaacggccgtcacgaatgaatatatcttaatcgggccctaagtaaagcctgtcaccgatagctttgacccagacgaccagtcaaactgtagcccgtcacagatgacctatctctatcgggccacaactagcgcccgtcacagatgactactaacctttatcgggcctaaactagagcccatcacatatgatactcatctcaatcgggcctaaactatagcccgtcacagatgactgatgacctcaatcgggcctaaaatagagcccgtcacagatgactactcacctcaatcgggcctaaactagagcccgtcacagatgactactgacctcaatcgggccttcctgttcttcttcatcggtgggggttcatgaatcgccttgctgtcggcctccgtttggtcctccccaaaatccgtgtcgtactgcaactgcacatcgtaagattgtacatgacgatcttgagcaagaggggctaaaggagcagaggtgggtctctttggtggacgaccgcctggtgcagtggttggcctcgctgtaaccctgatctcaatgaggtccatgggccattggatgaaggtaccacgggcatttcctagtgagaggacctcgtcgttcggtggatacttcagagggaatagctcgtatcgggcttcaccgagtcgacttgaacttttgcatagtcggccctgagttgcgctccatgcactcttgtctctggggttggcttgtacgcaagtccctcggctgctggaaccgtgaaggtcgtcatcaccctaactgtgagggtgcagctcgttggttcctgcgatagattaatcaattttttttagaatattatatatcatatggattcgttaagtctttcatgtattgagtaagttcacggttaccgttatgtggtcgacggcgctgtcgaccgatgttggattttccaccaactcagttgatgcgcaactgctgcgtttttgggtgggacttcctaactctttgtgcgcagcagcagcggcggcctgggggttctgttgctctactcggatctcttgcctaatcttagccctcattgactcgagcttttcgtcgaatttagatgtcagctcagctcttatcgacgcccggattttggcttcaaggcgtgcatctttctccgccttgttggaagtccgcttcgtgtatgttccttgcaatcggagcatgccttctttctttttatagtttgtccggaaagattactgagtgcagggtagtcattaatggtgcagaacaatagaactcttagcttgaagttctcctgaccatatgcatcctaagtttccacaccttctttccaaagaatctccagatcgtcgataacaggctccaggaatacatcgatatcattgtcgggttgccttggaccttggattaacaagcacaacataatatatttccgtttaaagcataaccatggcgggaggttatagttcgcaataagaattggccaagtgctgtgagtactactcatgtcaccgaaaggattcatgccatccgtacacagacatattctcatgtttctagggtcggcagcaaagtctttgtgtttcgatcgatattcctccattcaatcgaatccgctgggtgtctaagcatattgtctttccttctctctgtggcgtgccaacgtactaacttcgctttgttcgggttggcaaagattctcttgaaacgatcaatgataggtagataccacacaacctttgccggaccacccctctttgacttatttccttcgtcagcacttttctttcgcttatatcgagaagccttgcagacaggacaagcatccaagtccgcatattgcttgtggtataatatgcagtcattgggacaagcgtgaattctacggacctctaaccccagtggacacagaacctgctttgcttcgtatgtcgtctcgggcaatgtgttctcaacaggaagcatagccttcaaaattcctaaaagatatgtgaaactcttgtctgtccatccactacttgccttcagcttcattaggtccaaggtaactgacaacttagtgtgttttgctttgcatccaacgtacagaggcgtctcggaatcacttaccaccctgctgaacttcattccatctctctcattctgggctgggtcctcaacgtcacgtaacatgtcttgcagcagatcatgatccacatcaaccatttcaccgcccaatggagaaggtataaatatgtcatgttcatcttcatcttcctgattatgcgcaccacttctgtctgctgctgccccacttcctgattcttgctctccatgcttcacccaacatgtatagccctccatgaatcctcgttgtatcagatgactgtgtatgtcctctccgctatcaaacatattctcattcttgcaatctgcacatggacaacacatataatcactgtttcttcttttccgatcctcctccgcggcgttcataaaatttattacaccctttctgtactccgtagaatgatgtttcaaattttttgcatacatccaacttcgatcaattgctacaaaataaaaaaaacaaattagaggcacatattgtaagatcagtattgcaaaagtaagacatgatgaaattgctcaattaatgaataatattactcacttgattgattcattttgatcacttttgggaatttaatttctgttttccttggaaaaaggacaaaaaatcgccccctacagcctcccaccaaaatagtgaacagtgggatacagttacactaggtggtggggggtatttatactgtgcaacaaatatctgtaacggccctaaaacaatcaaccgtgacgggcatacaagtaatctctatcgggccttaataaaagcccgtaaaaaaagagtgtcatctgtgacgggcattaaacttatctcaatcgggcctctagttggagcccatcacagatgaccctcatctgtgacgggcttcttttagggcccgattgagatatggaaccctcatctcaatcgggcctcaactatagcccgtcacggataagtgtcatccgtaacgggctttagttttatgccgatataccatggttgtgcggccatatcggcccgattgagattacttccttgtgacggcccgcaaattctagtcttgttatgggccgtcacagatgaaaggatctgtactagtgattggaaaatccgtcatagggactggcttataggtgccattttatttaaaaccagcacctattgatattttcctaccttcagcgggataaacaatagagaatcgacacctttgaacaactataggtcactactataaaaatcctcattgggaccggcttattggtgccggttcatttaaaactggcacatatagaacttttcccaactggggggaaatatagaaccggcacctttaaccatgctagagccagcacctataatataggtgccagttttttaaaagaactggcacctataatatattataggtgttggttctgtatcggttaattaaagaacggacaggaaccggttgtttttaaaaaccggcacctatagctttgagccaagccgacgagccgagaccatccatgcgtgcactgcgtaccgcacccaccgcgtccttatctactccatccccttctctctctcgcgcatatcgcgtctctctccccctctctctcgcagcggctgcctggcgtaggtagggtggtggcgggcgggctcccgcagccagtggcggaggcagggtggcgacgggctggctcccgcagccagtgtgggaggcagagtggcggtgggctcctctcctccgcctcccctccggcccccctgctccttcacattatcctccacgccctcccctccccctcccccttccaccacaaagatgggcagcgtccccatccccctccgctcccccgatgggcggcgtccgcacgggaggcgcgtggacaggcggtggatcctgtgcttctttggccggatctagcctcccatggccggctctggccggtgtggtctgtgcctggtgaaggggaggcggcaagctcccgcggccacgccctcccctccaccagatccggtggccggcctcccgcggccggctcctgtgggcgacggcgctggggtcggttcgagtgctgatctagggttggtgtgttttttttatctctttcatgttctctcgtttaatttgtctcatatgtgtaccgagaatgaattgttgttattgacgtgattttgattttggatgtggggatattgatgtgtaccgagaaggaattgttgttattgacgtgattttgattctggatgtggggatattgttctcgatctgaggatgtggaggggatcatgggatgtggggatggtttctggattcggctcgattcgagccggagtattttttggctcgtgcagacataaaaggtgccagctcaatttaacctatgggtgccggtaccatgtataagtgttgaccaattggtgtcggccggaaaaccggcacctattgccagttgccaaccggcgctaattgggctttctgtactagtgggtgctggttctaaattattagagtgccacgtggtgatttagcagtgtttgtaggagaccacgtggcagcataggagtgtttatagggtgtttcatcaacttttaagtatactaggaaggtagcccatgcattcgcacgggcatgcatcgtagactatgtttgagaacttataacgatgaaatattaatctgaaatttcattttatatatttagattatttgagcacatttagaaaaaaaattaagtaattggactattttctctaattaaaggaactcgatgttttatgcagtggctcagactattcatatttcagtttgttattttttttacaaagtgtacgtttaatttagctatacatgtttcaaaacatagcatggtgcgactctatgttgttgagttatttctttttcttttggcaaattaaatatgaaaattttattctggtactatttatttaatttatctatgcatgtttgtagaatttttcataatgacatattatttattgtcaaaattttaaggtatttagatgtggtgcaaagtgcatgggtggactgtgcccaaatgctataattcttatacagcaaaatatatgcatatataaatattacattgttagtttaattataaatagagaataattagatataaatcagacacgtatagcttataaaaaaattgtagttgtttcaacattggttgtttctcgtctagtttagtagctacaaaaataaggaatgggagggcactgttctctacatgtgagacggaggaggaggtggaaggattttagtgaaaaccgatgtgagatgtttcttttttctcagcatttcttttgttgtttctataacttgtaagacatgacacgtgttgtcttatgtttttttttctaaaaatagatgacatgtgtacttatggttcattcaaaaatagatctaattgatgaaaataatgaaatccatcgtgttaagttggatcgttttctattttttgagacatgatacgtggttacttacaagtgtaatatgggacatttaatcaaattttatcaagtagactgatttaatataacataatgcatatagtcaaccttttagaaatgtctcattcgtatttgctttccatgcaaaacataggtgccaatgttcaaatgatgtatttaaatttataataagaatatggataacatggtacttaaattatttatttagttataaataaaacaacaattgaaacaaactaaaaataagagaggatttgaagggagagaagcagagataatgtacgtatggagacgtcacttgaacacatacatgacgtgtgaagggatgggaagtgggtcttttccgtttttatattgttaagataccaatagaaaataataggtacaccatgtttaagttaaaataatcgatggttaggtgtatgatgtaatttctttagaatttctaggatttattgtacactattagagaaaccatctttggttagtcgcccaaaaaccataatagtcctagttcgaatagaaaccgggactaaaggttatttttagtcccggttaaaaactttttgatctttagtcccagttgatgttatcaatcgggactaaagatcatttttagtcccggttcaaagaagttattggttcgagttaggccccaattatcttagatcttcagttccggttctttataccaaccgggaccaaaaatcctcccgagcgcacgtcgagtcctctctatcggtcttatcgataagaccgataaaaaccatctgcacttcctctctcattaaaaaacatctccactctccagcctcctctgtctgatccccctctcctctccccttcctcccacttcccctctcctccccctccccgcctcctcctcctaccacggcctctctggtttagcggcggctggtcgaggtcggcggcagcggcggccggctggccgggctggggaggcgcgcacggcggccttcggaattgattttcttttttttgaggatttgtgatgattgtttttgagaatttgttatgtgattaaatgtggggaaaaaaaccaattacacagtttgcgtgtaaattgcgagacaaatcttttaagcctaattgtgccatgatttgacaatatgttaatactgtaaacatttgctaatgatgaattaattaggattaataaattcgtctcgcagtttcctggcggaatctataatttgttttgttattagacaacgtttaatacttcaaatgtgtgtccatatatccgatgtgacaccccaaaacaaaattttttgggaactaaaccaggccttagtagagttctttgtggaggttcagtattcttttatctttattaatttataatcggatgaattcatattgttttaatttacttaatactatcgttctaattttttcgtgatggttttttaaaatttgtgatgtaattttttttagaatttatgatgaatttgatctgtgatttggagatgatttggagatttctctattaggggatgtaatgattagtgaaatcaatttgaaaaaatacaattaaaaaaactgccaaccgccggttctggctctagcagttttagtctcggttagtaacaccaatcgggactaaaaattgattttttttgtcccggttatttcaccagggactaaagattcatactcccagttgcaaaactgggagtacagggggttacaaaccgggaggaaagaccatttctccaccagtgatagtatcacatggtggcttaggtgtgttcgtaggagtcccgcgtggtagtttgagagtattttgtaggaattttagttgacttttatcatataatggatagatatggcatgcaagttgtcgaaatgtgcctaatatatatctacatgtttctttagggaatatatttttacaagtaaaattatactggtgtaaactacatttttctgacattgtagaactattttagttacatgccagtgaagttattatatagcatgaacaatataataatgtcacttttttttcataatttttacaagctaaattatagttaagaggtgtattaaattataatttgtgattttagtcataataatgacacaaatagaacatgtaatttcatccgatagaaaaaaaaacttccttaaaagagaaacggagaggagttatgtaatgcgtatgcacgggaagaggggtgcctctttgtaagaaatagaaaaatcaatctaatccaagtatccaacggcttggagttatggtcctattaattttagtgaaatcaaaagctaggtttttcttctcagattttttctaatttattggaaagccacatggcaatataggagcatttatataagcatcatgtgacagcttagaagtatttataaaaaatttcacggacttaaatagatagatttgatatcatcgatataatttagcgaaacatatttgtgaaattatttaaggtgacgtataatatgccaattagagatgaggggagagagggagtacgtaagtacaggaggaggccaggaggggaatatacaggtagtggggaactgtgtggagaggaggattttatattttatttcatctagtggttaaaaatgttggacccatcaatttaaaggaaaatcaacggttagatttttagactgccacttgacgtcttaggagcgtttgtacgagaacacatggcagcttaggagcgtttctaggaagtttaatggacttttagtatataatagaatagatagaagatagatagatagatagatagaatagaaaaatgcccgtgtgttgcaacaggtaaatgctattttaattttattattgttatacggtttagctagggtaaaatttactgtagaaattcgattggatttattatttcaaaaaaatcatgagctacaataattaggtgtacaattaggtggcggcggctggagtctccgagagcgagtcgcgtggtggcggcgatgagggattggggatttgggggaatgaccgagtggacatccactagacttaacaattttggatccaatatttcttaaacgaagccagatcggtccaaaccaaaacttctaggcaccgaaccactccagcccaattgtggcagcagcccatttccccccatccagagctgctcgaattaaaggaccgaaccgtttggcccatttcgccgcaaacctctagcatgccccaaaccgtctggcgtgaggggaggcaacgggctcccgaggtcaggggcaagttttatagtggaggtgagtgccacatctaatttataccatatcatcttctcattaattaagaggtaacaagtacaacatattacctctagtacacaaaccccaatattagtttactctcacatcatcttatatttttcttggagattgtgtggaggttaccccttgtatgagaggtggctcattctctctctcctaacttctctcctccaactcatcacctaatcctatatgataaatttaggggcaacatgaaggagcttatagtacttgccctcagcggcttgccagcggaggcgacgccccttgcctcttctccctctcccctggctctcctcctctccgccgcggtgtggacggctagatcgacgacgcgacgacggggagaccggtgattcttatcttttttgctgagtttggacgttttttttgtgatactgtagagtaggtccgggagatgtcaggttcgccagtggtctgattttgcctgaccattctgcttagcatgtttcataccgcagtggacatgtttgacataggcgcaacacatgaccgtttgatgctagcaaccagtttctacattttgctttctcgagtggatctgatcttctaccctataattcaccaactgatgtttacatcctcattcctcattgaacggttaggattctctcgctcgaatccaacgtcccaaatcgctcccaccatctcctcacacggtcacaccgcttcgtcacctcaccctagtctcccgtcattcacgcccccaaatcgcgcccctcgatcgaaatcactgcttcccatccgtttcctcacgcacaatctggcgctccctctctcccggagcacagccgtcgtctcaactcgccactggggtcatcgccttcgccttgcctcgcctcctccaatctcctcaccaccgaaaccctcttgcgccgcaaccggcgccctctccacaacaccgccagtcaagtcggcttcgatccctcgtgcgctgccaccggcgccctctccaccgtgccgccatcagttcgtcgatccctcgcgcgccgccaccggattccaccccaccgcgtcgcaagtcaggtagtcatcgatccttgtcgtccactctcagtagcgccacccctaggactcctcgccatcgcaggtcatcgagcccgccggctaacaaggtaattaggtaaccatcgcaattttgcattttactatagaaatgcaaaatcgttatatcagtggatgtgattaataatgcaactttcatgtttcttatgtgtgtatgcatatcccactactaaactatcaatgacgatttcatggtttaatcaactttattagcatctgcatctttttatataatgcaaatggtttaacttgattatgatatgcattgtgacattgtttacttctctcatgattgggatgtttatatctgaaaattcagagaaagcgcttaaattagcagcgttggaatgctgcaacaaatgaattctgatcgaactcataaaatgctttttttttttacttcattgcttggtcagcaacatagcccaggaaaccaattaaattgatagacatgttgtgtgctcttttaagagaacaccatccgaattgacatccaagttaaaagaagacatttaattatctgaataatgatgccaatattcagagcttcttttacttttagttgtatacattattctgtgatgtgtatcgaaggttatatacagaatgagaatttacctcaatcctggaattgtgtagtgataacttccttcaaaaaatgttagatttgtgcactgttatttttttcctctaaaatgtcaaatgtggtttacatttttattcatgacacctaaatatgtacatatcatgcattagtaatgtgcaagcacttatcgatgtattgcctaaactaacactttttcagttaattagcgaacttatgaaaaaaaaatcagatgtttaatatctgaataaattcatattctcttctgatctacttcatgccttcatcaggacgaggtagttagtgttgtactgtagttgacaaagtgattagagtttgttgcattgatctaggactatatttgcataattgtctcacgtatatacagaggaaaatgtgtgtcatttcaagctcttaattcctgtggactgaatttcctgtttcaagtctcttgtttctcactgacagcccgtgatatgccttcttcttagacaatctcccccaaaagtcaagctcaagggtacgcatcctcctccaatttaaagaaatatattttatatttcactcagaaaaataataaaaaaaagagatgacataacagaagatgggccactttgtttcttgagccaactaagcaagctagctaccgtgcatgcagcagcagctcagctgtccttgggcctagcccatggcgactgagcagtgccgagcagcagcagcagttgcaagtttagtcccacctcgcctagctagcttgaggagcatcagcatacaaggatgcaatgctcgagattgactcgggtttattttttcttgtgtgagcgaggatagtgtagatgtagtgcaactgaatgggctggatcgaaaactatgggccctagcttgattgatcgattgaaaatctggctattttttttggtgagatgatcttattcgctgttgggtgagatggttatgatcctgttcgctgtcggtaagatggattgattcgttggtttcttaggaatttgtagcacagtagcagtttcatggagttcatctatgggtgggtggtggacagtaatatgtgtggtgcgtcagtcttaagttatgctaattctttttttaacctgtggttttgctttctgacatgctctttcattgcaaatggtttcagtaattaaccattctctgttcacaaactgtatcttttgttaaggtgtttgcaaacagttatgcttgtaaaatctcttgcccttttcccctatgaatgttaaatttaataatgttatgctctggccttttaggattttcccttgccaatagcattggtggaaataagtggaaggtgcaaaactaatgaccatgggaaaaaagtctgactatctcattatcttctttgacctgtattaaagtatgcattgaggttgccatagaactatttgagcttcttggtattaaatctgggaggtacttgtatgagctagattcgcatttggatattcgtacttgtatgtgcagatgagcgcacgtacgggttggtgtgggtcctcgagaccgggggcgtagctgagagactgatgatgaacgtggtgctttttatgggcgatggtgatctggtggtgctggtgtttgacacagaatttttagataaatagagtagcaaatttttgatagacaaacaattctctgaatatttggtttataggattgcacttgaaaaaattcaggatatatggtatttgttggaatatctgtatagcccatacatctgaagtttaaatttacagcatgttctataaactaattcatatggacaaacagactaacaagttcaaactataaaggacaaatttcaatttttatgatccagagtggggaaaattgctcttgtactctctaacatgctttatgaagacatgaaggctggtccagacagggttcttgttgtttatgatcagacgagttagacaatgacttgtaagtctttagaaaataaactctgcataattgtaactttctatccagctcaaatttgtctcctgtgattaatatagtttataaaataataaaaattcttttgcttgtaatatgaagtttggtttgtattacttctacgcaatatgtttagtttgtattcctaagcgcataaggaattagattgttttcaaacatgaaaaaaaagttgcaatttgagttttctcgttggtatcaaattagcaacagtataataattctttttcatattgccttagtatatcttgattttcattacaaaatataaccgtagcgttagtacgggcatattactagtcacttgaggtgcgacgatgccaaatggagcttgcaaagcagttcaccttatggtgaacttcaactactgtttttgctgagacgcgtgatgcagtttatttagctgctggttcttagctctatgaaattggtgatctgttcgtagtaggtcatctttcacaatcttgtccagatctctgtggttcagccaatgcagattactcgtactacaattttgttaagcattgaagtcagctgtactgaacagagcactcaattttcagatatcatgatatgatcatctcctgtttggtctcatataaaagataagaccatgaagcacaagcttgaggaagagagatcaacaagagtcgatggagagtgttactgctatggtaggcatgggatgcacccggagctgtcttattacatattgcgccctttcttctaaactaggacggaagcccgcgcatctgcgtgggcaatttatttattgtctataaaaccaatactaaaagaagtattatctcaccatattcactataagaaatagcccattgatatatactaaatgattaaaatggctatcattctgaatcaagaatcactttatcccggttatatataaattcagcattcgccataacttattttcattgtcttttttatagatggaattaatggctatcattctgaatcaagaatcactttatcccggttatatataaattcagcattcgccataacttattttcattgtctttttcatagatggaattgcagctctatccaaaactaaaccaaatacatcattaatagcacaaaaagttaatctccatatcatacccaattgcccataactcacagatgtctaaatttatatataaatatttaaaaataccgcttctaccaactaataggctgaaacaattgaacttatatatgaatgctcctctcacaatcgggtgaagctaaggagttttctctaacgccttattcatgggtcccgtgatatagtcgtgcttctcaagatgagcgttgaccataattttattggtaaataggttagttaaactttattgtagatggtggataaaaataatttgtggtatgatttagatgttataggtgttgaattgttcagcacaaaagttttttttctaataaaatatgataataggagaataaatgtgtgtaacaataagaagaaaataagggaataagggggtggaagtacgtacgtacctactatccttaaaaaaatgtacgtatacatacagtaatacgtacatgtcggtggacccggtttggggttaggaaattttctttgataaatctaatggcagtaaataatgggtccactaatttaacgaaaccaatggctagagaattcactaaattatagtgctatgtggcgacttagagcgcgtttgtaggatgccacgtggcggcttaggagagtttgtaggatgtttaatggacttttagtatataactaggacggaagcccaggtgcgcatgcaatttatttattgtctataaaaacaatactaaaagaagtattatctcaccatattcactataagaaatagaccattgatatgtactaaatgatcaaaatggctaccataccaaataagaatcacttttatcccggttatatataaattcagcattcgccacaacttattttcattgtcttttttatagatggaattgcagctctatccaaaactaaaccaaataaatcattaataccacaaaaagttaatctccacatcatacccaaatgcccatatctcatagatgtctaaatttatatataaatatttaaaaatgccgcttctaccaattaatacggtgaaacaattgaacttatatatatgaatgctcctctcacgatcgggtgaagccgactattgccgctaaagagttttctctaatgccttattcatgggtcccatgatatagtcgtgctcctcaagatgagcgtggaccataattttgtcggtaagtaggccagttaaactttattgtcaatggtggattaaaaatttgtggtatgatttagatgttatagttgctgaattgttcagcacaaatgtttttttctaataaagtatgataataggagaataaatgtgtgcaaaaataagaagaaattgagggaagaaggggtgatagtacgtacgtacttaaaaaaatgtacatatatgttgacagtcgttatcgatcagtttcgaccgttaatattaccaaaatagaggagaactagtgatacttgcaatgcataaatatgttagagcaataatattccactagtattagatatactaaccttttgcagagaatgacaataaaatgaaggagaatcgacatcaatttcaacgataaatcaatcggacgatgtcgagagatagacttatgtatgaatggaccaagaactcagaattgacacaacacaatgggccaaaattcaaagtctacggagaagaacaacagaggaggccaccttctgaatatgggccaggttgggccggcccctggttcggccgaaccaggaggttgggccgaacctcccgtggcgccgatgggtgcagggtttggatggacggctgggattgacccccaatggcggttgaagggtattaccgaccattccaactgtcacaaccatcattacctgtctataaaaggagctcctcttctcacttcacacacacacctcaagcaagttctctctcattcctctcaagtttagtttaatagtatctagctggtggaatcgaaatagaataggaaccaggagtccggaagccatcggaagagttcgggcatggctctaatagctttcctttcttcttttataagctgtgtacttttattagaatactcttcgatatacatttatggtattgaaatactttacgagtatatgagtaccaactttacattatgttcttgttatactgaatatacggctagattatctgggagatgctttggtgctggtatagtgtttacttatgcaattactctatgtcatgacgatgatattagaatagtatctggtagtttagacgtgttttctagattacgagatatcattatttgaggttatattaatatacttcccgcggattgggaatgtggtaggggggtggcgcgacgcgaagacgcgcgaccgcatcggtcccgcgcggggtgacgcaccaaggggtgttgccgcatgacaatcaagaggaccgacgcggtcccgcggattggttgcgcggcaccggtgcagacataatattcttgtttcactgcctttgttcaattcgagctgctagtgccaagaagtcaagcatgcatgtgcatgtcagagtagtaaacgctaaagctagctactgtagctgttaatacaatcaaagttctacgagggcatgtttatttcgcgaaaagaaaatatttaggtgtcacatcgaatgtttgaccggatgtcggaaggggttttggacacgaataaaaaaactaattttataacttgcctggaaaccgcaagacgaatcttttgagcctaattaatccgtcattagcacatgtgggttaatatagcaattatggctaatcatggactaattaggctcaaaagatttgtctcgtgatttccccctaactgtacaattagtttttttttaaaatctatatttagtactatatgcatgtgtccaaagattcgatgtggtgtttttagaaaatttttttggaaaactaaatcaggcctatatcctctttttattgcgggatttgtcggtggtggtgcagtcccggacgatgaatccgcgggacattggttccgcgctactgttatgcggcaccgcgcctggtgctgcagggcgcgaaatgaacgccatcgtcgctagtgcctcgagggatcgacgcgatcacgcgtgttggcgtagcgccaccgcccctcccattggtcaactacatggtgctgtgtttccaatccgcgtggtgctgtgtttctaatccgcgggaaaggcgtatttttcgtaaaatttttaaatgcatgtatatttgttcaaaatcgaagaaaataatgcatatttcaaaatttaattagctagatccagacccccacgcaataaaagcggctaggccatcattatatatgacagcgatcgtcaaagtcatccctgttcagcaacaatgacgcggcgactgatttcagaagagtaaccacaacgatggtgatgggcgacattctcgtgataacaatggaaaaaaaaactataagcatctatttgaacttctgaaaaacagaattccagtccatctgtttatatttttttaaatgttctcacaagttcagagtaaaatgcatgagcatgcttctgtttgtacaaataactactaatctcatgcattttcacccttctctgtgaccacgaaaccgatcatttctattctgtgctctcatttttttagtatgggaagtggcattggtgaatgttaattattaacagccatagagacgaaggaaaacaattcaatgattcattgatctgtcatcatgtcgtcgatcaccttccactacatatgtttggggacattgatctgtcagaatgttagacagtctactctcagaaatgcatgaacaagacgtgcctccagtttttccagagcttagttctacactgaactggaatttactgcacttaataatatcaccagatcagatgagatatatagatcggttggcacatgtgagcaagaaatgatatgtcgagagagaaggatgaagagtgttcatggagccaaaggaaaagcgtgttggtgaatttgttttccattgttgtgggcctaggaggcatcaggatctatcatgtcacttatattcatagttgaggtgccgcaaaaattccatataggtggggtgactgcaatttttgttgccactattgatcccactgttctcttcctctacctcttcctgtttttattcagctatggaagtacaagagaattagttagactagccgtcaacccgtgcgttgcacgggttactgtgattaataattaaaatattattactttcaatggataatgataaaatatgttactttgaatgaagctgacagttgccaaaatcttaattagtaatttcatatataatccattctaatatttcttctattactttattttttttcaaaattacataatttaaaatttcaatattagaaatatagatttatactcgttttgttgctcttgttagcatttgctataaaataatttagcaattttcaattaataagtacagaaataaaattagtctggagttaagctttttcatgatttaatgattcctatattcataattattaaatatcaagttgtattttgtgtggagtctcaattataacatcttcataatttgattttaaaattcgtaactaaaaatattatactcggtttgaaatcttatttttttgttttatcatgatttaaaaattgttccaaattttcgaatcaatagtagttctttcatgatttaaaagtatcaaaatttgaaagtaattaatatatatcgctacacttgatcggaagtatcagttatttctataatttaatatttatgaatttaggaattaactggtacctgtttgtccttgtgttggtctcctaatttggtataatacgctagatgcatgaattttagtggcatttttacatcatcggtgtgttgtaaaagtggcccacatcattacagtagacataattcagaccaaatagtccttaaaactgacaaaaggcataactactcctagttagaaatcatgcattcttactccttattagtctgctaaattgaatttttgatgaaatcatacattcactgaaacaaatgtatttggatgaaacatatatggagcagatttgttagtgatatatgtttaacttatcttgtcatcttggttaaaagaatagcccacatcatcgacaattgctaattacacctgacatagataatgcaaattaacacctgtaaatataaaaagagaaacattaaagtaagtgcttgtttgtttcttattcataaatagataggggcagcagctacgttcccttgtttgtaagcatacctgacctagacaaacttgtcaaaatattatgtagctgttttacgcgtggaaccaaataaataattaaatacacagtaaattattcatgttaagaaaaagatacgcagtaaagcctattggttgcttatgaaggatgtgggagaatttaacttataagtaaatgaatatacctgataaactccatccaaatttatggctatcaaattgcgataccttaaaatctgaaatttatacatagtttagaatagatgagaagcatgtaaaaaatacttactgaaaccctaaatagattgaattatatcttgcttgcttgagtatttaaaatagcaatcatagctgcaaagatcaatctgaatagcatctgcatcgataaaatagtgaactggagatcggtcgatggagctcatcggcggcagggtgtgaaggagatcgacgtatagcctgtcgtatcgtcatcttgtcgtgtgtggagtcgagtccggtggctgagatcgacatggacacagtttgtagactttgaaggaagccgatatagattaaatggtggcctagatacatgtttctctcgttgggcctttaattaaaagtccatggttataatatttaatctatggtcatgattttacgatctagttaatcaatggccagattaatctgattaacatggaagctccgagaaagtgcccaattagtatagatatagatagatatagattttattttatttctctctcccatagattaccacgaattccaccagatatatacggtgaaaatgtcttcccccaggcgctcgatgggccagggaaatatcggtcggtcgcccagatggtgggccagggtgccacgtgtcggcgccgaggaaatcgggagctatacctccagcgcgcacttcggcacctccatgcgtctctaccacacacgtcgttgcaacaaatcacccacatattttggaaaccctctattaagcggattcattccattttttgttccactaaaaatttttcacctattgtactcacaatgtttcacttattgtactcataatgtttactatgtatatatctaatgttgcagtgaacgaaacattcttttgcaacaaatcacccacatattttggaaaccctctatcaagggaattcgtttaattttttgttccaccaaaaatgtttcacctagtgtactcgccatgtttcactatgtatagatctaatgttgcagtgaacgaaatattcttttgcaacaaatcacccacatattttggaaaccctctattaagagaattcatttcattttttgttccaccaaaaatgattacctagtgtactcataatgtttcactatgtatagatctaatattgcagtgaactgaaatattctttcgctatttgctgaaacaatgttttttatataaggtgaaacaacacccgatttaaacgattgaaacattttcgatctacttagtgaaacaattccgatatacttggtggaatatcgtgcaacattttaaaataattcaataataagctaaaaaaatcgttggaatatatccatgtgttcttgttttgaagatttaattgcaacgaatttaatggtgcaatcggatcatgatttggataaataatttaagagaaaaattaatttaaagtggttttgcacgtatgcgtggcgctaacgtcagcaatttttgccagtttggattaggcgtctgattctaagtctcctctgatatacggttaagtttaaattaataatta

SEQ ID NO: 27337 - DNA, 3709 bp, Oryza sativa
  unsure (1)..(3709): unsure at all n locations
cccgatggtcggggatggtacaaaacagcatcgcatggaggttgaaatactcttgtgcatatgcgtcccatgtccgtgtgccctcattccatagcctttcgaagtcatcgattatcagttcaaggaacacatcgatatcgttgccaggttgtctcggtccttgaatgagcatggcaagtataatatacattcttttgaagcacaaccagggaggaaggttatagttaacaagcagaactggccatgtactgtgacgactgctcaaatcaccaaatggattaatgccgtccgtacacattgcgaaacgcatatttcttgggtcatttgagaattcctggtaaatcctatcgattgtcctccactgtattgaatctgctgggtgcctcagcatactatcgactttccgttcttcggcatgccagtgcactagcttagcttgttccttattcgcaaacattctcttcatgcgctccgcaattgggagataccacaccacctttgctgggactcccctctttgacttacttccttcaccttcactctttgctcgtttatatcatgatgcccctcagacagggcagacatccaagtcagcgtattccttgtaatacaaaatgcagtcgttcggacatgcatgaattcttctgacctctaggcccaacggatataatacttgcttcgcttcatatgtcgtctgcagtaaattgttcccctctggcaacaggtcctttaacagctcaagaagttctgtaaaactcttgtccgaccagccattactagccttaagcttcatgagttccaacacgcatgacaacttgttgtgcttcgacttgcatccatcatacaagggcatctgacaatcttccaccaacttactaaacttctcaaaatctctgtcgttgtcctctgcgtcttcaatgtcatgcaacattgtagatagacattgagtgtccaaatctatggtctctccacctaaaggagaaggtacgaacatgccttctcgagctgcggcggtgttctctacatcctgatccaacacttcatcacctgcgacatcaggcgcctcttgctctccatgcttgctccagcaggtatatttcttcatgaatccattcattatcaaataagcatgcacttcatcgctatcttcgatcatctgttcattcttacagtccctacatggacacaacatgtgcatgctcatcctactttttctgtcattatccgcaaatgtgataaattcagtgaccccctctctatactcagtagacgaacgatgcgcatagtacatccatctacgatccatctgaaatcaacaacatatgaagaaaaatatatgatgatcaatatattgagaaggaatgaagaataatgtgttttttaccttgaattttagcaaaaaatcgcccccttgccctcccaaccgatttgtgaacaatgaattggtcgggatagaaagcagttggcggtttgggggtatttatagacccaacacacctcaaacgggttagattaaaaaagcccgtcaaatgtgttggtcatacctttgacgggtttcaattgagttgcctgtcaaaggtattgacctacctgtgacgggccgtaaaaaaaatccgtcacaggtggcggaccaccacctgtgacggctcataattccacggcccgtcacaggtgaggggataccagtgacgggttgggagaaaaacccgccacttcctcacctgtgatggcttttccttctggcccgtcacaggtgaggggatacctgtgacgggccacggccggatgccccaccgatgacggcaaacatagcgacccgtcaaaggtgacggtcatctgtgaccaattcataagaggtttccccaggtnccacctttcactggtattccgtcacagatatgggttctggcgtagtgacggatcgagaagagatatcaatgacctattgatcgagatggatgttgcatttgttcatatatagtatggccaatctatacactggcttacttaggttgacactaatatgcgaggtagggcgtacatctagctaggcaggcttcagaggcatcaagaatcgatgatgtgctgcattacgctgttgaggggagttcctatgctcggcagctcgggcactgtctgcagttggctcatacacgcgacagtcttggatcctggaagctctacctagtcctaccggactgaaagaaagctgtcgttcccgtgtcgtgactcgtgagtaaggtttgatccggatcatattatcttccgacaccgatcctatgtctaaaagacgttgacgttatacatttaactttggacgtaactacacaacaagtggtctaaatcagctaccactccatctataagagacaccatccatctatacttcaaatataattttctcttaaactactcatccgatctacgatccgattataccgttgtattcgtaacaattaaatctttacaacaagatctcacgattatattttgataaaaaatcacaaattagttttatgatatatctaaactacttttagatttcgctaagttacttcttatatatataaaagtaaattcagtaaagcctaaaagaaatttacatatattatagaagtaccttagaacaaaacgaaggtaaatttggcatgtcatttgaagtaaatccgttgtagatataaaaatatgactctatctagaaatttaattaatcaacacaacttatgaaattaacttttattaatcacctcagagcattatgaatgtataggaagtattttaatcaaatttaaaggtaacttatatttatatatatgataatttgttcaatgaaaaaaggcattaattaaagttactataatatatgtaaattacttttaggctttactgaatttacttttatatgtctaagcagtaacttagtgaaatctaaaagtaatttagacatatcataaaagtaatttgtgattttttatcaaaatataatcatgtgagatctttgttgtaaagatttaattattacgaacacaacggtgtaatcggatgagtaattaagagaaaattttatttgaaacttagatgataggaatatttctcctagttacttaatggattaggactataataaagtaagattcttcaagttaacacatatctgaataggagtcgctcgttacaactaaatcgagagtgccctcgatttagattttgtgtttaactttatagtatcatggtttgatatagtatcttgcccctttatagtatctttatagtatcttgcccctttgatgtaacacttagattgtgaccaaccgaattgaattcctgccatactggtctgccttgagaatccatctgtcttcagcctctccaatttttcttttttgttgcgatttgatgggcaggaactatggcagcccatattggtgggctcaggcctgtctagttcccaaatttttttcccaaaaacattgcatggaatctttacacatatacatagagcattaaatatagattaaaaaactaattgcacagttatgaggaaaatcacgagacgaatcatttaagcctaattagtccatgattagccataagtgctacagtaacccacatatgctaatgacggattaattaggctcaaatgttttgcctcgcggtttccaggcgagttatgaaattagtttttccatttgtgttcgaaaaccccttt

SEQ ID NO: 27338 - DNA, 22314 bp, Oryza sativa
cgcctggaaacctgttgatggaaaaaacacactgctctaggagatttgcttagctccagtgcaggtccaagacgttgatgcgatgtcggggtgccagttagtttgatcatgcaactgacaagatatgtaaacaatagataaaatagacgatcggctgacaagccgattgagtaattccagctgatagccgatattagcccgatgcccgattctaaaccgattttcgataggagttttcaggcacgatcctgttttattgtccaatgttagataatgatataaaaaccatcggttgatgataattaaatataacaataatataatccaatagaaaccaattggctactaataatatgataggataagtaccgatccgatggttaaagtatacatcggctaaaagtctgatgtccttaaatctacaagattagaaaaacggtgaaactttttattgcgatcggctaaatccaacttgtatataatccttataagccgatacaatgtccagataacttatcggctagcaccccgataaaacagtaacatgaacctattggtttaacaagatttacattatcaacaacaatctggtaggtcgaacctgaccgatgcaacacgagattacatataacaaatactcgatgagccgatagatctgtctaatgtgatgaatataaccaatataattatagcagcattgtgattgtagagatatatcagctaagacagaagatctaaactaaccgagatagtaccaactaagccaatgcgtctctaaacacaatgcaattagagatagaattggaaaatcaggtaggcaaatatatcaacaaaaccagaatgatccaagagatcaaaacgatgcagccttgaacaacatcaatgtagtcgatagatttagcacggccgacggaacgtaggacttaccccttcgtcggagatcgaacttaaccgatgcagccccgcgtcaggtgccaaattccgcccgttgataagtaaaacctcagaaaagagggtagcgatgtgccgagagtagtattgattgagagatcaattacaattacctctagtgtacatatttatacccataggtagatactagtccttgtaggacaagaaagaaaccttcataaagataaaaggaaaacataaattacttaacggacactaaacatactaaactaaaccctgcctaattaatatataaactgccatgtcgcatcctccttgaactcggactcttctagatatgcttcctttaattgatctttacccgaatccataaaaaatacaactgttggcaattgatagtttacatcggttgatctaggaatttgaagctgatactgattctaagccgatgattattccgggcttaccaaattttgtcgttaacaaaacaacgagacgaatttattaagcctaattaatccgttattagcacatgtcggttactatagtacttatggctaatcatggactacttaggctcaaaagattcgtctcacaattttcatacaaactgtgcaatttgtttttttttaaaaaaatctatatttaatgctccatgcatgtgtcaaagattcgatgtgatgtttttgagaaaaaaacattttgggaactaaacaaggccttacctagttgcgggaacaggatcacctacattttgaggtattaatgtggcccatattggtttgtcatatatcactatttgcactccacagtataggcttccggttgtcgctgctatctacccaactaaaaatctatcaaactaatgaccggatgcttgtgattcatgaagttttaagactgacaattctgcagctaatctatgcttcctataaagatacaacccactaattctaaagcttaacatacaaccatgccacatcatcatccactagcaataattacattttcaacctcatacaagtaatatcatctacaatctatttaattctacaaatcaacatgcaaacatattcaatcatcacccctcaaatcatttccacaatatttttacaaatatatgtatcatttttatagtaatatttaacataaacttatcaatatgttccacattaaagcgcgagattcaattgtttgtttcatgataaatactgataagccttgatattttatttgttttccttttacctttagcttgattgtcaaaaaaaaaatattgaaaagtacttagtaatccccgcagcaagacacacagggaatcacctagtatatcaattaaaaactatggatgttcataaatactatatgttggcatgcagaacagggatgtatttagtatagaaaaacagccagcacagtgtaatagaagctacaaacgaaatctccaccgtgaatataattttgaagagaaaggaagtgtatttagtttctagtaagagctagcgtgtagttgtgctgatcagtgtgtatcggtatcccaattacaccatataatgctatagggctttggaggcatggggaatttgacatgcacacctctagcttctttgacatccgcctccttgattgcgagagtacaggcttcccagtgtgttgccggcacagatgctctcacagtcacgtcggtgtcaagctaattttcttctctactccccaaagccaatgcttttgccgggctctatgttttctacggactatatatatatattccttctagacaaggggactcatttgctctgtaggacagctagcttcgagttaatcactaatatgcatgagatagttttttcacgaaaacgacttcgttcattggagggtttttctcgccccttttctttttctgtaagatattgggagagtgatcgtcatcgacaacctagctagcttggcttcataaattattgggcgtgttatatttgtgagtgcaaatgtgtaaaaacaggctagctagttaaatacataaattaaactttgttggatcgtatttgtaaatgcggagaacttaaaatgaacaaaataatttctcaatgaatcatgcttgttgtttttgtagtaaaagaactgaagagtacataggctaaatatataatgctcatgaggacatttgtactggtgtcaagcactatctcggccatctctggtcccacagccagggaagctatctctgctggtagccttcagtgctagttcataaacatattacacaaaggaatatatatagagaggggtgtatcaatggaaaatggacactcaacactacatgcataagttggcaatattaacctgaaacctaaggaaatgtcatctaggagctagttaggcttccgaggcatcaggaaccggtcaggcgtgaaaatatgcaatggagagtagtgcctacgctcaaccgccgtctacagctcgagcgtaagtatgctctgcaactgtcgcataagcaccctctcgattcgacgttcgcaaagtcatgactcatgaccgtctgtgcgttatcactttccgatgagcctatacaagtgacagctatcagcgaagcgtactttctagtatctatatatgcatccatcgtggacctagtctgatgactgatttctagcagtaagtatgaagggttcctcgaaaatttgggtgatttcaatgggaccgaaatttatgaaattccgtattttcggcactttttaaaccgagacatttttgaaattttgacagattttaactgaacttgaataaacttttaccaaatccaacaaaaaatggagaagacccaacaatttcagtcgatatattgatttcctggtggggtccgaaatttcgaaccgaaattgcaataaggtgaccgtattgactagatccatctctatatgaatattattatgtgttaatttgttcctctaaaatattgatggattgctaaacaacaagcgctactgcccctttcaatactacaagaatttttgaacattggttgatggtcatgggatgtgtatttcaacaatctggttgttatctaatattaatattactttaaaaatgacttacactccagcatattaacactattttttaataaagcgagtagtcagatgttattgcaaaagttaacggggtcatctattaaagacggatggtagcactattattaatgtccgacatgttgagtccgatgaacagaaagagattcacctgtggttgatcacctcatctgtaatctacgcaggtaccgctgaatttgcatcttctattgaacacattctcaggtgtattatgccaagcatacatgttctatttggctaatcaagacatccatgaatttgtttttattttgattgaaataataaattgtgctgataatcttatacttattgaatatctcttatctcaaaacacataagtgcattgacggcttaaatctcatgctcactctaaaatttggattatttgatcttaatcttgaaacaaataatatatattgatctattttttttctgaataaaaactaacaactgataactaatttccagatgtgctgttcatattatccatatgcgtactgtatacagtcggtggcatattattgatattcatgtcattggattttttataggtactattaattgcgatggtatattatatagagaattcgtgttagacagaacatggcatggttgataccaaggactgttcattcctataaaactaagaatcaatagatatagagctgtatctattgggactttatcaatttaattttgaatttccaaactgataattgcaaattgtaactgacattatcatcctaaaccctataatttgtaaatgattttgaattcgtaaatatggagtacaaatcttggattcttaatttaactccctagctatattaatttagttctaaaattaatagtcagaaagttgtaaatgacaggaaatcttttttattctaagccactacaaataaccaacatatttaacataaaaactttttatatgtaacgatagcctgtgcaatgcacaggttggcaactagttatctttaatttctaaagtgttgcattggctcatgttcaaatttatacaatcaatagttagattaatctttattaacttgaaccttatattgtctcggattggtccaatatatctatcaagattatttctaataaagaaagatctatatttgtttatatttgttttagttctgatgatagcataattcatctagtttcctaattaatcaattctcaatcggctagtagccattgattccaaccccgtcggcatctgctgggtacacgatctcatattggcccctctatataatctaatacaattgtttttctatcttgttagttataggatcgaagtaacctggcacgctctagacttatttttagaacctgcactagaggggttcagatcccctagagttggggcaaactccaccggtggatttggctcaatcttaactgttcttctgacttctacggctgggatcatggcccctactcttcttctaatcaactatcttaatcatatagatttagaggaaaacatttagttttttaagtgcttcccaccataaccatgattattctccggccaataatatcaataaaacaacgctgtccatcacaaaaccatctaaacaaacattagcattatgttcttgaggtggatacccttgaatcttcagtttgactgtttcaggcaatgaagaacaatatgccaatattaacaccatagctgaactaaagttcgatgacaaagactaagctgtctgctgcagtgctgctttggtacttgtaatttaattaggaaaggaaagaaacacggttacagagattagagaaaatctcagccgtataagtcaaaaggacggttgagattaggccaaatccacccggtggagttggtcccaactccagtggatctggagctgcactagagttaagcaaatgtctcggttttttcgtgtgttggacaaattttgtggcaacaggtgcatgtggattcacggtggcttgtggcacctgacgagtggacgacaaggaatttgttatgggatcgaggaagggaagacatatatcctactacaacttacagaatcgtccccaagcaaataccatataaatataattaattttcgtcctttttaaatttatattgttcgactatatattgatggtgcaaataaaagtgagccggccatgcaatgtgcatgcatgggctgacactaccatgcaagctaaggtaatgcccatcaatatatctagttgggcttgggaggcaccgggaaccgatgagatgtcaaaatacgccatttagaatactgcatgcactcggcatccgcatgctgttttcacagatgctccacaagtaatgaagccagaagctgtactagggatccttgatggagcggcaaatagaggttgtgtacagggtggtatcatttaaccatgagacctgcaggatcatatgcacgtaaccgagcatacgacgcatacaaggtgtcccccgttgcgttgcgcgtacaccagactgctgtgtgttgtgtgatgaaacaccggttttgagctatctgttgtaacgtccaagcagagacgaccatatatatctgtacacgatcagtgtttagattttattaaagaaaaacacattaattgattcatatatatgctgaagaacaggggtcattttttcattgttttctacgggttatagattaattgatggatatgctgaacaacggatgattgtacgttgggtgcgtggtctagcaacccggttgtgatataagctgagcaggtgtactaggataatttaaagtgtacatcatgacagtgtacaaagtcctgtactcctgtttggtgagaatggccggcgtgtgccaacgcgctgcttgtgctcattttgattaattaacggccggttcctgcccaaatactgagcagccgtgctatatagtttcagtttggccatggcgattgattgcggccgcccatatgcttgtttgggaagaaaaatcagataaagagcaaagccggccatctttcttctcaccctatatctacatgttcgtactcgtagtctccagttggggtttgggaggtatcggaaatatatccaactcgatatgcgtgcggaacattattgtttgaatgttcttcagtaaattagcaggaccaaacaggtagtcatgaggacatttctactggtgttaagcaactctgttaggtccgaagaaggccaagagcatgcgacatctacttactggcacttggtgttctccaagtacgtacggtcgtgaagctagtccaatgaccggttttgacctatgtattgtatcatcaaagccgagagtaccatatttcttagattagattttttttaaaaaaagaaaagattaattgatgggctgaatattttctgagttatgggtgcggtctctctgtgtcttcgtcgtacgcgtcgtcggttcaaactatatattcggatactcggattacattcgaggtgtgcttgtgcgatatattgacgggttctggcccaaattaacactgagtagacgagtagtcattccatcgtttgattaatttgccacttaatttcctaaaaaatcatggagtaattaatcatgtatgatgagcttacctacgtatatgcgtgttaaatttatgagtggctagttaaacaaggaaatgaaagtgtggatcgtatttgtaaatgcggagagagaagtaggtatgaaaaatataatttctcaatgagccaagctatagtttttttaatagagaactgaagagtacatatataggctgaataatgttcatcaggatgtttgtactggtgtcaagcacttacgcacggactcagcttcggtgacattggataggcaagtcacaacgtgacattggatagatctgggccatctaaaacacatccaacggagatggcgcttgggcccacctgcaggtcgaaatatcgccgcccgccgcccattcagctttcctgcgtccgaaacggcgccctcccccaatccttcccgcgcgcgctcgcatcgacgtttcgcctcgcccgtatccggccgtcgcctcaagcgcgagccagctaggaggctcaccgccgccgcgcctgcgccaggccgccgtgctcgccgcgagtggggatgggactggacggccgtgacctgtgaagtgccctgccgccgcgaccgggggcgcgtggagcggccggccgtcgggcctgacggcgtggtggtgcaggcgggcgaccgcccagccggagcctgacacgtcgaggggatgtcctggaggaggccgcgctgctccaggctcgctgatgctagatgagaaattggtaccagaaagttcagttcagttacttgaagcaattgcatagctcaattttcacatggttaaatctatttgaaatgccatattgccatggatacaagataagcaaaatatatttctcatttcacacaatcaagagaaaatgtaaaaaaaaaagatgaaattatgcaatatgccctattttttcagatagtgaattatttggaatacaaattcagatatttgtttgatactgtgttgatcagaagtctccttcacttctacacttagaacccctgcacgtagtagacccgcagcgcgtacaccgccgcggccacgagcgtgccggcccaccgccccgccgtgtgcggcgccacccgatccaggtagtgctgtgctggaatgcccgcgacgactctgtgcgccaccgctccactgacccggaggcggacccaccgccgccaacgggggagggctccatggtcgccggccgcgctggttgggggattccgaggcgaggcgaggcgagtcggtggggctaggtttcgtggcgttgccctgggcgatgggagcgctgcgcctgcgctgcgcatgggttggatttggtcaaagcgaaagcggagaagaggaggagaagggatatttcgacctgcaggcgggcccaactgccatctccgttggatgtgttttgaatggcccagatctatcgaatgttacacctgtcaccgaagctgagtcccgcacgcactagctctgcgatgtctgatcatcctggccagcaaaacgagctgctgacttataaatcacattacacccatagcgatacactggtggagaaaccatctttggtcagtcgatcagattttacaatagtcccgattgtgttataaaccgggactaaaaatatctttagtcccggtttaaaagctacagggtactttttcaatctttagtatcggttggtgttaccaaccggaactaaagatctatttatagtctcggttggtaaaaccaatcgggagtaaagattgacgcggagatcagagaagtgtgcgcgatcggatcgaggccggtacctcctcctctcctttaactcctctcctcaaccttatctcctcctctcatctttaactcctctcctcaaccttatctcctcctctcatccttatctctattctcctccttctcctccctactggcaggggcgcgagggccgcggatcgcgagggcggcgggtcgcggagggccagccggcgcggcgcgcggtgaggcggcggctggaggcggggcgcggagggccggcgcggcggctgcgcgcggcgaggcaacgctttctccctttttttttttgaagaatctgagattgttgtgtgatgtgtttgattggatctgagattattgtgtgctgtatttgatttgtgtgtgatgtgaatatgtgatgaattttgtagaagttgtgatgtaattttttttaagattttgtgatgtatttgagtatttgagatgatcgatctgtggatttggaggcaatttgaggatgattgatttaggattttggggacaggatggagtgaaatcaatatatttaaaaataatgaagaaaagaaaataataaaaaggaaccggaaagagcaaccagattagcctctttagtctcggttggtaacaccaaccgggactaaaaatggatttttacccccggtattttcacccgggaccactggtagagaaaccatctttcgtcggtcggccgaattccaaaatagtcccggttgcaataaaaaccggggctaaagatgatctttagtcccggttaaaaagggtaacgggcatatttgatctttagtcccggttcaaatgctgtcaggtcttgtcaggcccccccgggatctttagtcgcggttggtgttaccaaccgggactaaagatcgtaattaccaaccgggactaaagatcccggggatccaaccgggactaaagtgtcacccctatatatatgtcttcttcctcctccagctgcccaagcaagcttcaaaatttcttcaaaaaagaggggaggtcatgccaaaatttcaagtgaatttattttggtgattatatacaaatcagaggtgactaaaaggttagcaacttcatcctccaatgttttttttgtcatattacatttggagctatgttttgcacacttttttgtctccaaaatttagctgtaagttgatgagagagaaaatttgtgtggagaagaaagaatatatagcaatttagttgatttgctaaagaaggttttataaaatagttgagaaggaaaatatagtgaaagttaatcttaaataatagaaaacaaactaaaatgaaaattaaaagaagtaaaacacattaattaatattagtttaaaactttagaaatagtaaataagaattatttggtataatattttatgatttttgtatgaataaagatatgtcattattgtatgactgttgaaagagtttgtaattattttataattattgtatgactgtcattattgtaagaataattttttgtgtacgattttttttcatgtcatgtagatggatcggcaatggatgtacgctgaccggcggtccaaagagtttattgacggcgtgcattattttttgagagtggccgaagctaacaggcataagggttttatttgttgtccatgcaataagtgtaagaatcagaaggagtattctgcatccaggactattcatttccacttgtttgagtcggggttcatgccaagctataattgttggacataccacagagagcaaggtgttgaaatggaagaagatgaagtgtaagacgacaatattctggactttgctcagtacgttggatttaaaggaaatcaaacgggtgaggaggaaagggatgctgatggtaacgacgttgcggatgatcttggtcagatgttgcaggacgccaaggaggactgcgaaagtgaaaaggaggcccataaattggacaagatgttagaggaccacagaacgtcgttgtacccaggttgcgagcaggggcacaaaaagttggataccactatggagttcttgcaatggaaggcaaaaaattgtgttagtgacaaggcatttggcaatttattaaaactcgttaagaacattcttccggagggaaacaaattgcccgagacaacgtacgaggctaagaagatagtctgccatctaggactggaagttcagaagattcacgcatgtccgaaagattgtatcctatatcgcggtgaggagtacgagaacctagaagcatgccatgtttgcaaagcactacgatacaagattagacgagacgatccaggagaagttgatgggcagctagcaaagaagataattcctgctaaggtgatgtggtatttccctataataccacggctaaggcgtttgttcaggaacaaggggaatgctagaatgatgcgatggcacgctgcagagcgtcaacaagacgggatgctgagacaccccgccgatggttcgcagtggcgaaacatcgacagaaaatttaaagactttggaaaggacgcacgaaacatacggtttggtttgagtacggatggcatgaatccttttggagagatgagcagcggccatagcacttggcccgttacgatgtgtatctacaaccgtacgaagcctaaacatcgcagcggaaaaacagtgtttgctatggttaaagatcttaaagtagtgttcagaaaggggcctggaagccagcctatagagagcgaagatggtcacgccgcgatgtggaaaaagaactctatattttgagaattaccctattgggaattcttggacgtccgccacgcaatcgacgtgatgcacctcactaagaacctttgcatagacctttttggcttcctaggtgtatatggaaagtcgaaagatacactggaagcacgtaatgatctgaagcatatggaacaacgcggcgaccttcacctggaaccaaaggagaaaggaagccattacttgagtccagccagctacactcttagcaaggcagagaaggaaaatatgtttgaatgcttggagtgcataaaggtaccgtctggatactccacgaatatcaagcgaataataagcatgaaggagaagaagttcacaaacctaaagtctcatgactgtcacgtgttgatgacacaactgctaccagttgtaataaggggtatccttctagacaatgtccgggcaacaataacaaagctatgtgcattcatgaacgcaatttcgcagaaggtcatcgatccggatagattagaagcccttcagaatgatgtggtgcaatgtctcgtcaattttaagttgatattccaccttcatttttcaatataatgacgcatctgctttgtcaccttgtcaaagagatccgtattctcgggcctgtgtacctacacaacatgtttcctctcgagaggtacatggacgttctgaagaagtatgttcgtaaccgtgctcgtccagaggcaagcatcgccaagggttatggaatagaggaggtcatcgaattttgcgtagaatttatcgaagaccttcgcccaatcggggtacctgaatcactccatgaagggagactacggggaaagggaactctcgaaaggaaagcaataatgagggtagacaacaatttattccgtaaagcccatttcactgttctgcaacactcttcattggtagctccttacatcgaggagcacttggctctagttcgcgccaggaacatcggtaagtccgatgcatggattacacggcatcacattgatactttccccacgtggctacgacaacatctcatgggtaacgagtcgatcaaccaacaacttgccttccaggcgaggggaccgtctgggtcgatcgcgacattccagggatatgagatcaatgggtacacattctacacgagagcccaagacatgaagagcacgaaccaaaacagcgttgttcttgtcgatgccatgggacatgatggaacaactgccacgtattacggtgccatcgaggatatatgggaacttgactatggtcctctcaaggttcctctattccggtaccaatgggttaggttgactggtggaggcgtaatgattgatgacagtggtatgacaactgttgaccttaacaaggttggatactcggacgaaccttttatccttgccaatgatgtaacgcaagtctttttcgtgaaggacatgtctagcaaaggaaagaagggcagagggcctaaagagcctaagcgtcaagtggttctcccaggcaaaagaaaaatcgtcggagttgaggacaagactgacgaggattacgatcagttggatgggcaaccccctttcacggtgatgattgaccctagcatcctcctatcaaatgaagacaccccttactcacgcagcgatcacaaggagggaacaatagtgaggagaaagtacgtgcggtcaaccgtcaccgccgatgtaatgccgtaattattgtgtacacgatgtaaactattttagatgtattggttatccatataaatcaattgatgtatggcataatttactatcattcatatgctacatttaattgaatatcattcatatgctaattataattgactagagaatttttaaaagtattaaatcattcatgtggcatttacagatgttaattagagtttttcacaatttaatttactatctttcatatgctacttatatatgactattcttatttttaaaaggtttaaatcatgcatgtggcatttacatatgttaattagagtttttaacatttaatttaatataattcctacgctaagtatatatgatgattacaatttttattaattttaaatcatgcagtatgtacatacaaatcttaattagagtttttaccaatttaataatatcattcatatgctaagtatatatgattattggaatttttattaattttaagtcatatatttgcttattacgatttatccacttaatttattacagacaaaaataatttttcgaagtaattgtcattaatctttgtactttaaataatgttaatacattaacttctattttagaaacacatatgtaagcgaaaataatatgcagtgctataatctttagtcccggttcttaaccctaaccgggtttaaaaagaatttggaaatagcgggaaaatatctttagtcccggttgatatttactcccggttgttctcatcaaccgggactaaagatcgagggctatatatattcccgatgcgcgccctcgtcttctccaccaacacttaacgttttcggccgatcgatctctctcggcctctctccttcgccgccactgcctagggcaaatccccgcgtcgacgccgccgtatctcgctgtcgtctcgagctcatcgtcctcgccgccgcctccgcctcctccgccgccgccgcctctcccttcatcgcgatctccgatctcgatctctctctccgtcgcgccacccgccacgagaagccgcgcgcgcaacgctgccgccgccacgccacgccgccgccttcgccgccgcgcaacaccgccgccgcatgcaacgccacgccgccgccgctgttgccacgccgccgccgccgccgctgccgccacgccgccgcgccaagcgccggcccgatgctgccacaccgttgttaacgaacacgtgaacgagaacgaacacgtcaacgtacgttgccgtgagaacgtgaacgagaacgagaacgatcgaacgaacgagagcgagaacaagaacgatcgaacgaattaacgtgaacgagaacgacaacgaacgtgaacgagaacgaacgtgaatgagaacgagcgaacgaacgtgaacgtgaaatgcaatatatatatgttacttctcatttatcctaatacatattttttgtatcttgcagaaaagacatgttgtcggagtcgtccctcaagccggagtagaagagctagccctagaaggaattcgtgcaggcaagtgacgtaataatataaatgattgttatatttgtaatgcaattaagaatattagacttgtaattagacttagcatataagattgtgtagtgttctaattttatttgagttttaatataagattattttattgcaaattagacttagtatgtaattattgactacagaattggttcgactcctagcaattgactattgtagtcttaattagacttagcatatacgcacgaaacacttagcatacatgactattttagtcttagcatgtaatattatttgagttttaatataagattattttatttgtaattagacttagtatataattattgactacggaattggtgcgactcctagcaattgacaattttagtcttaattagacttagcatatacgacagttacacttagcatacatgactctttcagtcttagcatgtaatattatttgagttttaatataagattattttattgcaaattagacttagtatgtaattattgactacggaattggtgcgactcctagcagttgactattgtagtcttaattagacttagcatatacgcacgaaacacttagcatacatgactattttagtcttagcatgtaatattatttgagttttaatataagattattttatttgtaattagacttagtatataattatttactagctagggttgtataatatacgtcacctagacttagcttatatcacgatttgtaattagacttagcacgtaaggttgtgtagggttctaatgtacgacatttacacttagcatacatgacttagattgttaaaacataaatgtctcgtgacttagcagatgtttcttgtatcaacagatggctgaccgcgatgaggaacagatattgtacgatacaatcgcggagggaagcagccagtactggaatgaagaagaggggaacgcggatccaaaccagtacttgaacgaggaagggaacgtggagagggatgcggaggggaaccagcaggggcacgtgaaaagggatgtggaggggaaccaggaggaggaggctagtggtagtcaaccctccgttggacagaagagggcacgcaggcaatgaggtgcagcgaagaagcttgagagtcggcacatcataacggaagtggaagaagatggacgtcctattgccccggccgaagccaccaagaactatttacgtcacagcggttgggttgtgcgggataacgtgcctgttagtacggtgtactggcaaagaacaagggcacgtggagatcatgagagctttgtctcagattcggagaaagagatgctgtggaccacaatgctcgagacattcacccttcccgcgggtacagaggacaaagtgaaaaggtggactctgaagaaaatggcagaacagtttcagagcttcaagggagagctgtacaagaaatatatcctgaagaggcagacaccgaacttcgacacatttccaaagctaagggatcactgggacgagttcgttgcatataagacaggtgaacaagggcaggcgatgatggaaagaaacaaagaaaatgccgccaagaagaagtaccatcaccacttggggtcaggaggctatagcgtcgcgatgccgaagtgggaggagatggaggctagcttgattgagaggggtatcgaaccggcaaccgccaattggccagaacgatcgaagttctggtactatgctcacggtggaacgctcaacctagctgatggctcactggtcttcggcgatcagatacgagaggctgcgcgacgactaacagatacagtggaagcctcgtctcagggcacgttccgaccaaacagagatagggacgagctgacactcgccctgaagactccagagcttccaggacgaacacgagggaaaggggtgattccttggaagattggtttcaaggtggacatccacacgtacaggagtcggatgaggagtaagagagataccgaggcgaagattgcagatctagagttccgggtatcgagctacgaactcagcatgcaagaggaggtggcaaggaaggttgatgaacgcatggccgcacatcggtcccatgatccccagccgaccattcctcctgcaatggtgagcccgtcaggaaaccgtagcagctgcgcctcaacagggcaggtaggatcatagagcatggacgctatgcaaacacaggacgaatcgacctgtcccgttgatgacatcactcagcggacaccatgtgagctgcatattccttacaagaacttatcaataaagataagctcgtagtttatatattttaaatttagccattccgctagttgctgcttatatatgttgattactaataaataatctctcacaacataaaggtggcgtcgggcatggccatcccaacggacccttcaggtacttaccactgcaggccgattccagcaggatactcgaaggtcaaagttgagttggtcgaaggcgcgtacgaggacctccagctggattaccctggaggagacggtgagacgcatctacgagacacaagccatgccattattctatggcgcaggcggtacatcatcatcccttggcgacaagcggcgtctcgtgcaccatctcctccggctccaccatcaactcctcaggatcctgcaccgtctcctcctcattatccgccagcaccgtctccacctcaggctccagcaccgactcctcctcagtatcctgcaccgactcctcctcgggctcctacacctactcctccgcaagctcctcttttggcaccttcaaagtcaagggccctcccagctccaccgcctgcccccacaagggcaacgaagaaggcgaaagttgacgccgccaagaacaaggacccggggtatgattgcacgcaagaggagcttgacgctcatgtggcatcagaagtcaggagacaattgaagcctcgaagtccagaaaaaaagattcctatagacccgagtgtcaggaacttcttcaggggtatgtctgcacctgccaaggaggccataaagctattgaactatgagcgaaccctcaagaaagcatcttctggaaagtccaaaccagtccctcagcttggagagcaaccaaaccaggagatcgagccgttggtgaccggtaaagaaatgacgatagaacaatttattactgacaccggtctaactacggatcaattgctaggagtcgcaccaatcgaaaaggcggaagtgaaatacatgtacgaactcggtaaaccgcttgtcaagcctgagctgctgcagtccttacccacacaaatgtacaagttccatcagctttacatggagatgagcgccaccggtagagagatgatcgaagcgaggatcagggacacggacttcttgcaaggagatgacattctctggatcaatttcaggggaatctacgaactataccagctggacgccctcgacatctctattatgagttgctggattttgtaagtatgtcgttcagttagatttcttactatacgtctcctttaattagttaggtccttgtatataagtagactatagaaaataatatactcccttttatcattgtagaatggagattcaaagggcccgacggcggagggttttcgatactggattcatcgacactcggagagtaaacgtcgcaatgctcgaccaatatccacaagaaacagtggacaatctcgtccatctcctgaaggtgcagcattccaagacgttcatactgttgccgtacaacacagagttagtttaattttactgtcttcctacataccaaatttcattcccgtatgaacttgctaagtgtttcatatgtaatgcatcccacgcacattgcaaattccactgggtgcttttactcttcgacctgtcggcctgcaccgtcaacgtatatgactcaatggataaaaaagagtctacgtttgacaaggtttatgaacttatagataggtaccgtcataagttcctctgttaattaagaaaatcttgttatgttaattgctactacgaatcatagctttaaactccatgtagtgcttggtatcggttccgtcatttggtccgcggcaaatggagagaaagacttaggcggaagttcaaatttcctgtgagtacacatgctctacttttatatttctccgattcaaatacatacaagtgtatattaattagatctctcgttgtttgtcatttatttgtagtgcgcaaagcaaaagcagggaactaacttgtgcggctattacgtgtgcgagtattgccactgccttgtagaccaaatcatcaccacaagagagctcgatgtacgtacaaataaattcaaaatttcattacgtaacgatttcttgtttaattgctaatcaatttcatacattcatatagtttattcgcatgagggataacctgactacacacaaggaatttatcgcggcggttcaagaacaactcatgggattcatcaacgaagaaatacttgatcccaagggtgaattctactacgacggaaacacaattcaccggtccttagcttctgagctagcagcgagtactactactacgtcgaaatcgtagctagctaggacatataatggattgtaattaatacatgactacatatgtttctatatgcatgtgtacacattttctataatgtaaatatattttggtcatatatatatatatatatatatatatatatatatatatatatatatatatatatatatatatatatatatatatatatacacacacacatatgcatttgcataacatatatattatgcatgtacttatgtacttatgtactgaaccatatatacatatataatatatatatatatatatatatatatatatatatatatatatatatatatatatatattgaatcatatatatgcatggtttatatatatataaaccatgcagcaacagggccatgaaaaaaaaaaaaggtcagctcgatctttagtcccagttggtaataccaaccgggactaaagatggctcagccacgtggatctttagtcccggttatttcacccgggactaaagatagcgatctttagttccggattggtactcccggtttaaaaaccaggactaaagggggttacaaactgggactacaaagggtttctccaccagtggctggttctagctatagattaatcttggttttgagtatcgcatttgttgtctagtctatgatcaatgtcaatctgtgtgttgccgaaaggaattttttttatctgacttgtttatgttagcagatcgagtctactcccaaaaaaacgcgtggtcacaattcgagtagtaggtcagaaggcaagtcttgttcgcttcctaatttcttgcgccaacagaacaggaaagaccgagattttcttcctgtgattttggtttattccaaaaaaaaaaagaaaaaaaaaagagctgctgcgtgcatatccatgcaaggaaatttcattccagtgctagcttgagtcttcttgtaatttaattagccggttgttccatttgatagccgccacttgttcaaagaaaaaaaaagaaaaaaaaggcaggaggtgcaaaaaaaagagagaaaaagagccgcaccaaaaaaaatcagaaaaggaaaaaaaagaaaaaaaatcagaaaaagaaaaaaaaaagagaaaaaaatcagaaaaagaaagtgtggaatttttttgttggaatcttggagagagttgcttactatagcaagttgtggattgttcgactgtgatcatttgcttgcttaagttaggattgagtctagactacggcagcaattttgactagtactttggactagtattcaatttcgcaaatctgtttgatttttgctattccttgtgatatagttaagcctatcaagatccacatactactaacctttacaggtccggctttgcaattgctccactcatcaagcgtgtcattgtgccacgaaccagccacggtgattgacctgttttgcattctttgagaatattataagaatttggtgtatgcttgagtgttgagtgccttcaaaagctccacatatctatagattgttaggaactgatactttcttgtgagtttcttttgcttgctaacgatgtcaggtacaagttccaatgaaccaacactggagaatgtatcgcataaactgaagggcatggaaagttggtatgaagagttgatgcgtaatagtaaatcatacaaggaaagcatagataaacatttaaaaaccttaagtgaaagcctggtgaaagtagtggatcaaattgagcaaatgaatcgatcacataaacaattaactgaaaacattcagaatatgaatattggacatgaaaatattgtgcgacgcattggtttacttgaggctgcaggtgaagaaggtgcaggtgccactgctcatcgacaccaaagatatgacgatgaagacgaagagaaatatgttgctgatgatgagtaggaagacgagagtgttggaaatagaagacgatgtcgagttagggagaaagatgattatttatctaaggtaaaatttactatgccttcttttgatggtaagtttgaaccttctatttatctagactgggagctaactgttgagcaaaaattctcttgctatgattttcctgataataagaaagttaaagctgccagtagtgaatttacctcctttgcatctctatggtggaatgatatatgtggtagaggacttagacctagaacttgggatgatatgaaacgtacaatgaggtctagatttgttccttcttactatgcttgtgacatgttaaataaactgcaacttttaagacaaggtcccaattctgtagaaacatactatcaagagatgatgattgctttgtcatgctgtgatttgcagaaactgaggatgctagaatttctaggttctatggaggtcttaatagagagattcgggatatttttgaatataaagaatacaataccgtgaatagattattccattt

SEQ ID NO: 27339 - DNA, 9229 bp, Oryza sativa
aacaccacgtcaatctactgctgcctttcgtccagcttcttccacaccacctaccttcacgccattccatgttcaagaaacaagcaaaaatgcttcaattcaaactctagccaagagtgaaacttcagtagtttccactggacgtacctgtgatactacatgtcataggggccatggcattggacacattgcatgtgactgtccaaatcggcgagctttatttgtgaacgctgatggtaagtatacttctgctagtgattgtgatgatgaatatgctttagctgccactgaccatgcaggaggacaagataatgatgacatcgaggaagtccatttgcatccagagtcgctagatcagtatcctagcctaattgtcaagctagcacttagtgctaaagagaagtgtaaagagcaaaaccaacgtcacaatttgttccaaagcaaagttcttgtgaaaggccataccgtgaaaatgattattgatagcgagagttgcaacaatttagcaagtgaagagatggtcaagaagcttggcttgactacccatccacatccacatccgtatcatattcagtggtttaatacatgtggtaagatgaaggtaacccgcttggttaaaatacctttttctataggctcctaccatgatcaaattgaatgtgatgttgtgcatatgcaagcttgttctgttattttagggcgaccatggcaatatgatagagaagttgtttttgatggtaggactaatacatataaatttatgttcgatggtaaaagagttgttttgcattttatgactccagccgctgctttgaaagatgatcttgcaagacttgaatgtgaaaagaaagcgaaaagtgaaaatcagattattgctaaacatcctgcttcaactagtaaaatagaaccaagtaccacaaagaatttagttttgtaatttagttggtattagagcttcagttgactagtgaggattttaattttgtaattttttccccatcatccactatacagccacaacacttttccgttcaccaaaccatatatttgtgccttgcgattatcatcctatttgcattattgaattttcgtccctcgtcgtgtcagtgctggtcatagctactgatgacgctctctctcgtggcccgatcttctggtgaggggataactctcgctttgatcgagtgcgacatttgcgacatagctaccaaaaagaacaagtccaggacgccgtgcaatcgctacaccacaaacgatgtcgtaccaaccgtgacgcgcggttgatgatccctgcaatgtaaacgagaaaacactgcaagaacaagataagatgcaatctaaatattgcgaataggtgattaagcacaaggaatagtttcgattgaagtggtagatctaatcgacccggcaaatcaacacaccaactattgggggctctgaatctaaagtcgccgactaatcgaacgagaactagagataaggtaaatggcacttggcaaaattcaactaaacaaaacccaattgtttttgaggatgtacaaagctatttatagaggaaaataaagctagggttaagtgctaattcgtggagctggagggagacacttccgatatgggcctagtctattataaggcccaaggcccaagttcggtttcagcaacaccactgtcttgttttggcgattcctgttgactcgagacgaatttggacatgagactggatgcgtttgaaaggtagtgagataagctatccacgaagtccaagatcacccaaatcggagttggcatgaagacgctaggtccgtttgaagtcagtgctgtctccggaggccgaactggacttggacttggaattatcattggaacatgtgaagttatgagcgtatccgacgaagtgatgtcctcattaatatgtgtgccacatgctatacttgtggtatctatgcttggtgccctctagggaaacaaagagaagattgatatcatgcaaatagctcttcagttcttcccataaaatatagtttttttatgttttgtttagacacaattttgtttatggtgttaatcaaaactgcttatttttttatggtacaaatacaatgtaatctttagaaatgagtgaggttaatcactaaaaatatatgtagctaaacaaacacgtgaccgtgacaactgtagtagcatataatataaaagttacaattttgtgataatttcccacgctattgttgcagcaaactgaaacatgtcgctaattttgcagcaaattgatagttttgttttgcagcaaactgaaacatgtcgctaattttgcagcaaactgatagttttgacgctaaagttgcggttttgtaaaatttactcttgtttatattcaagaaagatctatattttagcatcttgtttgttttcgtcacttgttgtccataattgcatgatacacctttagtaattctaaaattgtattaatttcccaaaattatttataataactaatttgttgaggtgtacttatagttacgtcactatggtatggtttggtttatgattgttatattataattcctcaactataacaaaatatatggtgaatagttttatactcatgctataggattgttcatttgttaccaaacctatttgacaaagaaaaaacgtatatgctcataattcttgtgatggattaaggagtcatattatagcaagatcattgccggagcataccaatccaatagttatgaaaaatttaaaaactttgagaatctcaatctcacacaaactaaaattaaatcagatattgtcacgcccggaaattcactaataatttccgaactaatttgtgcataaaatcctcgtccaggaatcagccgaggtacacaaactgacaatttaatatacaaatccatcataataacgttacatacttacaaaagaaaagaaaatagcagtggaataacggtctagcgatggcttcagctctactcccacaggcagctcaactggggtataagccaaacgccttctccttctggatcctttttcttcaactgaggttgattaattattgcaagaatgagcatatgacatactcaacaagccacacagcaaatatgcaaatgcacaaggataccaaaggatggcataatatagtcttatttgcgaaagcagcatttagcaaagagctaagagtagtaaaatagtagagtaattaatcagaaattttaatcaacactgaacagcacacccatgctgcacaggcccaaccatcctgaacaaccatacccggctatacagatctaactccaaaccaggagctaaacaaattattaccagttatagcatcaataattattgtgagaggtgtgagactaatcacgaaaaacattgctcaacccgcccataaccgcgggcacgactattcgaatagttttactctggccagaggtgtaccactgtacccacaagacacagccccacagcatgtcaccatgcgcctcaataccaccacggtaccttggaaaggagctgtgacagtacccctcgcagaacacaatccaccacagcgcacctttcctggatcataatcaccctcttataaaacaagacatggactctccagcgacccccgtgggcttatctccgccacttctcagtctggtgctctgcaatgaaccatgctatacaaaaggtaaagccattgcccacgctggcttgtggttggcacggttaatgtttcacaaaagtagctcgcgaaccggtccttaattgtcatgagcatgactctcaaaaccatgtgctcacaacctaccattatcaagttttagttggcaagtaattaattaaccaatcacgattgaccatcgtgaactatcattaagccatcattaaataatagtaagtcataagttatcccaatagtgtgctaatgtttctaagcatggctaagaatcatatataatatctagctgaaccaatatatacaaagctcaactagtcaaattataatatcccaaggtatcaaggaatagagtaatcaatgcaaacaggccataacaaaggaatagatttacaccacccagtgacattcgaaaataaatgcacagttgaaataaatagagaatttaaatataggatcaacatgctcaaaggattgtttgggatctgtgtgacttgccttgcaataatcggtcttcaattaatcttctgaacacttccgacgcactgacgaaccttcgcaataacggaaacgacaagctaacacgcaaaacgaagaaaaagactaataaaaaccaaataaacagtacaaaaacaagcataaacagtacatgtggatatttttaacatgttgatctcaattttagaaaaatttagagacttgaaccaactaaatccgagctaagatgaattagttatgaattttcaaagattaaatcggattaaaacacttatatggattttaattgaattatgacgcaataatgaattatttttgaaaaggaaaaggcaattattacgtcagcggctagggtttgcggtggaccgggtgcacggcggcggctcacggaaacaaatggccgagattcatccatccaaaacggacggccaagatccaacggtccacggccagaccacgagagacgatgacgatgacgtcaccaccggcggtggctcgggcgcgcaaactcgccggcaaacgacggcgcgacgacgcgaacggaggacaccaacacgtagagggcgatgcggcgaactcaccggtgaccaaaacaacggcggaagatcaacggacggcaacggcgtcgaggaagaagcggcggcgaccttcggcttgacgacgacggcgatgctccggcgacctacggcgatggcggataggcggacgaggtcggcgatggcttggtgatcacgacagcagccttcccgagcgacgacgacgacgggagcggcggcggcgcacggctagacgaacggcgatgacggcggcgctagactacacggtgctagggctctaccggcgacgagaggcgaaagcgagggtggcggcgggtagcggcgggcttgggggtccttttataggggcaaggaggcggcggcaaaggcccacggcgaccagcaacgcgaaggaaagtgtagggttcggaggagagagatcgatccgaatcgaactcgaatccacggatttccaaacgattttagccgatgattccaaaagagaaaaaggtagaggagatcccgaagatcatttcccctctatagatttctccggagaaggaaaggcgcgagcgaatttggaaggagacggcggcggcgcagctcggctagggttccggccgggcgacggcgcgatgaggacgacgagtccgacaggtgggacccacctgtcagcggccgagcgcgcgcgcgggcggctgcgggctgactgggccgaagaggagagagagggaaggttttgggccgactttcggcccaaagccaaaagaggacttctagaaccttttccaattaaaataatcacttaaattatatttgaattgttaaaaatacttccaatgctcaaataatttcaagaaaaatcctgaaaatacttggacactcgaagtacttaacaaaattataattagaccatctaatgattaatttaatatgtgggtaattactgaaaagctctttgtatgattaaaaaaaattaggaattgagctccgaaaaaatccgagaatattccagagagtataattaaccatggagaatttaataaaaattaaatccatctatgctttatatttaggaagttttatttcccacctttaacttcacttgtaaattaatgaacatttaatataaattctaataataatttattaaataatttataaatcctgaaagaaaaatcaggatgtgacagatataattaaaaaacataacgttgcttcatttttcatgcatttagattccagtttgtgttatataattgtcaagtgatatttgaccataaaatataatgttaaattatttcgaagattatcatgacattatttattatattctgcctaaattattttaaaaagtattatgatactccctccgtccgataatataagggattttgagtttttgtttgtgttgtttgactacttgtctgattaaaaaattacttattatatgtcagctccaggtgttgtaatgtatttagcactataatataactatgatatgttatcaagatttgaatgcacctgattataagttgactataaaatttaaaaataatctaaaaaatcgctgtttaaacacatttaatttgtttttatatcgacatagtttaacttgcatatttatatttggagtaataaattttattttatcgtatataaaatcctattttgaagtccgtctatatattttttcgatggttctaccaacttatattagtatttttcgggctttatagttttattatcgcgcgttcgtatgtttctttgctttttttcaatcgaacatccagtaaatggtttctctggtatacggtatacacaggagattaaaaggaagtgggctaatcttatgatccaaaataatgggtccatcattttgaatgaaatttgacaacgaaattatatagtaccacgtggcattctaatagtgcttgctgaaacaccacatgaccatatttgtggagtgataaattttatttttatagtatagcaaatcctattttaaaatgaccgtatattatgtaccttttttaacggaacagtactatatagccttatttttactcgtgcatacgtaagtaattttttttcaagtgaacagtatctttttaatagctgctccctccatcccaaaaataagtgcagttttgcactattcatctccaacgtttgaccgtttgtcttatttgaaaaatttttataattactatttttattgttattagatgataaaacatgaatagtcatttatgtgtgactaattttttttataaatttttcaaataagacggacggtcaaacgttggacatggattttcatggttgcacttattttgggacagaggtagtattacataggtaattttttttcaaatgaacagtactgtacgtacgattacacgatgccatcgtacgtgcgtgtgcgtacctatgttgaagggctagtttctttccatagtacgtacgcaagtttttatggtgtaaacggtttcactcatatctataaaatattaagagcgagcaatatatgtattctaatggtcttaaataacggacccattaatttaaatgaaaattgatggtgagattttaaactaccacgtggcaacctagaaacaacatttgtaggagcgccacgtggtggcttagaagcgtttgtagaaaatttaatggacttttagtatataatagaatagatatccacatgatgatgttgtgtcaacttcttcatcgacgatggtaatcagtgggcacgaaatttaaatctcttgggtggctttcgaataatgtcaaggttcttggagattaatcaatcccagtacgctttgtttgatctttcaagtggtgatgtcaaagtgagcaggcaacctacccgttggaatgcggggtatgaaaagaaagaataatatttacgagacgagctgagttgcattggtttgattaagattccagaattcttgaaattttggcaaagagaaatgggattccatcgagctagaggagcaattaacactggtagagaaatcgtttttagtcccggttcgtaacccccctatagtcccggtatttaaatcgagactacgaatccgggactaaagatccctctctttagtcccggttcaaatacccgggattaaagatcgatatttagcaccaaccgggactaaaaataggagtggcagtcacggttagttttttttttcatttattgctacttactatctctaatttattttctcccaaattaggtgggatgcatatccccaaatcaaaccccaaatcaaagtcaaaccccaaatcaaagaaacatcccaaatacacaaatcatgtacatctcagatccatgcaataaatcacagattctaaaaaagaaattatacatctcaatccatacaatgaatcacaaattcttcatctcaatctatacatggatcacaaattcttcaaaaaaaaaaaggaagcaaagccgccggccggctgagccggctgctgcctcccctcctccccggccgccgccgcgccgccctctgccggccggcccgccctccccctcctgctgcacacacgggaagggataacaaagaaaagagataaggaggaagcgaagaagggaaaatattaggattagagatgcagagagagagtagtttgtgtggacgggaaaagagaataaataatagggattatatagtgcgctttgatctttaatctcggttagtaacatcatccgggactaaaggtcatcgtgatctttaatcccagttagattaaagatccgatctttactcccggttggtaactccaaccaggactaaagatcctaaaggggcctgacaacacgactaaagattctctggaggggcctgccaacacctgatagtatgtgaatcaggactaaagatgatctattaaaaatcatgtagtctcgttctgcttataaaccgggactaaaaaccatctttagtcccgatttttattgcaaccgggactattatggttttggtcgaccgggcaaagataatttctccactagtgtaagtagcaatggtacttgaagcatatagctaacaatctcttgctgcatccattctcatctgacgaaggacgatgaaaatgctgagcacggacgagctaggagattgtcctactggccgtttgttggtaagaagaagcagcatgaatggccagcatgcggacgtgtatatgcacttgtggctccagctctcatggcggatgtttggtcgattcatcacatagaggcatgaccaccaacaagcatcaaaagcgtctccaagccatatcgatccatgacattgtccgactgctcatcaatggctcctagtgccttccatgcctatggggatagaggacacagagcctgcgaagagcatgtatcgagccacgatgttgcatgggctgaaagtatgcttcagtcatttctctgttttttatgcgtaggagtatttataaggattcctgtaaaaaaaattataagtacgtacttgcgcacttgcag

SEQ ID NO: 27340 - DNA, 9361 bp, Oryza sativa
aattacaaaagataattctataccaatatgttctcataccttctcctatcttagtaaataaattacaaaagataattctataccaatctgttctcataccttctcctagtaaatgaattatgtggtgatgttacaacaaaatttttcttttaaaataaattaatattaaccaatggttctcgacataaaattattatgccgatagttgtcaacatattaatcttgctacaaaataatatttgcacgttattggccttctcttagtaaataaattacaaacgcatacccataacatttctcttagtaatacattgacggatacctaaacgatttcggtattcaaagtccttcgacgaacaaatggtagtattttttttcctcaacgatatacacagctgttattctggcagtaaaaaagttcctaattgtcatgcctggaatttctatccaaaattccaaacgcttacatgtatgtaaaccctcgtccagtaatcagccgaggcacacaataacaaattgataatagagtacaattattactctaattaataagcgaataaaatgtcattacaggggtagatagttcccctcaaacaataaagttctaagcagtggaaaataaagaaacagcgcaggcgactcctctccacatgcagcttgatcagggctacgcctaatcatccacaccatcagcatcactgtagaactcctcctctgatgaatgattgcaaggtgagtatatgacatactcagcaagtcacgcagcaaatatgcaagtgcacaggataacaaagaatatcatagtatagtctcatttgcataaatagcatttaataaatattttagaatttaataaaacagttaaataataattaaacaatattaatccaacgctatacaacataccctgttgcataggcccaaccattctgatcaaccaatcctggctgcacagttctatctccaaaccaggaattaaccattccaaaccaggagctaaataagttattaacatcaatatggtgagaaatgtgagactaatcacgaaagacattgttagaccagcccataaccgcgggcacggctattcgaatagtttgaactctggccagaggtgtaccactgtacccacaagacacaacctcaacatcatgtcaaccatgcgtcgcgatacttgacaagtacccgaatagagattgtgacaataccctctatataatacaattcaaagcagtgcaccgttcccggatcataatcacccccttataaataatgtatggactccccagctacccccgtgggcttatctccgccacttcacagtctggtgctctactatgaaccatactatacagaaagtaaagccgttgcccacgctggcttgtggctggcatggtaaatgtttcacaaccgaaaatcgtgaaccggtacttaattgtcaagagcacaaccatcaaaaccatatgctcacaacccaccattatcaggttttagttggcaaattaattaattaaccaatcatgattaaccatcatgagctatcattaagccatcattaaataatagtgaagcataagttatcccaacagtgtgctaatgtttctaagcatggctaagcaattatatctagtatccagctgaacccatatataaagctcaactagtcaagttataataacccaaggtatcaaggaatagagtaatcaagaacaaaaagggctataacaaaacaataggttaattccacccaatgatattcgaaaataaatgcaatagttgaatagaaacaatagctttaaacaggattaacatgctcaaagagttgtttgggatctgtgtgacttgccttgctggccttgaaattcctcaaaatcttctcctgcaaattcggactctccgggaacgtcagaatctaaagagaaaagaacaaaattgtcacgtcccaaaacgactctaaaatacatcctctaaattatgcctagaataattaaaatccgtgtgaaagcctccaaccattaaaaggtgcaaagttaaaagtcaaataaggcttgggggatttttgtatatttcctaaaagcctaaaatgcgtaaataaattttagtggaattttcagagcacaaataataattattaagaaataaacaaagttaaaatgattttataaaaagaaaaactctaaaaagtcccctttccctccctctccctcttgggccggctcggcccatctccctccccctccctctcctgtccccgcggcccatccggcctctccccgcgcgcgcgccgctgacgggcgggcccgcccgccaccctcgctgatgggtggggcccacccatcatccccttcctcccgctgcctcgcccgcgccctagcgccgccgccgccgcgaatcccgccacctcccgccgtctccgcgtgcaataaagagggggaaatcactccccgtgatcccctctccctttaaccccatttttccctctctctctcgcgttcaaacgggcggatttgcccccgcatatctcgccggcgccattgatggcggccggacctcccgcgccggtttcctcccttccccggccaccctctcccgacccagctctatttaaaccctccccgcacctcctccgtccgtttccgcctctcgccgcccttcctcctcgccggaatcgagctcgcgccgtcgctctctctctccgccgtcgctgtcgagctccggtccgccgccgtcgtcgccccggaccacctcccaccttggcgccgcctccttcggcttcgccgcatcctcgccgacctcgtccacccctccgtttcgctcgccgaccgccagaacgccgtcgacccgagccgcgccgccgccttcctccgctccggccgcctttttcgtcgtcgccgtcgacctagggtgagccgtggaccgccgcttcttttcccccttcccttcccctctctcggccgccgctccgccgtgcctatggccaccgccggcgaccataggggcgcgggcgctgcctcccgccggctgcgccggcttggccgccctcgggcgcgccgagtggctgccgcgtggggcctggccgtcagccgcccgcgcccttaggtgcggctgacgcgtgggacccacggcgccggccgatgtaagcccgggtgcacccggtccaccgtggaccgtgaggctgccgcgtggaccccactctcgtggacccggtccgcgcgccccctcccctcggctgacgcaataaacccttttaaaattaaaatttaaatgaagaaattcgcaaatattcatttaaagagcatataaacttcaaatgaccataacttggccatttgaactcggaattggaccgtttaagtctctaatttttccttaagaagtcaagaacccatttttgtgctttgttccagcttgttatatggagtttattagagtaaaagccttttcttttccgttggtcgtgtagacgctgcagcttcggaagatccgctcttcgtggaagttgaagccgacgtttgggaaagcgagcaaggcaagtcacatcatccttgaacatattgaatcccagtttataaaattattttgatttaaattattgcattatcgctttttttaaattcccgcgttatcattgttttatctagccatgcctatgtacctttgttatgaccttattatccttgttcaccctagaataaacaaaaccccaactagtggacactctactcatggtaccactagtatgattttagttagatgcttcgctggttaattaggtaacattaggtggtttacaactctagaccttgggaatactcttattacctggacactatggaattgttggattattgtggaattggattcacacctccccctctattcaaaatcctcaaaatggttttaggctgggctcggggtgcatggttttgatagtagcacctcggccatataaggaccggtcttcgggcctctgttgcaaagaactaccgtacttccacatgtctagtgggtaaggcttagtttgtggctcagtctggttataaacaaaagtacacggatggagatagacgaagtcgggggtcgatggacatctctagggcaaatgaaggctacacgagctgcggcccggtagtcgagatgtcatggcacagggccggtgtcctgctgctaggggctcagtcctgcctacctgtcccgggggttccggccgtaggtggggttgggtcagtactcttgtctatggcaaggatgggttggaaactatgtcacgtcttccgtccgtataccgtggtggtatggggcacgtggttacacgtgaggaagatgtgtcttgcgggtaaagatgtacacctctgatcagagtataatctattcgaatagccgcgccctcggttatgggcaagccgagcaatgtacccaagttagtgttttaattcttaaaacctgcttaacaactaaaatgtgaaatggttggcctgggttggcttgggacgagctgggacccagggtcaggttgctagttcggtctaaatcatcgtaggccttgggttaaggcaggttcgtgtgggttcacggccttgtttaataatcttgtatagctctaggatcgtatttacaaaatagctttgagcaactaagtgtcttttaatgctgtttgctgcaaaccctaaccctttatattataacccccttgtactcccttgcatttatcctgcacttgtgggtgtgtcttgttgaatacggtggttgtactcagtcttgctcaatttttccgaaacccagaagaggagcccctggaagatgaaggctttggtgtctagctcgcgcctgccatcaagcgcctgtggtcgtcgccctagccttccgctgtttcccatttgtctttgtgtgtgctgggccttcgccgcccatgtaataaattaattaattacgcttcagcttgtaaactctgaattgtatcaacttttggtgtaccttgcctcctgggacaaggaataatgcacgcacgtaaggaacgcccgttgggttatttccggtcgtgacaaaaatcaccaaaacagcacataaacaagcatgaacagtacatgtggatatttttaacatgttgatctcaattttagaaaaatttatagacttgaaccaagtaaatccgagctaagatgaattagttatgaatttttaaagattaaatcggattaaatcatttatatagattttaattgaattatgacgcaataatgaattatttttgaaaaggaaaaagagattattgcgtcagcggactcggctcacggtggaccgggtgcacggcagcggttcacagaaacgaacggccgagatcgatctatccaaaacggacggccaagatttaatggtctacgaccggtctacggcggacggtgtcgatgacgtcagcggtgacgtcatcaccggcgacggctcggacggcgcatcctcgccggcgaacaacggcacggcgacgcgaacggaggacacctacgggttgcgggcaacacggcgaactcactagtgaccaaagcagcggcggaaggtcaacagacggcgacggcgtcgaggaagaagcggcggtgaccttcagcttgacgacgacggtggggctccggcgatctacagcgacgacggaggggcagacgaggatggcgacgagatgacgatcacgacgtcggccttccctagtgacgacgacgaccggagcgatggcggcgcacggctggacgaacgacggcgacggcggcgctaggctacatgacgctagggctctaccggcgacaagagacgaaagcgagggtggcggcgggtagaggagacaccgggggtccttttatagcggctagggggcggcggcgaaggcccacggtgaccggcggcggcgatggaaaggttagggttcggagagagacaaatccgattcgagatcgaatccacggatttccaaacgattttagccgatgattccaaaagagaaaaggtagaggggatctcggggatcatttcccctctatcaatatgaccggagatggaaagatgcgatcgaatttggaagagcggcggcggcgcagctcggctacggttcggccgggcgacggcgcgaggaagacgacgagtccgacaggtgggccccacctgtcagcgggcgagggcgcgcgcacgcgggcggcgctcggctgcgggccgacctgggccgggaaggagagagagagaggtttgggtcgactttcggcccaaagccaaaagaagactttttaaaacttttccaatttaaatttttcatgaaatgcaattccatttattaaaaatacttccttggctcaataaatcccagaaaaatctaggaactatagaatcaagcaaagtatttaataaaattttatctggcccaattttatattggaatttattatttaaaattagatcttctcttctaggcttttaaaattatttctaataattccaattaaacaataatttatatatttgagatttttagggtgtgacactaatacattttttttagataatggaagtattattaatctcagtaaaattctatcaagtgatacaattattctgagagcacctccggcttctgcacccaaagagtgcacacagccaacaagaaagaaacgaaagataaactcatcatccaaatagcagggacaaaaagaacttcaggagccctctaaccgtagcctagaatgccacccatgcgccggggtagaaaactccatggccactagctccaattgttgacaagccggaatgatagttccctgcaaattgaccttctgaaggatagcccatgagcggagccaatgtgtaataaaaaagataacctgcaaaggagaagatatgtttttttctttcaaaaaccacatcatttctgcaaagccaaatagaccaaatagttgttgttgccctaacaagaccaaaaatctcaaattgcgtggttgtcttcttatccaatgcccaaacatatgagttgtactattaggtaaactaatattcgaagcaaactggattaaataccaaactgcgcgggtaaaacgacaatcaaagaacaaatgattaatagtttcatctttatggcagaaagaacaagacttgtttcctctccaattcctttaaataagattatcttttgttaagactactccacgacgtaagtaccataagaagatcttaatctttaggggggctttgatctttcagattcttttgtttatattgggaacattggtctccaccaacgcaagataaagagatttaaccgagaatctgccatcagtggttagattccatttaaactcatcttggtcgtgagataatataatattagcgatgcgtgagagaaggtgattccgcgctactaacttagagccagtaaggtccctacgccaagaaaagcttagaggactggtttggaaaatttctgaaatagttgcatgtttatgcctaacaacgttatagagacaaggatattgttctcttaaacaggcattctccaaccatttatcttcccaaaaccgaacttgagagccatctttgatgttgaaggagccaaacctgagaaaatcaggcttagccttcattagactagctcaaaagtgtgagtctcctgctttccactaagcttgagacaaaggctgtgaccccaaatatttgttccttagcatttgttgccacacaccatctgtagtgagtagtttatgcaaccacttgctaaggagagccttgttcttaatttcaagatcttgaattcccaacccccttggtctttaggacgacatatgatgtcccaccttgctagtctatatttccttttgtgtccatccccttgccaaaagaaccttgatcggaaataatcaatcttcttgatcactcctttaggtatttccaaaaaggacatcatgtacattggtaggttggtaagcactaaattgattagtgttagttgccctccaagtgataaaagtttgcctttccaacttgccaaccatttttcaagccgttcaatcacttccttccactccaaattacgaagtctcctatgatgtataggaatgccaaggtaacggaatggaaaagaaccaacctcacatttaaaaaggttagtatattgatcctgaactgtttgggcttcaccaaagcagtaaagctcgctcttatggaaattaatctttaagccagataattcttcgaaaacattcaacaacattttcagattacaacctttctctagatcatgttccataagagtacagtatcatcagcatattggaggatggacaatccaccatcaatgagatgaggcaccactccaacaagctgtcctgcattaattgctctctggatcataaccgctaccatgtccgctataatattgaataaaatgggagatagcgggtcaccttgtcgaaggcctttctttgtttgaaagaaccgtccaacgtcatcattaactttgattgctatacttcctcctgaaatgaaggactcaatccaagaaatccatcttggcgagaaacctttcatgcgaagagtttgtagtaggaaaggcaattttactttgtcataagccttctcaaagtcaatcttaaggatgaccccactcaattttctgcgatgcaactcatgaacagtttcgtgtatgacgacaaccccatctaggatgttgcaacctctcatgaaagctgtttgagttggactcactatacggtcagccaccgagtttattctattagtggccaccttagtgaaaattttgaagctagcatttaggaggcaaattggtctgtattgttggatacggttagcttccttgactttgggtatcaaagtgatcaccccaaagttgaggctgaagattggcaactccccagcatgaaattcattgaacatggtcaacaaatcgtgcttgataacatgccaaaacttctgataaaattcagctagaattccatcaggacccggtgccttatttgtctccatgtcaaagattgcctcccgcacctcctcctcggagaaaggggcaatgaggtggtcattttcagcctctgtaacttgggggatatcatcaattctatttgcatcaaaagagagagtacttgcatcaggtggtccaaagagtttcttataaaactcagtgatataattcttaatagcttcattccactcaatcttaccttcctcttgatctagactgaaaatacgtttcttccgatgtttgccatttgcaatcagatgataatattttgtattattatctcccaaacgaacatcatcagtctttgctctttgataccacttgatttcttcctcccgaaggagttgtgctacaaga

SEQ ID NO: 27341 - DNA, 3904 bp, Oryza sativa
cccgaaggagttgtgctacaagatccttaattaacatatgaacttatgacagtacctatctataagttcaaaaaccttgtcaaacgtagactcttttttatccattgagccatatacgttgacggtgcaggcctccaggtcgaagagtaaaagcacccagtggaatctgcaatgtgcgtgggatgcattacatatgaaacacttagcatgttcgtacgggaatgaaatttggtataggaagacagtaaaatgaaactaactctgtgttgtacggcaacagtatgaacgtcttataatgctgcaccttcaggagttggacgagattgtcctctgtttcttgcggataccggtcaagcattgcgacgtttacttttcgagggtcgatgaatccagtatcgaaaaccccccgccgtcgggccctttgaatctccattctacaacgataaaaggaagtatatattatatatagtctacttatatataaggacctaattaattaaaggaaacgtaataagaaatctaactgaacgatacttacaaaatccagtaactcataatagaaacgtcgagggcgtccagctggtatagttcgtagataccctggaaattgatccagagaatgtcatctccttgcaagaagtccgtgtccctgatcctcgctccgatcatctctctaccggtggcgctcatctcaatgtacagtttatggaacttatacatttgtgtgggtagggactacagctgctcaggcttgacaagcggtttaccgagttcgtacatgtatttcacttccgccttttcagttagtgcgcctcgtagctattgatccgtagttagcccggtgtcattaataaagtcttgtattccaaaatcttcaccggtcaccaacggctcgatctcctggtttggttgctctccaagctgagggactggtttggactttccaaaagatgctttcttgagtgttcgctcatagttcgatagctttatggccaccttggcaggtgcagacatacccctaaagaagttcctgacacttgagtctataggaatcttcttttctggacttcgaggcttcaattgtctcctgacttctgatgccacataagcgtcaagctcctcttgcgtgcaatcgtaccccgggtccttgttcttggcggcgtcaactttcgccttcttcgttgcccttgtgggggcaggcggtggagcttggggggctcttgacttggaaggtgccagacgaggagcttgcggaggagtcggtgcaggagcctgaggaggagtcggtgcaggaacctgaggtggagacggtgctggatcatgaggaggagacgatgaaggagcctgaggaggagatggcggagccagaggagatggtgcatcagacgccgcttgtcgcccagggaagatgatataccgcttgcgccatagaataatggcgtggcttgtgtctcgtagatgcgtctcaccgtctcctctagggtaatccagctcgaggtcctcgtacgcgccttcgaccaactcaacttcgaccttcgagtatcctgctggaatcggcctgcagtggtaagtacctgaagggtctgttgggatggccatgcccgacgccaccttcacgtggtgagaggttatttattagtaatcaacatatataagcagcaactagcggaatggccaaatctaaaatctataaactacgagcttaccattattgataagttcttgaagggaatatgcagctcacatggtgtccgctgagtgatgtcatcaacggggcaggtggtttcgtcctgggtttgcatggcgtccatgctctgtgatcctacctgcctcgttgaggcgcatttgctacgatttcctgaagggctcaccatagcaggaggaatggtcggctggggatcatgggaccgatgtgcggctatgcgttcatcaaccttccttgccacctcctcttgcatgctgagctcgtagctcgataccctgaactcaagatctgcaatcttcgcctcggtatctctcttgctcctcatccgactcctgtacgtgtggatgtcctccttcaacccaatcttccaaggaatcactcctttccctcgtgttcatcctggatgctctggagtctgcagggcgagtgacagctcgtccttctctctgtcgggtcggaacgtgccctgagaagaggcttccactgcgtccgttagtcgacgcgcagcctcgcgtatctgatcgccgaagaccagggagccatcaactgggttgagcgttccaccgtgagcacagtaccagaactttgatcgttccggccaattggtggtggccagttcgaaacccctctcaatcaagctagcctccatctcctcccacttcggcatcgcgattctatagccgcctgaccccaagtggtgatggtacttcttctttgcagcattttctttgtttctttccatcatcgcctgcccttgttgatctgtcttatatgcaacgaactcgtcccagtgatcccttagctttgggaatgtgtcgaagttcggtgtctgccccttcaggatatatttctggtacagatctcccttgaagctccgaaactattctgccattttctatagagtccacattttcactttgtcctctgtacccgcgggaagggtgaatgtctcgagcattgtggtccacagcatctctttctccgaatctgggacaaagctctcatgatctccgcgtgcccttgttctgcgccagtacacagtactaacaggcacgttatcccgcacaacccaaccgctgtgacgtacgtagttcttggcggcttccgccggggcactaggtcggccgtcttcgtccacttccgttatgatgtgccgaccctcaagcttcttcgcggcacctcgttgcccgcgtgccctcttccgtccagcggagggttgacttccactagcctcctcctcctggttcccctccacatccctctccacgtgcccctcctggttcccctccgcatccctctctatgttcccttcctcgttcaaatactggtttggatcctcgttcccctcttcttcgttccagtactggctacttccctccgcgattgtatagtacaatatctgttcctcatcgcgatcagccatctgttcatacaggaaacagttgctaagtcatgagacatttttgatttaacaatcttatgtgctaacaatcatatatgctaagtcatatatgctaagtctaactgtcgtatatgcgaagccatatatgctaagtctaattacaaatctaataatcgtatattaaaactataataatcttatacgaaaactcaaataatcttatattaaaactcaaataatcttatgctaagtctaactgtcgtatattagaaccctacacaaccttatatgctaagtctaattacaaatctaataatcttatattaaaactcaaatagtcatatatgctaagtctaggaaacgtatattaggaccctagctactcaataattatatactaagtctaattacaaatataataatcttatattaaaactataataatcttatattaaaactcaaataatattgtattaaaactctaactataatgctaagtctaagtgtcatatattaaatctaatagtcttaattgcattaaaaatataacaatcatatatatatttacgtcacttgcctacgcgaattccttcgagggctagctaccactccggcttgagggacgacgacgataacgtcttttctgcaacatacaaaaagatgtattaggataaacacgaagtaacatatattgtatttcacgttcacgtttcgttcacgatcgttcacgttcgcgttctcgttaaggtcacgtttcattcacctacgttcgttcgttcacgtgcgtccacgttaac

SEQ ID NO: 27342 - DNA, 1445 bp, Oryza sativa
tagaaaataatgcattaaaattatttagagtcaaaaaattaatgacaattacttcaaaaaattattgttgtctgtagtaaattaagtggataaaacgtagtaaacaaatatatgatttaagattaataaaaattctaataatcatatatactctaattaaacatatgtatatacatacgccatgcatgatttaaaattaataaaaattctaataatcttatataattagcatatgaatgatattaaattaattcataaaaactctaattaacatatgtaaatacatacgacatgcatgatttaaaacttttaacaattctaataatcatatataattagcatatgaatgatattaaattaattgttaaaaactctaattaacatatgtaaatgccacatgcatgatttaaaacttttaaaaatttgaatagtcatatataattagcatatgaatgatattaattaattgttaagaactctaattaacatatgtaaatgccacaagcatgatttaaaacttttaaaaatcctaattatcgcatgtaactagcatatgcatgatttataattgttaaaaactctaagtaacatatgtaaatgccacatgcatgacttaaaacttttaaaaattctaattatcgcacataactagcatatacatgatttaaaattgttaaaaactctaagtaacatatgtaaatgccacatgcatgatttaaaacttttaaaaattctaattatcgcatataactagcatatacatgatttaaaattgttaaaacctctaataatcgtgcgtaattagcatatgccatacaacaattgatttatatggataatcaatacatccaaaatagtttacatcatgtacacaataattacggcaatacatcggcggtgacggttgaccgcacgtactttctcctcactattgttccctccttgtgatcgctacatgagtaaggtgtgtcttcatttgataggaggatgctagggtcaatcgtcaccgtgaaagggggttgcccatccaactgatcgtaatcctcgtcagtcttgtcctcaactccgacgatttttcttttgcctgggagaaccacgtgacgcttaggctcgtcaggccctctgcccttcttttctttgctagacatgtccttcacgtaaaagacttgcgttacatcattggaaaggacaaaatgttcgtccgagtatccaaccttgttaaggtcaaccgttgtcatcccactgtcatcaatcattatgcctccaccagtcaacctaacccattggcaccggaacataggaccttgagaggaccatagtcaagttcccatatgtcctcgatggcaccgtaatacgtgccagttgttccatcgtgtcccatggcatcgatacgaacaacgctgttttggttcgtgctcttcatgtcttgggctctcgtgtagaat

SEQ ID NO: 27343 - DNA, 18156 bp, Oryza sativa
  unsure (1)..(18156): unsure at all n locations
atagattcactttcaagcttgaagaaagcaaaggaagaagggcatccttatctaatgcgggtcacatctgttcgacagctctgaagatccggtgtcatttggaccacctgccctgctgcagtggtaactttcttcatccacacactttgaaattctttagcaattactagcttctaaaccatattaattccaatagatccgcagaccaataattagctccacttaagttcacatgttgctacagcttcatgtagccgttactcgggcggtcggccgttggccagctgcagcctgcagataccggagcatacaatgtaccctgcacatgtggagccttgctctatacatctcacaatccaaaattttgacaacaattcctagttaatactttgactccacctgttactagctgcctgacgcagaaaattggcaaatgcctgtaccactgtgcaaggctttggagttcggagcttaaatggcacacctctccatgtgggcagataaggtcgtcctgagaatgagctaccgacccacgccctctcttcatgctgcagccaccgacactgtttgaatttctgcactaatgaattgctttgctactagtaccacccaccagggattattagttgctgtaagagacagttttggaggtttgcttgatctcatgattcatcagctcgatcgttttgtaggctactgcacagcacagtgttgtccgagagctcagtttcagcaaggaggggggggggggggggttctgtccaatcatgggcatgccgatgatgggcaatttcattgtaaagggtaccgacacatatggtgagtaccatagcattaaaacgtctagcgagatatactttgtatacgttaattgctcctttatttgttgatttttttaggaagattttatttgttgatttgatcctactggttaaattgtctggtcagtcatgctaaactgatcatggtaacgggccagaacttacctgcaaatcatcagatatataaatgtcagtcgtcacacctaaacaatatagaatgatgccgacaattaagagcaacattctttaatcctgatatcgtacattttgaggtcgtagaacatgtaaaaagaatcaacaaatggaaggcaaatgttgttccaggtgtgcatttcttttactttagtcatccaaccgtcctctagatccacaagaacattgctaaagtctccgggcaaatggatcgaataaaaagccttttttagatcgcttagttgtttcaattccatcagatcggaacctcgccataatgcaagctttacttgtcatgattctctagaagaaaggcatcaaaggagataggtaagaagaatcggttcggtacgcctctttaatcaggctcacgtacggttgatccattcagatcattcaagaagccaagggggtcctacttgatcgcactaagcacataaataaggcctaatgcaaccaaaaggttgtgcccccaacaaccaaatcagaagatactgcagcagtctgcagctaggattagtataaccatcctagcatttgtacattactagtcgtaatattttgtttctccattaggtgcttgatgatatcccctactatggttactctcttcaaaagcgaactgaaaatgattgtttttccagcaaactgaaaatgattgtttttccagcagggtttgaaggatcgcctagctggcttatcctgctactaataagttgacttccccagggcatccagtatttggtggatctgcttccacgtagcactgaactgggtcagtactttactaatcagctatcagggccgtagtttatgggaaatgcagttatattttccaaggcaaacacaactctactatatccccaaatgcactgttttccaagacaagcatatcaattctgttacaagcacaagtatacatcccaaaatggtgaggttttcatcagaaagggaattgcatgtgaatgcagctaacggatcggggtataattcaagctggattattcgatcctaaccttcatcttcaagcaatcaaattaacagccctgtttaacaaaagtttgagagattttgaatgaggatccgtgcatgcagcaggaaagtcggcacggaagctggagatgaaaagctgaaacatgatttcttttcaaagaaaaatgaaaaaaaaaaaacagcagcactgcgctggcagccggagccaatgggcgaggggcacgtgtccccggattcctcgaccgaccagggagactccgcacgagcagggcacgtgacggacgatccgctcgtctttatatacggctaatgcgtcgctggtgagtttacctgcatcgcatcagctctcttgactcctctctcttcgtctcagcttggagctcagtctttgatttttcttcttcttcttgtttgtgcaattgtgcatcgttgttagctgggaacaagcagaagaatggcggacagcacggcgacctgcatcgacnnnnnnnnnnnnnnnnnnnnnnnnnnnnnnnnnnncttcttcaagttcggctgcggggtaagccgccgttatctacagtttttgcactgggactactttgatctttccatgcagcatgtctcctcctcctgtcactatgtgtagttaatcgtctgtggtgattgatttgcagattgagttctggatctgcttgctgctcaccttcttcggctacctccccggcatcatctacgctgtctgggtcatcaccaagtaggaggagaattactacccttccaaggtaagcatggctctgcatgcatcttcaagaacttggagagtttgagtacacaaaattttgtgtcggtgtttcaggaaaaaaaaagataaaaattgctgaacaagtgtccgtggagtagtagatattaggttactactagtaccattaacaacagaaagaaggaaaggaacatctcgcctactgttctctgatctgtttttgctgaggtgtttcaacaatttagctaataattaagtcgcctgatcgaggttcagaaagtgactgactaacttatctttttctgattttcttattatcaggtgatggtgaattggtgatccggagcctgtgattggttgtgcctggtgtaagcggcagttgtcaaagctgtgattttctggttctttggacggatggtgctcgctgtggtgttgtgtatgctgtacatctgttttggtgttgtgcttaggtccctcttctgttacaacaattgttttctccctgttcttccggggtaccttctccagtttatcttctgcaccttctcgtccctgtactttgaatattaattaattaattaattaattgctccttgttagccatctgctcaaagagtaatttaagaatcgtttgacaaatgaattcaatgtcctgtgaatgtggtcgagggttgcgaatttcaagcggatgtgaccaatcaaatggtggccatttttcatgtttctagtgggtgggcagtcactatctagatttttttgtatgtaatatttatccatttacatttcactgtattattgcttctctattctttcatcaatttgaagaggcgatgaattgaattgatgatgacagcggctgacaggtccccccacactgccacacagcatgccatgccagcttacacactggcaccgtgccatgtgctgtgtactggtagctactacgttgcatagcaccgtagcaactgtggaaatccaagactactgcccgtttcaaaatataagtatttctactcgttttagcataaactaaagttaagatgagaagttgttttgaatagtagagaagttgttttgaatagtaggtgaagaaattaattaagagatgattgtgactagatgagataatgaagtaggcgaagaaaatgttgtcttacaaattttgaatctaaaaatccttatattttaaaacagacggagtgagagacagtcattgcaggcttgcagaatgggccgcagggccggtgcgcgcgtcctgggctggagatgggctccgtccgtccactagctcgagacaaccatggtccatggacctgaactcatgtgaggccttttgtgctgtcaaattttgtcagtctcctgaaaaaagagactacaccaacctacatgtagaacgtgcatgcacaaatctacaacgaggcgatagtagcggtatcagaaacatgcaattcatccatcacattcagatatgcagcaaaaaaaaatcgtaatttcagatatgcagtatattgtagaaaagcggttcatttggcaagaaagaggaacagaacctccagcactagaataacaagagaaataaactaacaaaagaactgagcatcaatccgatgcttttactgttccccgatgcaactgaggaaaaaaaatactccctccgtcctacaatataaggtattttgagtttttgtttgtaacgtttgtccactcgtcttattcaaattttttttgcaaatataaaaaacgaaaagttgtgcttaaagtaccgtggataataaagttagttacaaataaaataaataataattttaaaaaaaattgaataagacgagcggtcaaacgttgcaagcaacaactcaaaatcccttatattatgagacagagggagtagaggagtaggagccaaggatttgaggcttgtaagtttcatagattttgccaaaagtacggaataacggcagccagcatatacaaataacaccataataaggtcatctagtcttccagcagaaaaaatacacaagacactttggaccaatggcctgcgttgttcatccagacttaagagcatcattatctcagaaataaaactcccgcttgcaaggaaatagaaatataccaatttaactaagaatcgctacctaggagtattcaagtgtcaagaacattggctgattgaatgattgatagtcatttggtcaccaatatcaaacagtagaccaatgtaaggtgtaagcaaaactcactgcactaactgaattatgtgtcgggtgtttcaggggaagaaagatatagcattcagagagttgtggcttgtcaacaaataccacaataccatgatcagatcatctaagacttctagcaaagaaaaacacaagacgctatggaccaattgtttgccttgggttttaaggcaaagtatgtgttaagtttattcagagcatcaggggtctaagaagtaaactcctgcctacagggaaacagaaatttaacaatttcaactaagaattgctacccactacctactattaaacagtcaagaacatcaacgaatggatcacataatggtatggccgcctatatcataaagatacagtaaacatgacccattgcattactgtgaggtgtaagcaaaactcattgcattaactgaaaacaggaacagcaatacatggctcattgttcaacaagttcaatggaaatatcgctacttaccacagtacttcacagcagtaaaatggtagtaattcaaggatgggcattaggcctttgaaaccattaatggttgaaaagggatcacagcaaggaaagataggcatctcaaactccctacaaccgcagcaaaaggatacattcagccaatgcgtactataattctacctattatgcctcctctgtatctcgactcttcttctttttcttctcctttttcttttcgcttttctcagcttccacgccatctccattggctgcgctctctggatccacaacatcacctccttccttgctcttcttctttttctttttcttctcactgccaaccttctccccatcagatatatcagccttctcttccttcacctctgcatcacctgatccttgttcacccttgtctttcttcttcttcttcttcttctcactcttctccccttctacctcctcagcactctcttcaaccttgatcttctttacaggcacagaagcagacgcgtcatcatcctcaatcttcctcttgcggccttcgtcggcagcatcctcctcatccttgtgcttcttcttctttttcttctccttgacctcttcagtcgcaaccacatcctgttccgccttcaccttggcctcttcaggagcagctgcaatgctagcgatcatcgcatcaccaccagtaggaagtgccacattccggatccactcagctggggtcttctcatttggcttcccatgcttatccagtaaaccctctgcgaccatctttttcttcttgagcgcaaccggaccaagcccccacttcctcggatacgtgtctctatccatcaccaccctcttaatctttgcgactgcaccatggtcacaagtcgccataacagcggtggtcatctcggcaataccaatagcaatggcctctcctttagtggtcatgagaaccacctcctccccgacatcgatatcattttcaaaccggagcaacccgggtatcataagcttagcaccatagcatatagcattgacagcagagtccttaacaacaagcctcttgtagctagtaagcaatacctcgagaggcatcacgatgcgccgcaagtaagtctcatcgttgtagttgtccatcgcccacctcgcgtccatgacatcgtgcatcgtgaccatgttatcctgctccccgaggatccccgatcgcacgcggcgcagctcctgcatatgcgcgccgacgccgagcagcaggccaaggtggacgcagagcgtcctgacataggtcccggcctcgcaggagatccagaacacggcgaggtgccggtcggcgtcgtgctcgagcagcttgctctcgtagatggtcctcaccctgagctggcgcttgacggcggagatgagcgggggccgctggaacacggcgccggtgagagcctcgagcgcgcgggcgacgcgggcggtgtcggggactgcggcgtggaagcgcgcgacgcagacgtactccttgccggcgccctgctgcgacttgacgaggcgggtggcgcggtcgacgcagacgatgaggttgccggtgaccttggggtcgagcgtgccgctgtggccggtcttgtcgacgcggaggaggcgcttgatccaggcgacgacctcgtgcgaggaggggttggagggcttgtcgaggttgatgacgccgtagcggaggtactcggcgatggggcgcttgagcggcgagtggccggaggggagcggggtgtagtggccggtgcggacgttgaggcggtcgtagttcttgaggaggagcggccatgtcgaggtgtcgagggaggggaccagcgactgcggcttgatgaggtagccgtcggtcttcgcctccgcctcggcgagggacggcgggtcgacggcggcggcggtggcggcgtccttggacttgatcttcttcttcttggacttggttagctcggaggagggggaggcggcggcggccggcggcggggaggacatggcggcgggttggggggaggggattttagggtttttgcggcggcgaggggaagaagaagaggcgttttaagggggaagggtttagtgggtgcgagatggtgcgatgggggaggtggtgattgagttgggctgagccgtgggcccatgagagttatgctgtaggacggagactgtaggacttgggctgggccctgggctaatgaggccggagactgtagacctttataatataatttcaccgttttaataatttgtaaaaaaaaaggagtaaattgctctttttaccgctcttccgccttggacatgggtaaaccaactttttcactctaaatcaggcctttttcttcaaaaacatttcactttataactatgtttatcttcggtttatcccctctctcttcatctctaccagagaaagcacgtcaaaatctcaaccctccccaccttacaacaaatacgctcgtagcaatggaggagactaagctcaactgctctcggtgttgtccatgcttgagatctacatgcattggtgtcgatgctgggatgtggatattggattttcttagcaaacaggctcgaccacgtagtggcgggtgctacgaagctcaagaaaatgcaacaaaggatgtggaaacgacagagacaaagctaatgcgatagatgtcaagttgactattgggcactttgtagatgtatctctattgtatgtcataagcttcaacttgcttaagtatgccatccgcgcaataccgctctcgaaggcctcctcaagtccaatggtgctatcggcgtacgctcgattgggttgggatgtcaatacctgattgctagacctactcaagcaatgagaggaaaggtgggagctaaataaaagaaatatgccaaattgaaacattttggaaaagaaagtaaaacaagacctgtcagggttatggataccacatacccaatagtaatcggctaagcacggcgggacctaccacatactaagtcttatacggaattatacctcgtatatagaatgtgttttggataaggaaggataaatagagttctatataaaaacgacaatgactacttggattgcatccatattgatctccctagttctacttagataaggggcacctatgggtataaatacaagccccctaggaggagaggggacaagttacaagaccaacaagacacacgccgccaaatatcgacattagatattagcctagacataccccatctagtgcctacggaagccggcaagagatatctagcgcaatctctgatctcgacgagttcatattcaaggaggaagactacccctgtcgtcgactacgaggtagttatctatgccgccaagtcgatgatagctagataggttatcccaaatattgtatttgtgtgtttcagatgaataatagcaacaccggtttcggccaacaggatgtagggctattacctgtcagataaggggcaacctatataaaaatcactgtctccatctcttttacctcaatctcgcatacctcaatctcacatataccctggtaccgatgatccctataccatctaaataccgtggtcgtgatctcaaacgtcgataagacccgaagtaagggaaaaagtgacccaaagtgcaattcatattttttgcatgaaaaatgttctgtatagaagaacagatcgattattcgattcctaaaacaatgtacgaagacactaaacgtctatattgaccattaaaaaaaagatgcttagacagtactaataatgttgaaatattagagccgttattatatcaacgcaaaaatgtttatcaactccacatgtaaaaaactgtattgcatgtttagtctatattatcgtgaacttaaggaaaaatctaaaaatatcactggataatgttgcagcccgggcgtccaacgggggtggagccgatcgggctctcccccccccccacccacgcgcccctctccccacgcgcttgcatgcaggtgcctgaccccaccacattgatctgctcccacctaccattgcaataaatcacccacatattttggaaactctctattataggaatttggtttatttttgttccacaaaaaatgtttcactagtgcattcacaatgtttcactatgtagatctaatgttgcagtgaactaaaatactccattgcaataaatcacccacatattttggaaaccctctattaaggaattcgttttatttttttaccacaaaaaatgtttcacctagtgtacttataatgtttcactatatatggatcaaatgttgcagtgaactgaaacattctttcgctatttgctgaaacattgtttttatataaggtgaaacaacgcccgatttaaacaactgaaacatttttgatctacttagtgattccgatatacatggtggaacatcgtgcaatattttttttaaaaaaatcaataataagctaattttttttcgtcggaatatatctatgtgtggtcttattttgaagatttaattgcaacgaatttaatggtgtaatcggatcatgatttggataaataatttaagagaaaaattagtttaaaatggttttgcacatatcctccatatcactgacaagcactcgattgtaataaatgctatcgcaaatgtgagtttcatgaaatattatcatatatttaattttggtttagaaataacattatcattacagttctgttagcagccttctcttaagtataggataaatagtgcattttaacgatacaggatggacggaaccctaacgacaattatattttggacaaaatcacctatacaatagcatttattcaaattggatgcttgccaacggtataaaacaaagataatgaaagtatcaaaagtataacgaaacttattggcacactaccacaccaagttttcaacaatagcccataaccctattgtaaagctactaaaagtctaatgaggaatgcctctatcttttgagaacccaaaaaatgacttgaacttcattcacaacccaaacagcgacatagtgagggcgtgagaacaatgagaggatcgcgctgggaatttttcacacacacacacaaaaagagatgcggttgggtgtagagctcctacggttggaggctggggagatgatttgtgttgtcttcctactgaacctcgattttctcccttcacctcaataactattcgggggcttagttaggtactctattggagatgctccgagcattctatacctgcttatatatccctatatttaacatttccccttataattttaccaaatcactatgtttaacatatttcaatttagtactagtagagcaataaaatcagctcaatccaatttaacgtgctacaaagctacttcctccgttcaaaatatttgacaccgttgactttttagtacgtgtttgatcattcgtcttattcaaaaaattcaagtaattatttattcttttcatatcatttaattcattgttaaatatactttcatgtacacatatagttttgcatatttcacaaatttttttaataagacgaacggtcaaacatatgctaaaaagtcaatggtatcaaacattttgaaacggaggaagtataattttttttccaatcaacgatgaaggaaaaaggtggacgacgctgaaatagaaaacaaacgaatttcggaacgggaaggccatgtcggactttaaacagtaggacaaacataccactggacccacatgtcatagacacatgtggacccacatgtcattgagataggggtggcaaatagttatttgtcaaatctaaaagtggcaaatagttaaaagcccctgcaaataatactccctccgtttcaaaatgtttgataccgttgactttttagcacatatttgaccgttcgtcttattaaaataaaattgtgaaatatgtaaaattatatgtgtacatcaaagtttatttaacaatgaatcaaatgatatgaaaataataaataattacttaaatttttttaataagacgaatggtcgaacacactaaaaaagttaatggtgtcaaacattttaaaatgtagggagtagctctgaaccgaaccgaactgaactgaagatttgcgacgaccccccaaaatggcgaaacgcgagcaaattcaattcaattccccctcctcaaatcccgcaagcgaggaaccctaatcccatttccgcctcgatccaattccaaatgctccccgccggcggctacccgtcggccgccgccatctccttccccgacgccgacgtggatgacgactccgacgacggcgacttcaccgacgcccccctcatcgacccctccgaccccaccttccccaacccggcctcctcctccgccgccgccgccgccatggctactccagcctctgcggggggcgggagcgggagcgtgggaggcgtcggctcctcctccggcggcggcgagaggaggccgctgttccagcggctgtggacggaggaggacgagatcgtgatcctccgcgggttcgcggagttcaccgcggcgcgcggcacggcgttcgcgtcgcaccagtacgacaccgaccccttctacgaggacatgcgcggccgcctccagctcggcttctccaagagccagctcgtcgagaagctccgccgcctcaagcgcaagtaccgcaactgcgtctcccgcctccggggatccggcagcgccttctccttccgctcgccgcacgagcaggccatcttcgagatcgcgcgcaacatctggcgccccaccaacaagcacggccgggacggcgactccgacgacgaggacgccacgcaggtcaccccagcgcccgttcccgtgaacaccagccccaatggtgaggtcaagtccccaacctcagggcggcagcggcgtcgcaggcgtggcggagattttgccgccaccgcgcctgccgctgctccggccaccaccaacatggtgcagcccattcagccggtgcaggtgccggtttcggtgcccgtcaagatggatgacacgcttcctgcgttgtcgcagaccacaatgccaattacagtgacaatggagggctcggaacccctcagattgccggtcatgccacctcagccggctgttttagatgccgacaagagttgcttgacgcctctgtttaaggagatggtacgtgcagtgataaatatcgaatcaaacccgttcggtgcacaactgtccgagccgccacatggtttgcccatggaaggggagaaatggaggaagcagcgtatattggagctggaggtatacttgaaacggatcgagctgctgcaggaccaggtgaaggctacgcttgaggagctcaagtcctccgcgcctgggacttgaatgaccgagcgtgaaggcctgtcttgatgctcatttaggattcttggtatgattcgtagtggtagatgtttaggtgtttttgcagattttcgtccataaaagaatactgttgacttgtttgggcttggaactagcttattttatgtttctaattgtttacatgattatttagctttcacttcttgcctcctttcctataagataggtatatggttgtctctaagtggtatatttggggcggccagtaaggcatcctgatagaagggttggacacttcaaattaatttatgaggattacagattattgtaatttcaccttgtttcttgttcttcattctgtgtgtttttaaatatttagttataaatgaattagattaggtttgaagattttactatgaatggtcatattggctagaggtcatagtgttatggcacacaaaaaaagtgtatttgtctatctgcatgagaaagcaagagtggaattatcggaaacaggtgataattggacttgcgtttgaccataaccaagtctttttgggggtaaagaactaagaacagcaccacagaaacttaccatgctccacagtaatttcccacttatgaaccaaataatattttattgataataatagtgaacatattggctccacattctgcattgcattcattatatgttggcattcttgatctgtatttgataattacaatgattccttctattgctttgcaaataaaatcaatgcactcattagtcaatgacctggattagcatggtagaaactaagatgctctgtgcatcaaatctggaggcaaggaaagcatattcacaaaaaattgcatacagtttcttcatagacaacgcaatgttgtggacagcactgctgattaaagtactacatgttctactgtctatggtggtcctacatgctgcatatggttatttggttttaaagttctattgcattatcggtatatctaaatttactaattgtggaatcggattgcttcttgagacaaattgccagattatttattttgataattcactcttattggtgctggatgcaattaaaaatcgttagatgcaatttaattcatgattgtgtaggctgtctaccatgaagctacaaaagttctgctactcaatttctcacatgttctttgaaggtgtctacatatttgagaatcacagttcctttctgttagttaggtacgtccctttattttgtggatatgagttagttacagctggtttggctaaattctacattgttgctttgattctctattgtgttttacctctttggttcatttatacatatacagtaacaaattgagttccattgtgaaatcaagatgtgagctatgatgctaatcccctgcctgtagcttctcataagcatctttatttttattttgctgatgtttttgcaaactgtgatcatcattcatggtgtaacataggttctgagaattatcccatcttactggtgaagtagcgataacctttcttttcttcagagaggtgtgtgtaatcgggaatcctgacatcctgagataattgatgtagcagctaacctctctttcgtgctttagctgatttgtatcttttgtttgtatgcccttgtgtgtaatatttggagccagatttgagagtcgaatgtacatgctaatgcattgatgcaccggcgacggccagcaagatcggctgtttcagcagtggctgttcaaaagaatttatcttttatttcaaatgttggatgaaattaatcagccgagtgcaatttcttttgctaaagaacattatatgcaatttctggaagcagtaacaccatttcttttcccaatttgatccgttctatgacaagtaggtatactgctaagaagacgatgaattgcagaacaacaaaactattactccctttgttccaaaatatttactcccttcgttccaaaatatttgttccctccctttgttccaaaatatttactcccttcgttccaaaatatttgttccctcttgagtcttgaccggcactgtatataaatgaacgaaaactcaatgcttcttatatttaggatatttgataagtataacatcttttcaagtatttataatttctgttgtaaaagagacgagtggttaaagtttaaatatgaatagcgttcgatgataagtatttaagaatttataattttcttttgtagatgacagtagggttaaagttcaaatgtgaatagtgtcccatgataagtggattactctctccgtcccattttaatcgcaatcataagttttcgtgtttaactttgattgctcattttatttaattttttattgtgatttaatgataaaacatgaatagtactttatgcttgatttatattttttagtttttttaaataaaacgggtgattaaagttagacattaaaactttgtgcttacaatgggacggaaggagtattttagaagagaggagcaataatcattaatcaaccgtaatttttttttgaaatttgagactatggtatgcgatgaaaattttcatgcgtacaaaaagagagaaattttaggttctgtctgacaagtgctcgattctactatgaattacaacctgacgaaaatgtcatcgtagtttccgtcaaataacattcattagccccttttaaaataacatttattctgtggacgtttgcggatgtctaaattgtggacatttattcttttttctttttactttcgcagtatatgaaatacaaaagtaaaaaaaaagaaaaaaaaagaaaaaccttcttcttttttcacctttttgcaggctttgcacctgaatcccatgatccgttgggtacaaggaagaagaggatactactctccaagtagcgaaaatccacaaattccctctccggctcgcgcgcgcgctctcaattttttgggggaagagaagatctccccttggagggaaccccgcccaagaatggcgggtctcggcggcggatggggcggcgggtacgacgacgacgacgactgggggctgagcgcggagcagctcgaccagctcgagcgggacgcctaccgcaagctcgccgagcgcaaggcctcctcctccgccgcctccaccgccacctcgccgctcccctccgcggcctactcgccggtcaagaacagccaccaccacccggcatccagggtttcccaggagtcttgcttcggcaaggttagggtctcatctcctctctctcttcttattcttttcttttctttcttttttttccttcttttgttaaaaaaaaaacttgggtcagtgagggttgcatcttcttgcgaattggcatattttcatcttaatacatttcgtgaaaaatgtgtagtgttcgttctggcaatttccttatatttcttttacctaattcgtcatagtgaattttcgttcaaacaaatggatggggctcttgtccaagaatttagccagtgaataaaattcttattgacaaccatagccagtgtgaattgcagtacgaccttagctcagagtttgtataccgtggtaattttacgaattttcttgtgctctgcagttgagttctttgcgttaccggctatctgtttcaactttcaagaatagtttttttctctgcgttgctgtttcattgagttctttatatgtcctgcattgcagtatgaaaaccaaaagccaaaacttttttgcacctgacaaacccaaaaaaaaatttggtggtttctggcagaagaattaatcatggattttgtgccaagataataagtgatggggcctgttctgtttcctagcgatctgttaaacttagtgggccgtgtgttaaattgcagctgcacaatattagcaccatcaggggtttcttgttaactcatgagaatacgaccaggcagagcgtgtattttagtatttactgttacaagaccatgatcctggccattttctaaggctgtgttcgtttggacgttttcccagcgcgctacagtaacacggaaaacggaacggttcattaacacgtgattaattaagtattcgctaatttttttttcaaaaatggattaatttgatttttaagcaacttttgtatagaaactttttgcaaaaaagtacaccgtgtagtagtttgaaaagcgtgcgcgggggcaaaacactgtagcgcgctgggaaaacgtccaaacgaacacagccttattgcagattaattttgaaaaatttaaggcatttgattccatcatcatcatttgatgtacttgaaaactatctagcatttgatgtattacgggtgtgtggccactttaaagtttgggatcatatggttgacagggcttgctttggtgatctctagctaaattcactggctatggctgtcaataagaattattctcttactcactgtgttgtgtggattttttattcattcttgagtagtgttgtttagcgcaacttcaatatgtttatgcctttccaaagagttgatttttacttacccatgtactcatagattggtaaacacagactctaaaagaggcacccaatttatccggagtaaggacagcagttgagaagggttttcatatctccaaattggcttaatctttcagttttaaaccaactgcccttctaattattctaatgtaattgtgcaaatctccagcacttgaaatcggtacgaatatatgataccatagtgcaagagcatccctgtatatgtctgtgttattcactttattttatttaccatcatttattatagagtttgcataattgtttgacaaaactgatatttactcatctctttttatatcactaactgccattatgctaatgaataatatttcttaggtagaatcactttctccttctcggcttagtcaaccaaatgcatcgggaaatgcaggtataagacattcttggtgctttatttttattctaattggacatgtggcttatctccttttttgtttgtcatttaagttaataatagtcagggcaatatgtctaaggtatcagtacatcttttccttcattctactggtgtgatcgcagcgaagttccagtaccaccaggtacaattctccccaatgaaatctttaatcagttgttactgtattatattgtgatccatatatttgactcctctgttcctttcccagaaacttgtggatgcagttcacaagatccccaaagccagctggaacgggaaggagaggttttcattaatcttctacctgacaaatttacaagatttttctatggcctatcaaagctcaacttgtagtgcttttatgctctcaaaaaaaaatgcaactctgtaaacacatcgggagcctgatatgcaact

SEQ ID NO: 27344 - DNA, 11796 bp, Oryza sativa
attcctgattctattttacctttttcttgaaaactatagggtatggatgttcccacactcatcattatcagtagcagaggaagttcttagtacagtacctggaatagctgttgaggtaacagttattttgtacttcataaaaccgacttactgtttgttgtaatgacctctcacctcctgttgttttgattaatttattttacttcctcctgttttagttggttgacctgggctgcttctagttagcttagcattattagtaggattgttttttagttttctattttgaaaattttcaaatattagaaattcttatatgactgttaacaaatcctctgtaatgcttaaacaattcagaacatagatgatgaagttggacagtgacttttatgacttttctgttcattgcgtacatggctactatttttatttttctttccacaaggaagtttgaaagcttgcattttcagtttatgcaaacaagaagtaaacagactcaaggcataggctttaatgtgcggtccactatatcatcgaaacctttctaatctttcagggaatgcctatctgacagtctatagatggttcagcaataccctgtattcctgttgacccatggttactctatattttgcagttgatggtcactaataacggtgaccaaaaaagtttaatatgactgaagtaaatttgctagtttgctacctttcctttactttattattgttgttgatatggagcaaaatctagttttgaacttctaaagatattcattctggccataccttgtactttcctagcaggtccaaaaactggatccgctggttaagcgcgcactaactgcttctttatatgccggagatcttcgaggtgaataaaattgaaatagctttggaaattccaaatcatgcttataaaattgttcttcactttgtactaatactgttggaaaacaacccaattgtgcatgtgcctaatacaaaagtgttggttatgcactgtttctttctgttctctccactaatctacttggagtttatattaaatgtgttggagaacctaaataattctgtatgcaatactatagtgtaaactatgcaattgagtgcaaactttactttatattttccttggtgttaggctttgaaacttcaatgccttgccttttcctagtattttctttagatgctaacttcactttttttggaagatttgtatggcaagattccaactgatgttgagtcaaagcttatgccgtttcagcgtgaaggtgtcaggtatgactatatgatgatgcaatgttcagtggacttttttctcacatgacagtgtaaaaatcatttttgtagatatgtgctgcatgttgaacttaattgtccagagatatcaaacatggcagatgaccattaataaatatgagaattttgtctagtctctagcattatacttaatgttgttagtctagtcatactaggaatgttatgttgcagatacttatggctcaaactgggtatggggccagaggactaaggtagggcacttgccctcaactagccattggcaggggctattccttcatgtggtagagggttaaagaaaaggggggaaattgtaaacttcatttactagctaaatgcccgtgctttgctacggataaaaggaaaaaaacatcatagtattgccaaataataaaaacatattttccattgaatatgtacccaccttaagttaattttatatgtggctaaccatttagatttagttgttatgtactattaagaagttcaaggggtgatatgtaaaagctacaatgggagcaggtaggtggcggattcactgtcactacaattggagtctttttaaagtaagtatagattcgttgcttaataataagagataaaaccccattgtcgtttagatgggataacttggagccttaataagcttatctctaaaataaagaaaaactcaagctaatcttatctctaaaatatgccctagaaggtatgcttcactgcctacagggcccaaaccccataacacaaagcttgaactttgtaagtaccaaaacccaggaccaggagcataagtaccattcaatatttgaaaagtgtagtaccataacacaaagcttgaactttgtaagtaccaaaacccaggaccaggagcataagtaccattcaatatttgaaaagtgtagtaccgcatgctttgccattttttgcacttcgaacacgttgctgctttacaagttcaacacatcttaccttttctttgatgtttaaacaggtttgctttacagcatggtgccaggaccctgatagcagatgaaatgggtcttggcaagacattacaggtatactttttctctggaacattgtaaatctctagtggctttatatcctttctatatttataaatagcagtatttttctttgcaatatgacccaagcttcatttagcatgacatatctgggcactcttccactcttcctccatcattaggacatggtgatatggcactactagatagtagtgtcatagtgtggtatgcaggggtatgattactgtgagttgatgccaattctcaatctgcatgtggaccagtctataattccttcaaatagcttgaaagaaaatcgataaatgtaccatcagtgtgtgcttgcacagtagagattgatcagcaatggcctattcacagttttataagtctggagtttatgtgttctttcaggcattatttatggtcccctcattttctttatgcaggcaattgctgttgcttcttgccttcatgatgcctggccagttcttgtaatctctccatcatccttgcgattacattgggcttctgtgagcacctgtgttaaacttcctatctttcatttcaacagtaactctatgcatgagggaagtttaacctttctgctttgcggttgtaacagatgattcagcattggcttaacatccccacggaagatatcttggtacatccctttagttttcttaatgtagcaatggatatatatatatccatgtttgcacattacttattcacaaaacctatccacagtaatcccttaatcactaattatgataaatctccctgtgattggagcagagcacttgattttcctcccttgaatgtttgctctccatatatgctgtattatccttattatgctgtacagtatttttttggttgtgtttttcctgcttcccttgtcatatttcaccaaaataataaactgccatccctaaattttgtggcaatttatgatccttaactccatttgctgaatgtgtttcttcaatttcctagtgtatgtaactttcgtccatttcctagagcatagtaacccgttatcttattcaggactatcattgaggtggtcacatgctatactgagaatatgtattttatgaaaagggtctctaaagatgcactgcttgcaggatctaagatgctgtcacctcccatatatagtctaatgcttcataattgctttgcaaattcttgtttgaacatatgagatgtagcagtgcactcgatatataaagaaaggaaccattaaaaatatttgcagttcccaactaagctaagttcatatagaactttagaagtcatattttgactggaagaacttgatatggagattaaattacatagtttgacaagtccaaagcatataaacggatatggataatttgcatctatgggctgtgaataatgcttacagatacagattttttttccaggtggtgctaccacaaactggaggatcaaataaagcaggatacagattggtatattcaaatactaaaggggattttaatctggatggggtgttcaatgtgatatcttatgatgttgttcccaagataaaggacatgcttctggacttggattttaaggtaggattttgtctgacatgttatcgtgccgtaattatattacaagcatgggctatgggcttgggtgagttcgcagtagaacatataggatgtgtgcctcgtttcacaggctgttcttttactgcttagatattgaacagttcaatattgtagtgaccccctgatatctcctaaagctcttgctgaatcatttgaaatacaacttgttcaaaggcctcctttgatcctatacatcaatcaaacatggtagcactattttatagaagttagcttgggtgtagctttacttgtaatttttgcggaacttgatttggacttctgttggatatcgagaatattgttgtgttacgagcactattgtgtcttggctggatcaatcaatctaccaacttgataaagtcagaactactttagggatcattagtgtttagtaactagtaacattacctgctgatgcatttgttgaccaatttttttgttgcttcttttggtaactgaagtaattaggtgtcattgtagttcaaggtaaaaaaaagttgactcttgttgtgtatcgttttctcaatagttccttctgctctgtaccgtaaattatgtacaatgatgatgttgcatatttacaccatttgcatatatggaactagtgaccccctgatatctcctaattactatgaatttatctggagtattgctgtgtataatctgtttatactcactttaaatggttttcattcagattgttatagctgatgaatcacactttctgaagaatgcccaagcaaagagaacaatgcattcacttcctgttctgcaggtttggtgtttcttatgcagagttgattggaacaaattatactttggttctttagtgagcttatatagcaattgatcgaattgggagatttgctcttttgccccatagttgagtggtgtttggtcacttgccacaccccctgtgaatgacaactgggcccaggtgccacatgtcatacacggtacacgcatatgtggaaaaagagcaaatgccatccatgtatgtgtggcaaaattgcaaatcgcccttccaaccatagcatctctacgttaattgtttgacacaaagcgggatgaaagtgtaagtggggtgctatatgtacacgagtctgcggattttggaagctgggggtgacaccaaacttccataaaattctgaatgctgttgtcttagataatgttcagttaatatcatcagttccttaggacatttctgctttcttagactgaattccagatatcaaacttggttttaaatccatttatcatttctctttagagattagagtgaagtatatcttggctgattgcagttacatgaaagaatctctatccaatggcatggatgattttaagaaaactaactgtgtattttttaatcgcagaaagctaaatatgtggttttgctaagtggcacccctgcgttatctcgccctatcgagctgtttactcaggtacaagattcaatagttaaatgcacattttcactactagcaatttttctagtgtagacaaacaatttatttttctacgtgcagctccaggcattgtatccaactgtatacaagaatgttaatgagtatggtaatagatattgcaaaggtgtaagtactagctcaatcgaattgctttattcactttctgcaaaccaattatgatagagtttactatatgaactttatcagggcttttttgggctttatcaaggtgctagcaatcatgaggagcttcataatttgatgaaagcaactgtcatgatccgcaggttgaagaaagatgtcctttcacagttgcctgttaaacgcagacaacaggtaaccttgttggatttgtcggaaatatggattgacttcatcctataattggataaacacccaatttttctcttatccagaaaattcatgacaaattcatgacaaagttatcatttaaattcaacagctcattgtatcttctgattgctagcatgaccttctgaataagttcctgcttgaacaattatttccattccttctgttgacttgaccttttattctaaatgcttaaaaccaaaaaagctcatttatatgcagaaatattaggaatacttggttactacctccatcccaaaacaagttcatttttcaccatcccgcacataccaatacaaaaccaaaaaactagaatacctctactttatcaaatcccaatgcaactattcctcactttatctactcccaatacaattattccctgctttcacaaactccgatgcaatgataactctaaaaatgaacttactacgggacggggaaagtatcttccacatgaaacaaacttgtaggatgtagcttatctctgatatgttggttcctattaatctattttactgttgtgattattacctgtctaccctaatacttttacttacattggaacctactcaggcctttctggatttaagtgagaaagagatgagacatattcgtgctctatttcatgaggtattccatttctgtttcatttgacctacttcatagtgcacaagaaacagggaatcatttctaggtagctcaatgcatatgcatttcatatagctcattttatatttatatctttgcatcagtgaagaaccttagaatgatatgctgatatggctttttgctgtccctgcgcagctagccattcaatccgtatatatcacatatttcaaagctagtccatatatttcttcttaagttgagctgaaaaacagaattacgttgctcttatctttacatttgttatcaacaaactatgctcttttgaagtggttaagcttcatttttatccaagagaagaggtgcagcatgaattagtcatttgttttgttgtgcctgtagcatccttgaatgctatttaaatttttgtacggaagagctatgatgcagtgtgtgcttttgtagttggagactgtgaagatcaaaatccagtcctgtgactcccaggagacgatggactctctcaaatttgctcaaaagaatcttattaacaaggtgatctgaattatgtcttcatgctcctctatttctggtgattattactgcaaactagagtatgcttccaactataaactaagctgcatcaattatatagaaataaaaatggatattccctaaaattgcaacttttgtattttatccaaatattatgtaaatgactaaatgtatcatcgaatgaaatgtgcaaatacttggatttgatcaaaccttttgcccttcatttattttccatctttagagtttagattcaaattcaatctctgttatatgcgctcgacattaagatttgtgttctttggaagtggttttattcttgcatcggtgctcatttgtcattcctaatcacagatctacaatgattcagctgaagccaaaattccagcagtgctagattacctgggtactataattgaggtaattgtgcgaaatattatgatttgtcctctattcctgtcttgtggtatcagatgtgagtaacatttcacacactggctaacctttgctagtttctggattaccaaaaaggaacaagctcattaatttgaacaaaattacactgtgctatttgtgattcacagaatcctggccatgcttcatgtgctttgacaggacctacattggtagatgatattacttgatatttagaatcaataacattcattttcaattggttttcaaactggctctcaaatggccttcctagcctgttttgtgacaacactcttttggtccatttatttacttcaaataacagtacaaataactatcctgtcgtcgcaagcattactaaatacttccttcatctttcaggccgagtgcaaatttttaatatttgcacatcatcaatccatgcttgaagctattcaccaacatctcttggtaagcactgaaaatgtatttcaattggattattaatatactgacccacttaccatcatgtttcagaaaaagaaagttaagtgcataagaattgatggtcaaacacctgtacctgtaagacagactctagtcacagatttccagaataaggatgacatcaaggcagcagtggtatgtgttagaatttgtatgctttatatctattagaattttgatcaaatcctacttagcaaacatcttcttacagccagattttctgaggttgctgattgcatgtaaaatatttttttttctgtaaaggctgatttttgaaaccccaacaattggtcagtttttaaaatctgtgtccttccctgccaaatgatctgcagttgtggcaacttgactgaacctaccactgggttatgtagctaacattcagagcgcagtatgcgtggttgcgttatgcaatgtgccactgtttcaccatactggctagttgaaaacatttatagtccttcattggctccaatctcatgatatcctaacactatgcagttatccataaaagctggaggtgttgggttaactttgacagcagcaagtacagtaatctttgctgagttatcatggactccaggtgaccttattcaagccgaagaccgtgcccatcgtattggtcaggtgaatactgcatcccgtatctgtaaatttcgtaattgattaatgtggctaccctgcaaccttttcctcaaaaatttaaaatctcagtgttgtttgaatatttgataggctttcaatggattcacttacataggtaatttgtggattcactcacttggctgttcttattttctgtaattattttcaggtttcttcggtgaacatatattaccttcttgcaaatgacactgtggatgacattatatggtacatcccattctttgttttcacttcataagtgttctactttagatcttgtacttaagtggccatttttaccatctgctttccagggacgttgttcaaggcaaacttgagaatttgggacaggttctttatctctctaccctccccccacaatggactattattttcctgttagaataactgacaccttttgcggtgaactatagctgatccttggatttgttgggtgatgaatgatgatagctaaaattagcgaaaactgttctacagttccttttggttatatcagacttaagttcccttacacgctttgctcagttacacgttaacatgaaataatatgtaacaagaacaataacatttgctcatgtttccacctgttcatattatttttggaaggagtcatctctagtgtacctgcatttgttaatctctgacatgcatatgtctacttcaaaaagacacagctaaactatacggttaactctgaacataataacctgcatgtttgcatgttgcatcatcatcatctccaaactccaatgatacaaagcttgaatgaagcttgtgcatgagaatgattctgaagagagcaaactttgccttgtttttttgtgtttccagatgctggatgggcaggagaaaacgctggatgtgtcccagagcgacactaggcccagcccttccaagcagaagacgctcgacgcctacctcaagcgatgcagcaattccacagaagctgatcagcccaagctcaagaaccctaggttctgacatttctcagggtttttagctctactatgtttttgtttggcaattggcatgaccctcttgccttaaacgaaggaatgctgcagtgtcaggtagctgtgtgttggtgttatgatcacagccatgctgtattttgtattacccagctaaatgcccgtgcgttgcaatgaaaattaagaataactttgatcacaatatcttttaaagccccaagagaaagtaaatcattcatgcaggctaatcatcggcccgtatttgcacacatgttgagctaaacattaaactacactgttgcttttaataatagaaaatgaatctaaattattgttattcttctattcgattaatgtagaatttttctcaccatttaattcaataaacgcttcacctttttttggccccatatgacaccacaactaatcttaaatgtaatatgaatactagtctttgtatttacaaaagagaatcacggagcaggtacgaaaaagaacaaaaaaaaaaaaaagagcgcagaaccccatctcctcccaaaacccatcgccgccgcctagccattgccgtcgcctcctccgcctccatatgaccatatccacgtcgccggcgcagccccaccgcctcagatccctccccctaccatccggcgaagtttctcatctgcctttgttgacgtaaaaatcgaacacggcggcctgggagatctgcttagcccctgtgcaggtccaaatatgatgagatgcgggcgtgccagtcagtttgatcctgccactgacaagatatgcaaacagtagatcaaacagccgatcggctgataagccgatggagtagttccagccgatagccgataatagccaatgccgataccagccgatagcgatagggtttaagcgatcggctatatgtccaatgtagataatgatataaaggcggctgatgataatataatatagcaatataatccagtagaaaaccaatcggctaataatatgatatagtagaacaagtattgatccaaaggttaaagcatacatcggctggggatccgatgtcaggaaattcacaagattagattaaacagtgaaacctttgttgtcatcggctaaatctaacttatatgtatatgcgatccttatgagccgatgcaacgtccagataactcaccggctgaaaccccgatgaaacccttattggcaatcaagaagcaggctagaaattatggttctaagcacgacttagtagatcaaacttaactgatgcagcactaagtatgaaaagaaacataatatctagacaatcaagccgttgactgattttcagggtggtagatatctaagctaatctaatctagcaatacgatttagccgataccggcagaaaccctaaagcgagaagcagccgatagagctaaattgatatgctaagactagattaacagagacatatgataaataggtaggtaaatatatcatccaaaccgtagcaatccaagagattgaatatactaatgcagccttgagcgatgccgacgtagatgacaaattcaccagggcccgacggaacgtaggacttaccccttcgccggagatcgaactgaaccgatgcagccctgcgtcaggtgcccaaattccgccggaagataagtaaagacctcaggaaagagggtggcgatgcgccgagagtagttgtattgatcgtgattgatagattacatagaccccgggtgtacatatttatacccatatgttgatacgagtggttggccgaccaaaaaaaaactattctaaaaataaaaggaaaaaataaagtccttatcggacattaaacacactttcctaaagataaaaggaaactaacaaactatgcctaattaatagataaactgccatgccgcatccttcttgaactcggactcttctagataagcttcctttgattgatccgattccatcgagaacacaacatcgtggcaatttgacgactcccatcgactgattcccccaatcggctgattccagccgatattaactctaagccgatgatgactttgggctttaccaaatttcgctgttaacagccttcccatccaccccgagtcccacgccgtcgccttctcctttccgcccccggcggcgtttcccttcctctctgcacccggcatctcgatcttctcacacagtcccccattgccgccacctcctcgcctcctactcactttctcatccccatccccatcccaatcgcagctcaaaaaagcatcggatcacagcta

SEQ ID NO: 27345 - DNA, 19259 bp, Oryza sativa
aggagtttaggacacaatttaatgctaagcaaatagaaaatctattattacctgttccctttaatatttttgccttcggagttttgaagctaaaaaccaagcaaacagctcatggtcactatgttattggttctctggtgtgttcatgaggcctgatggcaccttaaccttaacctgttaattaacaacaaaatttagattctacttgatatatcttaaaagccaacatcgatggcacctttttagttgtacaccaatcacctgaatactgtaattcctgactttgcatttagcctatgtaattagtaaatgtcaatcatatctactttctcaggtctacagagaagagttgagaaatcctctttggctttgggctaaagggtttttgggtggcaacaatgcacaaacagacaaactacactaattgtgatgactctggatttttttactacacttcataacaaaattgtgcatttttattttgggatgtttattatgttatcttcttgagatactccgaggtcaaatgatctttgagcaatctgtgttggtttcaaaatatggactagattgccgtttagtttgctactatgtattgcgttaggtttgactattttatgccttgtagcttgagctacagttcaaatatagcttgagctgaatctatagttctaactaatagtttatcaagctgtatgattttgtaaaagaaaaaaaaaatcaaaattaagtatgattgtgcattacgggcacctaaagttgtgcaacgcactattaagtggctagttatcagagaagcccagatggataggccgaagatggaccatccaaatgggccgttcataataaaaggcccaggccaacgacggccctcttatgagcctcagcccggttaagtattgggcttaacggcccatttatcttgtctctctggcccacctgcagagaaacaattggtttgggccgttgaagagaggaaaacctaggctagttggcgagctcgccccactccgtcggcggccgcgccttccctgtgctggaatccagcggccgccggagacggcgagttcgacgccgcggctgcgcgcggagacgttaaccctgcggcggctcctacctaggaggtaatctccggccgcagtgtccgatttttgcagattaagtagtgttcaggttcgcgcgcctcgatgattgagcatcagtagtgtttggatttagatttgggctatcgattcctcgctaactggttgagtagatgggtgctcaatgtacggatgttcgttgaaattatctagtgtgctataatctgaaggcggaaataatggcttggttgtattctcctgctgtttataggtgttcttactggttgttatagcgattctctgtttggtgcccatgagcaagaagaagaacaagtctcaattgccaataaaggcgccgttgaaagatgctgaacaagggtatatataaataaatataatcattgctctactgtattcttggttgtaattctagttgtttgagtgacttttagaagaataatttcaagggattgattcacaatgtgttttcttcctgggaagaataacttcggattacattggaggagacgctcttgatgacctattatcgaagcttattaagtcagtagcaaattgtctctccctcgacctttctttagggtgttgcttgcttctaattccggtgaaatgtactgtttaggagcgtggaggttgcaaaggcttcaagggaagggttgccggaaaagatatggatgaaggtagttccatatcctaacttcaatttcacagactcttattgtctgtagatctcttataatgactatgttcagaagatttttatgttcatttgcatgtatgacttttgtccatgtagcgacaatttgccgttggggtcaatgatgtcacaagggttcttgagcgaatgcctgctgctactgctgccacccattctggtcactcttctactgaagcaataactgacaaagctctgtgtagagctcctccggtgcttcttcaggtcgatttcttttcttgctattgcttagtctttagagtttgacagccttcttatgaagtttgagtttagcttgcatatatctattagttcgaaggaaactattttttaattaaagcacaaatatgctttgatgcataataacacaccatttttttctctcttttagtccagaaaaggacatgagtccattgcccccttcaaagaacgagtgctttacagcttgccagtaaaatgttactgaatgtagttttcaacgtatttcagtcatggttacgtactacaatctcagaactatcaattcattattcacgtgtgatgtatcaaactctggtcttctgcagagtgctaagtctaaacattgtctacatatggaaacacgctgcattcatgagttgctcgtgggactgtccctattttctgtcatatgtttagccaataaaaaaagagagattcagttaatatctggttaaggttcagccaagagcaacaaaagggtgattaggtgttgcacatgcccttagctacaatgtctacatgcagaatgttaatgctgacaaatatttctcatcttgtaacatggtattgtaggttgtccttgtagctgctgattgcaaccctaaatggttaacaaaacacataccaaccctggcatctacaaggcaggttcctgtgttgtgcctcaaggacaacaaagaaagctcactgaggttaggtcaagtggtgaatgtcagaacagcactggccattggagtaaaggtcggcttttgatttcttgttctacaattctttcattgtttcttgaagcatctcatgatgatttcatattctggtgcatactgcaggccagagatagcataatcaataaggctattgatgaagtcctgaagactgctaatctggttgccaaggaaccgtaactgagcttctggtccaatctcagtgacataatgggcgaatttatttttaaacaaggcagaagctctgcctcattccactaataaagaatagatattgacccaagaaaatgtttgcaccaaaaactgataggtgaattttggacctctgggtgctcagcattgcagtagcatcttgacaggaagtcatgaggatgaatgggcatgcagttgagaatttcgcgaaggaaatcaaggatgctgctgaactgtggcgtttacatctgaagaactttttctgcctgtattcatgaagatcaggccagaccaggcttgtttgttaggtaggttcattctgtttagttgaatttgtggatcatagagctagcaaagttgctcgcctagactgtaggctatattatgagcaatttagtgcgtatgtgtccactatgtataatgccatttgcagccttgtggatatctgccttatgttgtttgtgttcaaccttaatttggacgatataaatcattatcataacaaacatccttaatacataaaccaggatagatgtactaacgttattaagaaatgtcttgcattttgcattactttctcatcatgtcaagagtaacatatatctatgcggtcaacaatagcgtgataaattaaactacagctagttaacgtatatttatagtcaaatttgtttttttgttgcgagacgtagaaattgaatttaaacttgcatgtttgtggagtgatatatcacatattaatatatcttctcaaattttttcataactatttgagtgacatgcaaacaataagggaacatcccctcgagggatcaaaatccactcccatgagaaagggaataatgcatgcatgcgagatgccccaaattacacgcaaaggccaatgaaaaggatgcagcgactgttactcagtcctctgccactgttcactcagtcttcgagtttgtttgtggagtttaaaattctaaaaaacaactagctggtagtcagtttatgagaatatggagaagctagatttttcagcttctgacttctactccctccgtttcacaatataagtcattctaatattttccacattaatattgatgttaatgaatctagacatacatatctatctagattcattaacaacaatataaatatgaaaaatactaaaataacttacattgtgaaatagaggaagtagtttattttctcaattctataacttcagctcactgtggttcggtcaaggtgtgtcaatctgaacagggctgctgacagactattggagtaaagctcggctaagcttccatttcctttaggttgcaatgtccatcttaagaatccaccataccatgtttatacatcctgtattaaaatcatatttagtggcatatttattgagattagttattatgtgagcatcaaccttggtaggtgaagctatccatccacaagggctccaagaaggttttacattttcgttttggtttgctaaaaactgatgagttttgatcagtgcctatgaaaaccgactaagactgatcaattttgttaacctagctagccacaactacattatatcttcaatgtagctatgcccataattaaacaatgtggtggatataggcatcggactccatctgttagagcaactccaccaacctatttaagccaggctctacaagcatcagtatagccagttctccaactaatttggtaagccagacccattgctcaagccatttacacaggaacccatatgtcagtctctcactccttcctcctctacaccttcctccaactactacctccaatcatccatcctccagttctccaccaccaactggcggcaatagtggcggcgaaaggggaagcggccgcgatagcagggtggagagaggggaagaagtggatggtggtaggagctgcactcaggtggtggcagcaccagcaccctaatggggtggaggtggtggtagggactagggacaaccacatcgggaaggtggggacggcgatgcagagaggaggggtggcacgacgacgagcgaacgtggtgggcttgcgcggtggagaggcataggcgtgacagccggtgacgacatgcccttgcgcggtggggaaggcggaggcacaatgtccagtgacaacatgtacttgcacggtgaggaggtagaggcacgacatgagagggattagggaggggagagagaaggtagggtggtgggatccatgctacaagtggttccaatttgctagatttggtcagccaagtgagaaatctgaccagccacttggcttggtaagttggatgacaagtttgttggagggcgttctcttgcccaagtttaccaaaattttgcttggagagtaagatggaaagactattgaagatgcttttaagatacatgtgattccaagaaaattactgtagcaaagtttcttactactttgagtatgtatatgcttttctaattaaaacaaggtattggtgatggtattaaatctgtcactccacctactcccattaaaaatttacaaaatttaccccccttaaacttcttagaattaaaaaaagttacgacatataaaatgattatgcgctataggaaaaaaacacatttcataaaaagaaaattgtatttttttgtatccggtgcaaagtaggggcactcagctagtactaaagaaaggcactctcggaggtgtatgcttgtagtgtacgtatctgtgtgcacacgtgtattaaggaaataagaaaaattcagggcgaggcatgctgctagtcgggtggcgtcgacgcgagcactcgttgtcaagatgtttgtagcccacgagcgcggtggcgaagtagcagagcacagtgatcgtcaggtaggccacgatggttgcccttccacggccgggcttggttatgagatgttttaactttgatcaaaattaaactacttcaaatttaattaaatttatagaaaaactaataatattttttattcaagataaatttaaaaaatacatttaatttttaatttaataaaactaatctggtaatataaatattactatatttgtttataaattagttaaacttgaagcagttgattttttactaaagttaaaacatcttataacctgaaacggagagagtagctggctagcaagtaaatttgctcgcctagactgtagtccatattataagcaatttagtgcgtatgtgtccactatgtataatgccatttgcagcctttgtggatatctgccttatgttgtttgtgttcaaccttaatttggacgatataaatcattatcatagcaaacatccttaatacgtaaaccaggatatagatgtactaacgttattaagaaatgtcttgcattttgcattattttctcatgtcaagagtaacatatatctatgtggtctttaaaatacaatattgaccatcaatatctaattcctctgtccctaaaagggcgtagttttactctaaaaaattatctctaaaggagagtagtttttaagaatttatctctaaaggagtgtagttttagtttggtccactaaattaaacctcttttatacggcttcatcatttttagctatactctgtccttgttttttatctgtattaacgaatgtcatagtattcctttaacctcttgcttataatatctttatgctaaaactacatgccttttgagatggaggaattaattattgcagaagattttttttctaaaaaaactgagagcattataataccatgaaaatattgttttaacgcaaatatatagatagattttattttatgcaatctactattataaaacttgataatgttcctacaagtttttcatctgttgcctccatcgtcgatcgggtcaggctcttgtccggtcacacggcgacggaatttttttcggttttagatttttttttaatatttacagaaataatctatcggccaaaaaaattacaaaaatagaccctgccgcccacctctggggcagcaagctgacgtggcaaacgggggaggaacgggcgatgacggagggagggtttttttgcaggaaaacccggcaaggggcccgaatgcaaaaaagccagacggggccggctattttgcaggcggccccttgccgccctctggccaggcggcaggcctcactgcctataaaaggcctgctgcccagcccccagccctcattcttctctcctcaattccagtgaaaaaaaaaagaagagaggggaggagaagagaagaaggggcgaagccctgccggattcaaacgccgatttcaggtaatattcatagatcctatatatgactattgagttaaatagtgtgtattctttaaaaatttgtttgaataaatgcattatatttttagggttttagttgtactaatctagaagtgcgtattgtagatatcggtaactacatagatctgctagtttggaatcaatacattaccgttgcattggcttacacaagatattacgttgtagatgtttattgcatgaaagagtaatatgatctagttatttcgttgacagatatgtcgaacaaacaaatattccaagtttaccatggaccaggaaacgtccgttacgggccaactggggtagatctgtcagattttattgtatcagaaaggggaattgatagaccggctgagaggagtgtaccttctataaaaagatggttaatgaggggcttgagagttgatccacagacaagtgacataacaatcaatgttatagtaagtcgggcaactgagggtttttattgggaactaatgccagttcaaaactctcgagtgtggagatggtatttggaaaatgcattgcaacgcgggtggcctctagctttggttccgtttgttcacccgaaggatccaggtgtgcagatgaacatggatgatggcgagggaccaagtgctgaagtaaacgagacttctgtggaggaggtcaacgcacgagaggacgggggcatagtagctccagtaggcattcaaccaggtagagtggctgacgagggggagactgtcggtgccattgtggatgaaatggagagggaggattctgacaacgagcgtgtagaggaaggtgattcgtcagatgatgagacggatattaatccagcagaatgggctagtgaggatttttctgggctgatcgtctctgaagaggatagtgtgagatgggagtacaaagaaaatgaggttattcagggagcgatttatagtagagcagaagatatgaaggaggcggtaaaacattttgcagtgtcacttcatagagagtttagggttgccaagtcgaaccggtcgcaatatgaagttcggtgtattaaggaaaaagatggttgtccctggagagtgcacgcgtataaggggaaatggaaggattattggacagtgtcagtcgttaccaagcatacatgttttctacctggtgttcagaaataccacaggaacattacttgtgcatttgttgcatctgagatgtatgcgcatgtcatcgataatctcacatatgaaccaaggtcaataatccgacacatcgaagagacatacaagtatactattagctatgccaaggcctggagggccaaacagaaaataatagagatgagatttggaacttacgaagcctcgtatgacaatttgccacgcctgcttggtgttatcgaggaaagaaaccctgggagctcttacgaattgaagaaattcccctcaattgaacatcctagcaagagtgtgctgcaaagggcgttcttagctctacatgcatgcaagatggcattcgtgaactgtcgtcctgttctctgcattgatgggacattcttgacaggaaagtatcggggccagatactaacagcaataggggtagatgggaacaatcaggtattgcccttggcatttgcttttgttgagagtgagaataccgacagctggtactggttcctgaaattggttaaaacaaaagttgttggtatgaggccaaatgtgtgcctgatacatgataggcacgctagcattctgcgagcgatagaagagttgcagtttgggagtatggaacgaggataccccggtgtttgggaagatgtacagagtaggtggtgcatgcgtcatatgggagctaatttcttcaagcaattcaagaacaaggagctcatgaacatgttcaagaggctgtgcaatcagaaccaggagaaaaaattcaatgagctttggaagagattagatgagttgacagccaaatgcagtgatcagcgtgcagcggctccatcgaccgccgttgctgaccctcctcaagctcttggacctctcccaacggatagtccaacattggttagaagaactggattggagattcggaaattttctcagtggattctgcatgaaccaaaagagaaatgggccaaggcgtatgacacaggtggtgctagatatggaataatgacaacaaatttggcagaagtttacaactgggtgatgcgcggtgtccgtggactgccactagttggcatagtagagttcattttatatgggacatgcaggtattttagggatcggttccaggcagttcttccctctatgccgaacaacagcattttgtttggagctttcatgcagaaaaagctaaaggagttgcgtaaaaaggccatgaaacatcgagctctagtgcaaggtacccaacagcacaggtttgagatactatgtcaagataaggcaggcaggggtatataccgcaagagagtgaagcaggagtgtgttctcaaagccgacggcacatgtcattgctcttgtgcaaagccgaagctgctccacaggccatgcacccatgtcattgctgccgcagcggagtgtggcataccagatgcagtatatgtgtcacagtacttcagtaagcaagcaatatatcatacatggagcggcgagatttatgggttcggcatagctagggagttcacagagactaacgatgaagtactcaatattcctgacccatcgaagctccgaggcaaggctggaaggaggaggactcgtcgcatccgcaacgatatggacgagttggaggctggcagggtgaagcgttgcagcaaatgcgatgaacatgggcacacctacaagcattgtcctaaagacaaggagaaaccaagtgtggcggaggcaggactatcaggatcagcagcagatggagctcgccctacgggtgaaggcactacctccactcgaccacgtcctaggcgtcgtcgtgccacgtctggctacgtggtgtagttcttatgttctatgtcggcatgtggatttgcttgtaattcgtttcgaacttatcgatgtgtttatgtttcgtcgtgtaatgtcagacttcggcatgtcatgtctttaggtcttgtgatgtaacgtcggactaaggcgcctaatgtctttaggtatgctgatgtatgtcggacttcgacacgtaatgttatgttatattattgaactctacatatatgttaaattgcacgtcatcgttatgtaccattagtaacgtttgctatatttaaatagcctgtactcttgttgtacataattaatctcatgattttattactatttcataattttgcaagttatcttttgttttacattactattttttgaattgttctaacacgagggagagccacacactgaggagtcgtaccaggcctacctacgctggtaccagccacgcacccgtactagggtcaccttcgctcccttggagcagcagccccacgttgcgagcactagagacctctacgccaggcaccgcgaccaggacttcgctcgtgttgtgagtaccctgcatcgcaccattcctttatgttttcatgtctttctcttcgtcaaattttacgaatatttacgaacaaattaaccatgcaggtcgacgacatcaaccgggtcgtcgttgatggttcaacgacgatccaacgtttaggcgcggggattccggtacccgtagaggagcacctgacaacgtacacgcggatgggaagtcgatgcgctcgattctccgagtgctcacctgtcgtgcagacgacgttgctcgggcagacgcagctgtacagcggccacccgtaccgactggtccccgtccagctgcgcacgttcctaggccgactccccctccgcacggaggtaagtatttttattactatttctgtacatgcctcgcacatataagtgagccgtttacttgccgattgcttcagggtttcgtgcaccgttcagcaccccgccttcctcggataggccttctgttgtgccccccacaggtacttaaaaaaacaacattacttccgcaatcaatttacatacattttatgtcttagcttacaagggtcccgttgtcgatgtgtaggtttcgcccagttcgctatgacgcaggccgcccacttctcccaggctgcagggtcagcgtcacaggcagccggcacgtcgagtcagggtccaccactggaccattcttggaacttctccgacccttgctgcttcaccggcccttcaatccttactccacttccttcagctcaacaaagaacttatcgcccttacacttggagggcaccgcggtgcaaacgcagggaccagcgcaggccactccttccgcggacacttgtgctacccgtgctgtgccaccggatcgtttcacctactcccaggaccacgtgcgagcacaggcccggaggaccaagcgtggtcgcggcgcggggcagggccagtagagcagtcttctctttgtttacttgcttcactttccagtactgtatgcttgtgtaatgactacgttgttgttatatgtgcacgatacctttcggcgcatgcacgatacctttcggcgcatgcacgactactttctgccgcaccgatgcagcctcctttattcgtgtgtgatacgagtatttgcccgccatttggcgcatacgaccaatgtaactttcggcgccgatcatgcatgtatctttcggcgccaatcaggcgtacccaccataccccaccactttcacatgtcaggggtatcactggattttttgcgcctatataagtcgccttaacgagtgaggcctcacaatctttcagaactcagtcacattcagtactctcttccccacttgcttcattacaaatccgaccggctttcgtcaatggctagacgccggggtgttgaggatccaaactggcgtagcgatccttgtgtatacctactaccaccttggtgccagcgtcctctctgcctatgcggtgatcgatgccaactaatggcttcgaggaatcctgatattcgaggaaggcgcttttttaggtgccctaactatgaccgtgaggtattttattatctgcatatgcttattcattccgtatgggcaatcgctttattcttcgtaacactactctattcggcagacccgtactacggcttgcgcatacatcgagtgggtcgatacagaaaatcccattctcgacctaaccacttgtttacaagaaggtcgctggtatttcgcatccgaaagtactgagcaatacttacagagaaaagcggcttatgaacgacaatgtcgtgaacaacagagcgactggcgggtgctaactacggcaggtgtggtgatcgttgtcaggttcttcgttccataaatcctacaacattgggtcgaaagttctttgtttatccaaatattcttgacgacgatttcatggtaagaatattttgattacatgaatccttattttctcacaacatttactaactttgcttgctttacatctattctttcctcctaggaaccaccaaggagatgtcaatacagagaatggatagacaccagaagggttctaactccacctagccgtgttgtgcagcttgaactaccagagcaatacagggttactaaagcgcggtttgagagaggagaaggatcctcacgtaggggttagctattatcggacaacttagcatattgaaatttctactgtcatgcttccttgtcccattactacatcgtcgttgtgttcaactattgcactacctccctcctagttcgaatctaatatcatctatgtaaccgcaatgcaaatagttgtatcatgttcaaattgtactactatttcttcatgttacataattctccttgtttaagtccatataatgtttctacgacccagactgcgataggcctatataaattatccgagtactaatacgtcgaataaggtacaaaataatacctcacttaacatatgaaattgcgcaacaaccaacttcaatacatttttataacaatattaacaagttttatcaataaatacttctttatttattattaacataacatagaaaaatcttttggccgtacttttttcatctgggtcccttaccgccctctacccagatgaaaaagtacggccgcaagctttttatgggcggccaaaattgcaattagccccttgccgccctctgtatgggcggcaatggcctaatcgcaattttggccgacggcggcagacgacgcggtcgacccaccgtctgccacgtcagcttgccgcccaccattagggcggcaggggctatttctgtaatttttttggtcgatagattatttctgtaaatattaaaaaaaaatctaaaaacgaaaaaaattccacggcgacgcgggcgccggcgagagaaagcctcggtcctaaatgggccagatgggccttctgcccattactccttacctgggcttgctcctctgcctgggctgctggctgcttcggtccgccgtgcttcacagatgggcctgtcggcccaagacgagcggctctccaattatcgcatatgtgattgtgagtgacgatgggaacagtaacacaagctataataagtgtaacgtaagaactcatagagcaaacttcatctttattgaatgaaaataaacaaagttgggatacattttgcacattcatcggtgcatataactcgtcaagcaaacaagtatatttcgcgatggaaataaatcacgcatcacaccgtgtatagcagtattatatgttaattaccatctatcagaattcagagcaacgtaatcagacgacgtagcattcgtagagcttgatgtccatctgcagccggaagtaggtgaagccctcgaaggcgtcggtgcggagggtggcgacgccgcgggacatgaagaagtcgccggtgccgcccacgacggagatgtccctcgtcttctcggcgatgatgtcggcgcccatgaggttgagcgtgccgcggcgccccgtggagttgaacacgatggagaaggcgaaccacgcgttgaacgcctccttgctgttgtagaggtagaccccctgcgcgcgcaccgccgtctcctccagcgacggcggcagcgccctcccctccgtcatcgggtcgttgaacaccaccacctgcccgaagaaggtgccgccggtcgacggcacggcggtggccagcgccgtcggcttggtggccgccgccgacgtggagttggaggtgctgttgctgtagtcgtagaggatgtcgtggaggtagagcctcatctccttgcacggcttgtcgtagctactactcctgacgaatctccttccatgggcgacgctcgcagagcagctgaggaagatgcaggccgcggcgacgatcacagacgccatggaccatgtcaccatccggccttgcattgttaattatttgcttattatgaacaagcaggagaagctatatagctacgtacttagctaagtgcctgtcaatgctggctttgatttgctgcagctagagctggagttttgcatgcctatttatggaggtgagaaagggaataatgcatgcatgcggcatgccccaaattacacgcaaaggccaatgaaaaggatgctgcttctggttgtcttccgcaactgctcactctcttctgaggatctgtttgtgagcttaagattttaaaaaaataacttgttggtagtctgtttatgagaatatggagaactagatttttcagtttctaacttctagtttattttctcaattctataactacaacttctaagaatctaaatgaaaaactatattatatgaaagctgcagctcccaccacacagacctctggttgcttgaatgctctgagtctgactatcctcgtgcaaatgcacagtagaacacacttaccagtagtattttatgatagtggagctatccaccagtcaccttcaaagggaacacactttacttgttgtgcttcaaagggaaggataccagaaaaggtacataatatacttagctatagactgctagagtatccgttttctaaaagtttgtaaattaagaaaaactggttattaatgattaacggtaactaaaatgtttggtaactaataattactatcccagcattgtattcttttccaaaaaaaaaagttatgacctacttacgtggaaacatatatctcatctcttcgggacaatgtgtccgactagttaagtgggccaatattaagttacttaaaaagattacgataatatttaccttaaggatgacattttttttattgaaatatccataaggatgattcatcttacccatgacagtttgacaccgtaactcattcatgagatcacaaagtcctcatggtcattgagaaggtatcataaggtaaaataaaatttagtgtaaaatttgatacctcatattactataccaagagataataaatttataatagaaaaattgatacatcatatcatggtacccttcttaaggaccgtaaatttgctcatataacagaggcaaataaacaaaagcatacatatttttttaccaccaaatcaataacgttaaatcctcttaacaaaataggggcagatctgagcttgggttaatttagaaaaacaacgacaaaatcacaaagttaaaacctgaacttccgtgatgaatacatcacttaattaactaggtcttcctgttgatgcatatatatatatatatatatatatatatatatacacacacacacacgctaaaacttgcctattacaacccttaaaatggctacagaatgcatagcaacattggcatctagaaggagattaagattactgtactgtacatgtggtccacggacgagacaattaatagaggtcgcaactgaagctcactgtgtggttcggtcaagttgtgtcagggctgacgcgacagactattggagtgatgcccaactaagggcctgtttggatccctgtcacatcaaatgtttatacactaatttagagtattaaacatacattaattataaaacctattctataaccttggactaattcgcgagacgaatcttttgagtctaattacaccatgatttgacaatgtgatgctacagtaaacttttcataattatggattaattaggcttaaaaaattcgtctcgcagattagctttcatttatgaaattagtttttttattagtctatgtttaatactccaaattagcgtcaaacattcgatgtgacacggactaaaaagttttagccccatctaaacaccccctaagctttccatttcctttaggttgcaatgtcccttttatcgcatcaacgtgcatgaattaatgcaccatttttatgcattcttaaatagacacgggataataataaatccataaaattcttactacaatccatattaaaatcatatttattgagattagttattctgtgagcatcaaaacgttggtaggtgaagctatatatccacccacaagggctccaagcaggttgtacattttcgttttgaaattacaaaccgttcctcaccggtttgccaaaaactgatgactttcaatcagtgtctatgaagaccgactaaaattgattagttttgttaaactggccacaactatattatattgatctttttgtagctatgctcataattaaacaatgtggtggatataggcatctgactccactagttagagcaactccaccaacctacctaaatcaggctctccaaacatccgtatatatacgtatatatatagctagctctccaacttatttggcaagctagacctattgcacactctatttacattgggacccatatgtcaatctctcactccttccactacatcttcctcccaactacaacctccaatcctctatcctccagttctccacgagtactccaccaccaacccacggcaaccactacaccaaatccaagaattaccgtccaattaatgttggttgggaaagaactatatataccaacaaattgttcgtcggcataacttatcaacaaactatcggcgagagggaaagctgtcggtggttgcagggtggcaagaggggaagaagtcgatggtggcagcagctgcacctgggcgacgacggcactagcaccctggcgggatggaggcaggggtagggactagagtcaaccacatcggaaagatggggacgctggaggtggggacgacggttcagggaggagggtggcgcgacaacaagcaaaggtggtgggttcgcgtggtggagaggcgccgtaggcgtgacggccggtgatggcatgctctcacgcggtggggaaggcggaggcacaacgtgcttgcgcgatgaggaggtggaggcaccgcaggagagggattggggaggggagagaaggtagggtggtgggatccatgttacacacaggtggctcaatttgctagatttggctagccaagtgagaaatttgatcagccatttggcttggcaatttggatggtaagtctgttggagggtgttttcttacatgggagacatgacggctgtattgagtgtcatgcatggcagctggggagctatgggtgcaggaactggaagatgcaaatcctatccagactccagtacgactgttgcagcagcgcccacgacgagcccagcttgccggccgccgactcggcaaacttaattctacattcacttgactccggcggctgttgcggcatttcgtcgaacatttgcttggcatgccgaaccttcttttttttttctttattgaatgaaatgaaatggaggtgcgatacattctgcacacagtacacacaggtgcattttgcacacgcgcgcgcgacgtgcatatatacgactcgccgcgcgttaagacggagaaatatcgattgagatggaaattactccaaaacacacacacacacacacacaacgatcatgtttaatactaggattccacacaccgcttatgcatatatctgatcagacgtagcattcgtagagcttgatgtccatctgcacccggaagtatttgaatccctcgatggcgtcggtgcgaagggtggcgacgccgcgcgacatgaggaagtcgccggtgccgcccaccacggagatgtccctcgtcgcggcgttggggtcggcgcccatgaggttgagcgtgccgcggcgcgccgtggagttgaacacgatggagaaggcgaaccacgcgctgaagtcgtccttcttgtcgagaaggtagagcccctgcgccctcaccgccgtctcctccagcgacggcggcagcgccctcccctccgtcatcgggtcgttgaacaccaccaccctgccgaagaagtagccggggctcgacacggcggtgctcagcgccgtcggcttggtggccgccgccgacgtggagttggaggtgctgttgctgaagtcgtagaggatgtcctcatctccatgcatggctcgtcgtcgtagctcctcctgctgctgctccggcggccatgggcgacgctcgccgaggtgaggctgacgaggaagatggcggcgacgatcagagacgccatggaccaagctgtcatcgatcagagacaccagtgtaatgcagctagcaaagtagctaaacttaattaactactccaattgaataacctgtgatcgatcagctcgatcgagagagaattaagctaaactaagctaagctaagctaagcgcgcgcaagtaagacagtacgtgtgttgctgcagcttatattagctgtgatgtggaggtcgagttgtgcacttctgcatgcttatttataggagatggcaggaaaaggaatcctctcctatcttaaaataaactaatatcttagtatatactttctccattttacgatgtaagtcattttaacatttttcacattcatattaatattaatgaatttaaatagatatatatgtctacatttattaacatcaaaataaatgtgaaaaatgctagaatgatttatattgtgaaacggatg

SEQ ID NO: 27346 - DNA, 4705 bp, Oryza sativa
taggacctgcaaaaaaaaaaaattccgagttgttaggatagaaagaggaatcaagtgagacgtacgcaaggatactactgttactcctgttgctttaatttgcttgattctgacgctgataaatgtactgcggtctgtggattatgtaccgtaaggttaggttaaggctgtgttatacagatacatatttaaagtattaaacttagtctaataaaaaaacaaattataaaatctacctataatctgcgagacgaatttattaaacctaattaatctgtcattagcaaatgtttactgcatcaccatattgttaaattatggtgcaattaagcttaaaaaatttgtctcgcaattcataattagttattttttcgtttatatttaatacttcgtacatatgtccaaacattcgatgtgacaatgtataaaattttggcagtggatcttaacaggccctaactagccagatctgaagctggctactgctgattagctagctagtgtttgctggctttattactgcagctgcggtggagactggataccaacgccgcgtccttccccgtatgaacaccgtgcacagggccgtggcaccttgttgccgcaggtttcatgagtgattttcccggtctgcacccgaagccaaagattgttgatcatcctccaccatgcagaaccctactcgatcggcgcaacctccacttatggtttttattttttacattttagaactttttaaaaacttattttacaaataaatctctaaaagaacttattccgggaatagaatttttttgcaacgccaatatcgttggcgcagtgatccaacataacgacactaatttcatcgcataaatggatcagaggcataaatagtgtgccttgccctactactgccctcaagcaagtttgaaaagacacatttggttgagctggtctaaccagagacgtgttccccaccggattgagatcctctgcattgaagagtaaaatgcagaggatctatagtatttttgcattaacacatattttgagccattggatcttcattaaacggtacagatcagtccactacagcacaacgctacagtaaaaacgctcaacggtaaaacggtattactgtttagaacactggtgttaatgcaaattgttgtagtacaagttcaaacaatgttctctgcatttacggcagaggacctgcatccgttccccgccggttcatgataaagttgtcctgtttagccggttcaaagcggtctggtgcatacggtctttgcgctgaaccagaccgggattactgatgagcattagttcgtatttatctggtcgaactgctggtttattcaactatgcttcaaacttcaatcctcttaaatttagaccccaatccaaattcgacttctcttttcgtacacatacaattcctcttataagttatatggatatgtcaccaccagatacattgttctctagccttaatattccgtatgatctttgtcgacgggggatacccgtagaccggatatagagggtatcggggtccgttggaacgatgatctacgtagtacgacatcaagcaaacaaaagacaaggattatacttgttcaggccccttgataggtaatagttctaatccagttggtatgggattatatgatggaaaccacagattacaaagggaatcacaaaactcgatgataccgacgagaccgtagtcgagttggtccgactaaatctcccggcgacttggctcctgtaggctccaactccgtaggctgtggtgggtatgttgacggtaatattcgatgccttaggtcctgcctggggggtcccttatataccgcgggctagttgatctctatgtaggactcggagatatcggacccctcacgatatggtaaagacccaatcttatccgagtaggactccttccatccgtagattctgtttctatcacgtgatagatttccttaacgtatacggaaattatccgtatgcgtgcgggtatatcatattgatacctatcgtatatccaaggatagagggtataccttatccgtaaccctgacaatcttcttgatcatttggatcttagggcctgtttgggtgagttttagattctgagaagcagctgtttggtagccagcttctgagaatctggaaaagctctgaaacccagcttcttcagcttctggcttcttagttcattttttagaatctgtaactacagattctcagaagctgtggactgtttgggacagcttctagcagaagcagcttttcccaaaagctgcagctgggacaagctcccccaaacagggcctttaacttctcccaagtctctcgattccatcataaacattttgtgcaattgataaggttaacccgagattttcgaattgaaaatcatattaagcatctgttggcgatgctcgtgggcatattaacaccaatgttgttgtaaagccatcaaggtggcaaggttaatgagcaaagcacaaattaagaaagcggcttctccgactgactttaacaacagttattacattgttcccatgtgtttttatgctgccagaatattaaaatcatggttggagaaaaataatcgataagtatggtagagtagttgctaaagtacgatatctaattaagaaggacacgttaacacaataacactattggaaacaagtggtcatcctggaaaaggaaagttggagaacaaaaaggagttggagaagaaggaataatgagaggtttcttcttatggaaaaggtaagttgcaatgattgtcatgggaagggattggtcactggtgtattccaccatattctctccgccaaaaaaaaaaatccaatcctagctacgaaactgaacacacacgtgtccaggttcatagctaggattggatttttatgggacggatggtgtatttggcaatggctcgaccaacatgtgactataatgaagtagaaaataaatttacattcgaagcaacagcgagttggagacattaaacatgatatattgaatctataagttaatttaattttaggatataaaaagaaaatacatagaccatatgtgttgataaaaagttggttttaaatgtatcaatgggatgtcttacctttaatagtttaatagtcctattacccaaatattaaggatgtcggtgacatggggccgagggtatcatgcctagaggcttgggcagccgcggtcacccacgtggcctgaccccctcgggggggggggtcgggcccgtgggtgacgtggccaccccttcccctctctccccgaggggtcggaccgctcccgtttcggccccgagggccggggcgccccgaccccctatgggtttggcgccacgtgtatgggttaggtgagcacagcggggctcacctaaccgcatttattgcgggtcggacgagcgcgtcacgccgcatgtaatgcagcgcagcgcgctcgcttatccggtccgtgaccgggcgcagtgtgtgaccggtcagatcgcgggttaggtggtggcaggcggcctgttacacgcctcaccccgtcccgtcggattgatgagagcctccaggcacatgtccctagccggagacggcgtgccagctcctgaagatggcacgtcggtcccggtcagatacatgccaggcttcatcgcaaccattgtaaggaagtcattgtatgaagaagggcagacatgcagcttgctaaactgacggcgtggtggacgagagtgaccggtttgtccaatggttctgacgcctgtcatgtcataggcagacaaccacgctcccgttttgcacctccttccagcggagtggaggtaggtatgacccatcccatcggagggtcattcgaacagcagccattgcaaatctccgcccatttatgaagggatgacagggtgatctccgaggttagacgaaccaggacggctggccacactcaagaacaagctgtgttttagcttccaagagaaggcgagccaagttttggtgaagataggatgggtccccacccaaaagaaaagtaggtagaagtggagcatgtgggatccccttgagttataaaaggaggaccttgccaccaaaagggggagagccgaagaaaaaaggaggagggacgaaggaagacaacggagagaagacctgagctctctagctctccaactctctgtaattccttcacacacagatccaccagaacacaggagtagggtattacgcttctcagcggcccgaacctgtatacatcgcccgtgtcttgcgcgttttcttcctcgcgaacattccacagaccaagggcttagaacctcactcagcgcccccggccgaactggcaaaggggggcctgcgcggtctcccggtgaggagccccacgctccgtcaaaggagtattctaaacggtaaatctaattggagaggcatccacatgctagtactttagaagttttggttgctattaatctattgagcaagtaagggaaatattcctatcatctatgctataaaattttctcttaaattactcatccgatttagaatccgattacaccgatgtgttcgtaataattaaatatttataacaagatctcacatgattatattttgatgaaaaatcacaaattacttttatgatatgtctaaattaattttagattttactaagttactttttagacatataaaagtaaatt

SEQ ID NO: 27347 - DNA, 7020 bp, Oryza sativa
aatttctagatagagtcatgtttttatctctacaacggatttacttcaaatgacatgctaaagttaccttcgttttgtcctaagttacttctgtaatatatatatatatatatattacttttaggttttactgaatttacttttatatatctaagaagtaacttagtgaaatctaaaagtaatttagacatatcataaaagtaatttgtgatttttcatcaaaatataatcatgtgagatcttgttgtaaaaatttaattgttacgaacacaacggtgtaatcggattgtagatcggatgagtagtttaagagaaaattgtatttgaagtataggtggatgatgcctcttatagatggagtgatagctagtttagacaaaccagctaccactagctgtatagttacgtcctattctaaaatatgtacgttataccttttgtgtcataaatctagccaaggcaatacacatgggccgccccggtagtcataaaattattgttagagtcagacttcaaaaaaaaaaatccaaaatggtagttctatcaattcgcctattactgattataaggtaactcaaaagtaatttagaagctcttaacgacttaaaaactaatcatgaaagacaaactatgataaaaaaaattaaaatatactctaaaattaagctccaaaatcaattattttgttacacggctgataaactaatgagcaaatgatagagcaataccataagtatatagtataacgaaagaacgtactacatctttattgaacgaaaataaagcggtgtatacattgttcacacagagagtcggaaaaagataaatgggtttgggttacatttatttgcacactcatcggtgcatacagatactgcaggtactcgtcatcaagtaaatactaatatcgagaaacaaattccttttaaataaacaccacatcatcgattaattagttatcagacgtagcattcatagagtttgatgtccatctgcagccggaagtaggtgaatccctcgaaggcgtcggtgcggagcgtggcgacgccgcgggacatgaagaagtcaccggtgccgcccacgacggagatgtccctcatctcggtgttggggtcggcgcccatgagattgagcgtgccgtggtgcgccgtggagttgaacacgacggtgaaggcgaaccacgcgtcgaacaccaccttgccgtcgtagaggtagagcccctgcgccctcaccaccgtctcctccagcgacggcggcagcgccctcccctccgtcaccgggtcgttgaacaccaccatcctgccgaagaagaagccggggttggacacggcggcgctcagcgccgtcggcttggtggccgccgccgacgtggagttggaggtgctgttgctgtagtcgtagaggatgtcgtggaggtagagcctcatctccttgcacggctcgtcgtagctcctgacgagcctcctgccgccgctgcggccgccattggcgacgctcgccgagctaaggaggctgacgaggaggaagatgaccgcggcgatcagagatggcttggaccaagtagccatctgtgtgcctagcttggcgcgtagcttgcagagtaatgcagctagctaagtagctaacaaacttaacaatttgattagcctgtgatccatcagctcgagagaattaataagctaaacgcatgcaattaagacagtacgtgttgctgtagcttaataattagctgatgtgtggagctcgagtttgcatgcttatttatatatagtgtccttgtgaggagtggcagactccgagctagctagttgttgttaggatagaaaggggaagtaagacgaccgaattgtttattctcaattccgagttgttaggatagaaaggggaatcaagtgagacgtacgcaaagttagcactgatgctgatccgtcaaccgcatacggcgcggctcccctcccctgctatcgagatccggccctccctctccctcctaatccagccggacggggagggcagcgatggtatagatggtcaaatgggccgtccggccagacacggctcaaccaacacgccagaccggtccaggcttgtccacacgctgcacccctagcttagacacgccaataagactcatgccgcatgtcgggtcggtttaaaggcacgatagcccatcgtattttttcataaaataaatctatttttcctcccttatctatttggttgtatcttatatgactagaataagtctattttatatccctcttctctttgggcagtgccttatatagctgagtcaagtctatttgggatccctcaactatttctctttgtcatgccgagccgtgccgagggagcagcccaggccgggccggcacgggcacgaccccagccgtcgggcctcggaccaaatggccatctataggccacgggtggaggtggtggcgtttttttatttgttgagattgtttttgccggcggatggatgttgcgcctatgaaaagattttttttttgaatgccaccgggggggaacttctcacctgaattaaaattaaggaaacatcaaaactgtacaaaccatacaagaagaaaagaggaagcataacagagcgaaagaaaagacgaaagagagagagaaaacaaacaagagagattacataaggtggagaggagaggagaaggatgcaagccaagacggaagaaccgcctggtcagccagcttgaaacggtttgcccaaagcttggcgtcgttgacgcagcagcggagaagacggttgatggatggtgcaaggtgctggaaaacaacttcattacggtggttccataagcgccagcagcacaagaggaagaaggtgctgtttagtcgttctggaaggtctccagaccagtggatggtgtgaatctcactcagggaggttagcatgtgtagcacttgaatcaggccccaggaagcagaagccagggggcaggcaaggaagatgtgatcagtgtcttccgggcaggtattgcatagctgatatgttggggaggggatgattgacttcttgtgcaggttgacagcagtaggtagtctgttcatagaaattaaccaaccaaaaaatttaactatcggaggggctgagctcttccccagatgaattcctagggtggccaaagttgctgactttccatggttttacaataagggcttaagttgatatcaggcaactgcggcagctgattgaactttgtattgtgtcttggtcttgtgagagtgggaagtcttgaagtaggtcttgcagcagatgcagttgttgttgagccactgttgacagccttgggacaaggggtaaattaagcccagcgtggagcgctgaacgaaccgtgagatgagtagttgtgttgtgagagaatagggctgggaactcaatcgagagaggtttatcagtcagccagacatcaagccagaagtttgttcgacagccatcaccgattttcatagtggaatgagctcgaaggaccggcagaagagtgattagagtgtgccagtgttgtcccagatcggctgagccgagagcaggcgcctatgaaaagatgtagaggtcatcttctaaagtgatttttgcaggaggggttagtggcgaaaatcgtctattttcgtaagccttgaagtgcaaacggggtagagctccgcatggaaaaatttttcttacccgtttgcaaaaaaaacagttttctagtaatgatttgtattagttataataattagcacttcactttcactaccaggaagcttaatttagtttctttcagttggagaatatgtttgttactctgtaccccttgatacacatttgttacttatgtatctctggaacaatacgtttgttactctgtacccatgccatcgatcaaaatcctacgttcgccactgctatcgccggttcacaaccaccgcaaatccggcctgcagccttgcgaccgacgagcgcagcaccgttcaaaccggtgaacatagtcgtctacaagtactagttattagagtttaatcagtctcaaaacagcactgaacaatgggataaaggggccggcagtaggggttgtaggcgtttaatttttcaacagcatcattttttgctttacgaatgccacagattctaaaatctactaacatgacaactcagaaagctctgtgcatctttatcggactaattaaaaatgtgagacattttgcagagcctttagggaattaagaaataaattgagttggtgctatatactgcgcaggcattttttttatgggaaaacacaggctttgccatgtgatcctccgacaagtgcgccgtattaggcaacaagctagcttagcagcaaatgcaagctggttaattggttaggtgaccaccaattaggaggagtagtggcattacttgttggcttcaatttataaattcgcctcgattaggtccctttttctctacgcgttgcggacaatctcgagcaacaaaatcgctgaagtattcatgctcgtgtttatttctcgagaacgaaagaagaaaaaaataaagacgaggagattatacaaatctcaccgagaggcggatggcacgtctcaccacgcacacggccacgatccatctttttaatttgtgggctacagttgacacggccccaactagtagttctctatatgaatatctttaacaaatccctaactttacactaataaaagcagatggaatatactatattcacaggagtttagtattagtagtaactgaactgcaatataatctgcactggttgacagagagtggatatgcttcatgaatcgggtgtgtagcagtagtagcgcatgtgtcttgcgtagccacgcacacgtgcatcacgagctccatgtgcgtctgcccgctttctacgccggtactacgtgtttctcgctagacgcctcaacaactcatgttttctagacgcctcaactgaagcagctgatgcacgcgcgagagagatcaccggagatgcaacgcaaccaacaacaacaaaaggggctgtttggatggtgatcgtactttgccacatcaaattttagccgtgccataattttttagttagtgtttagttgagtgctacgattaaatcaaagtggccaataaattattggccatattttgagtagctttaccacagttataataaatggagttatggcaaagttagtctccatccaaactgctcctaacatattaaattcgggcttcgtcatgatctcatcccatccaaccccgtgctcgccaggaaacatgcagtacaaaccacttaaaccgtgaaaagcctgaaaattaccattaaattctgaaaataacttctgagatttgtccacgtcatttagagtaaaaaaatatttctggattcgaccacaagtaaaagttttacttttaattatgtgaaccaatctcatacactcatttctaaatccaactatattttcgggatgttcactattgtacgtggtttgtatcacttccccccatcctaaaatataagtattttttagcatagtgagtcaaatattttttaaaattttttgactattaataacaaataaattaaaaagatcaatcacgtaaaattgatgttactatatttatcattaaacaaactatcataatatgtaaattttttttcatttaaaacatcttgattttatagatattgttgatcaaattagcgtatcgaaaactacgtcgaaattctaaaatacttatattttgtgacggggggagcaacgtagtatattttttccatgctcaccggctgcggagcacggcgcgcgggagcacacttgagtcccgcgtctcgtctcggtgccagaatccccgcgcggacggggcgcgacgcggtctccggtggtgccagccgcggtgaccacataatactatcgcggtcggctcggctcggcctgactagtcgatcaacgaacccaccacaccagcggccggcaggaatctctctctctctctctctctctctctctctctctctgtatgtggtgtggtggtggttaattaactgttcagtcaggggcagcacagccacaggttgctgtagtatctatcacaggatcgccatcacgacacaattaagacactgatcaagtgactgcagatggatcaagtgcatatacaagacgcgagcgatgggatccatccatcgagcccactgtgggcacaggcgacggcgattggttaattgattttctactgctgtcgtccgatccaatgattctggttggagtactaattaattgactgctagtacgttctgtagatgatcatgtggtgtttggagccatctaacagtccacgatccagctgattcttggaagggtgtttcctttgtttatactggttgttgtaccaaatggttttttttaactgcatgctacctcccgcccccgggtaactatcaatcattcgttgatactacaagtgaagtgagtggctagaagtaaaatgaaaaaaaaaagaaaaacagtgcccttttggctatacaatacaagaaaaaacatttttatgcgacttttgaaagagatttgggagcgtgagacgaaatggcctctcgatcggaactgacgagtagaatcggagtcaactcatcgcccataagacttttctaccgggcgatttgaccaggtattgaaaaacttgacaacacgccagtggaaaatcaaacgagctcacacacagagtaaaattcaaagatcaaaatttcaactttcccttaatttccacatccttgataagcccacattaaaaaaaaaggaaaaacataacaagttaaacacgcagttaaccacaaataacgagaaactcaaacacgcaggatttttcacattttggtccttttaaaaaacttatttcgcaaatagacccctgaaaaaatttatcccaaaaatggtcctttttagggcgccagagtggctggcgccgtcatccaacgggacggcgccagcctgccaccgtggcacatgcgaaccgacgtg

SEQ ID NO: 27348 - DNA, 12651 bp, Oryza sativa
accgccaacgcatcctcgccatgaagatcgacgaacaggtgaattaaccttgattgattgctcatccgggttcctgttcctttgcttggccggctggttaattaatttcttgctcagataaagagggagatcgccacgttgaagctgctcaagcaccccaatgtcgtccgcctccacgaggtgagcttcgcaacccacagagtttcagcagaaatcctttcttttgtgttttttttactctcttgctttcttcctcttgctgttcaacgcctcttgcgccattgatgttgccgtctgaactcctctccggctgcgatatagcactaattttttttttaacttggctgctaatacctctctttggataactctcccccttgtgtgcagtagaataattgtcctttttactgtttcttgacctggacatctgcataaacaattgagcacacgaaatgaccacccaatatgtttttttcctgctcatggaagtagtaggacaaggcaaagggtctttcagtttcagcaagcaatattatttccctttccttttactgcgctcttgcttctcggagtattttagtcgggtgatgatgcgcccgtgcagacttgggtttatcagattcccctgcagcaaaaacaaacttgggttgtcacgtcaaaccctgcgaatctcatcacggagaatcgcccactggagcattggaatacttgctgatgagatcatgtggctattaggagcaaggttcatgtgccatctgagccgtacaatctgatgatccgatggccgtcgttgctctacatgctctgaagcctgcctggttaagacccaatccagaagccaccaaaagagctttctgacgaggttggccgacatcacccaataatcagagcgatcttttactagtcacttttaggcaactttcagtcctgcaaggcagagaaaacacagaaaggctgcacgacatgagcccaccacagcaatacgtcatcatatctataatgcaattcagaagggaaagtgttaaacgtggttttggtaccatttttgtaagtgttaggttcaccgaatgattgcattagtggataaatgtccgtgagaggcttacttcttgcaagcggaagattagaaaatggagctcctgactctaaagcaaaaacatatgcgcaccagtgtgactgcccaatgatttggtactgcccaatgatttagtagagagagagagagagagagagagagagatgttgcggctgttgatcagatctctgcctcccgattgttcattaaaccttgtttctgtaggagatgcaattgacatcaagaattagctggggctaaattcctccagtgaaaaccttccccctatccgtccaaacctgattccctgaaacatggaattaatctttttattgttgcagtttcagaaatgtcaaaaagaaactacttttcagttgtacacatccacattttgtccttgggaagcctgagatagattactggtttttcccctgcaggtttcagctagcaaaaccaagatatacatggttcttgaatatgtaaatggaggagagctattcgacaaaattgtaaggattttgcttctcattttaagcatgcattaatgaatcaaaaacaactgattgtgattagggttttacacaactctaacaatctgttgatgcatgacaggcattaaagggtaagttgtcagagaaggaaggaagaaaactcttccagcagctgatggatgctgtaagctattgccatgagaagggagtttatcatagggaccttaaggtgactacacagtatcactgatctatctttttcatattttaattgtaagcaagaaaataaggactgatccaaatggaacacacgattaacatatgctattttctgtgtcttctgtagccggagaatgtcctagttgatgcaaaaggaaacataaaggtttcggattttggactaagtgcccttccacaaaatcaacgggtatggaattttctcttacatcaaatcagctgaataaattcgttggtgtctaaaataaggctccaatttcagaaagatggattgttgcataccacatgtggcagccctaactacatcgcccctgaggtaagaattaagcattcttaaactgaacctattattgtttcacggtctttagtttagtgcatatggaggatgtagttctgacagaggtatatacaggtccttctcaacagaggttatgatggctctttgtccgacatatggtcttgtggggttatcctatatgtcatgcttacagggaatcttccatttgatgaccaaaatacggttgtcctttatcagaaggtataaagcaaggaatcaaagattacctcagcaaaaatttggctaattttatttggctcaatatctcaatttaattttgtatccagattctgaagggggatgctcgtattcctaaatggctttccccaggtgcccaagatatactgcgaaaaatcttggatcctaacccaattacacgcttagatataactggaataagggcacatgagtggttcaggcaagattatactcctgctatgcctttcgatgatgatgacgacaacaatatcagtgatggcaacctacatatgactgaggtaacccaacgttaggtgtactttttgtttgccatataatccattgctttaactgaatggtatagattgaactcaatctgtgttctctctcgcttttttttttcatggtgaagaatcaagatattgaaaccagcccagcaatcagccaaatcaatgcattccagctcattgggatgtcctcatgccttgatctatctggattttttgagaaagaagtaagtttgatctttctttcttgaccctatttgctaattccttaactaacacctacattaaatcctagcctgctagccaaaacagacacacccaaaggtcaagtaggccgtaaatggaagggtcccatgtgaactcatcagaccataaatcatgaaataataagttagtgaccagcaatttgacaaagccatggattgttgtcttatatatccgatgtccctactgagacctctgctacgttaatgcccttaactcagacatgtgactttgttacaggatgtttctgaaaggaaaatcagatttgtatcaaattattcccctacttctctatttgagaagattgagagcactgtcacagaaaagggtttccaggtacagaagaacagtggcaaggttagtgacctcagatgtatctacctgtaatattaatatgagctatacttacactgctcatgcatagatgttaaactgaaacttatgctatcatgtactacagctaaaagtgatccaagtttgtaaagaaccagcaaatccaagaggacatggaaatttattgatttctgctgaggtacttctatcacattgaacatccatagcaataaataatcaatagtgtgcaatgtgccaatgtgtttctgttaaacatccatgattcttaatattgatgtactgcgttttcaggtgtttgagatcaatgaatctctttatgttgttgagctaaaaaggtcatctggggattgttccctttacagacaggtatttctccctcccttgctgaatcagtattttaattcattttctgatggaaaatttaaactaaattattttgtcctagagcattgttcttacttctcaaacttccaatatgcaatttaacatatatggtattgtttatgttgcagctatgtgcgtcactttctgaagacttgggcatatgcaaaaggcaacagcttttgaagaaagattctatgagacaagacctttgtcgatataacagtagcttttgataaaagggtctctctagcttttagttgtgaaggctctagcatttttaacaagagcccccaatacaacgacgtatgacacagttttgtaaaattaaactgtaaatacaaaacaatccaattgtacaccgaaaagagtataccgatcatccaagtatttcctttaggagttcattagtttgtgttctttttgcctttactggtaaatcgctacctcctgggcaaattggctactgacagtgtataaaagtatgatgtagacaatctaagtgtacataaatagttacctcatcttgtgttcctttgaagttatgtgttgaatgtgtaagtttgtgtcttgttttggtaaaagcatgttaagttcaccagtaatccttgcatgagcactgcccttcactgaaatgatggaaacggttccggtctctaacaatcaacttgcgatcatacaccaaggagatcaacttcatagctgaatggcaatcttcacaagctctaagattcttcgttattcgaatagttgacctcgcaggggtagttagcagcgcaaaagcaatggccagcttctcactatgttcagccaaggagcgttccttagattgctcatcaatatcttgcaataccaaacctgtcataggcttataacctgcttgttttaaccgatccatcatctcttccaacactctgtagatctccttggaccttggatgcaatctatcaccagagacaaactcatgaatcttttcatcccattcaattgaacttcttccaggaatcctctgaatattgtcccttctaatcgtcttcctcatttctgcaacaccttcccaagagtttgcctgtgcatatatatttgacaatagcacatagtgtccatcaccaagaggatccagaactcgcagtttggccatggcttcctctgcaatctccacattcttatggatgcgacaggccccaagtagtgctctccagataattgtgtcgggttcgaatgtcatgctcctgatgagttgtcttgcctcctcaacatggcctgaacgccccagaagatcaaccatacatccatagtgctcaactgttggctctataccatgaacttcattcattgatctaaaatacttcttgccttcgctcacaaggccaacatgagtacacgcgataagaacaccgacgaaggtgaccccattcggtttcatcccttcagatatcatcttcgagaacaagctgagcgactcatggccaagcccgtgattggccagtccgataatcattgaactccaagtttgcacatccttctctggcattctgtcgaacactctctgtgcactctcaatgtcaccacacttggcatacatgtcgatcagagcagtgccaagcttcaagtccagctctatcctgttgctctccacgaagcggtgtacctctgcaccaacggccagcgctcccaaatcactgcacgccgagaccacgctcaccaaggtaatgcagtccgggatgatgctggcggcgtgcatctcccgccacagctccagcgcttccttggatcgccggctcttagcgtaagcggagatcatcgagctccaggagaaggcatccctgtcctccgtcccgtcgaatatctccctcgccaagccgacctcccctctcatggcgtacccatggatcatcgtgttccaggacaccaagtccctcatcggcattccgtcgaacaccttcctggcctccgcgacctcggagcgcgagacgtacgcagcgagcatgacgttgcagaggaacacgtcgcgcaggggcgcctcgtcgaaggcgtcccgcgcgaggtcgacgcgccccgccttggcgtacatctcgacgagcgcggtgcggacgaagaggtcggcggcggcgaaccccgacctgagcgcgcgcgcgtggagcgcggcgccgacggacacgggcgccgccgcggacccgcacgcctggagcgcgacggagagcgagaaggaggtggcgaggagccgcggcgcgcgcgggaggagcccggcgaggaggcggagggactgcagcgggaggctcgcgcggaggtaggcgcgcatcacgccggtggcgtagagcacgtccggcctcgccgacttctcgaggcgcgcgtgcactgcctgctgctccggcaacgccgccgtcgccgccgccgccgctccccgcttgccgcgcatcgagtcgagagagagggagatccccccctagtttgtacatggcgttttaaaaaaacatcaaaatatttgaaaattttaataagataaaacaatatgatatataattccacgaacatacaagttcgaattcggtttatataattaaaaacaaatatgataaatttgattgttatatttattgtcaaatttatatttttatacttatatataaattaaatttgaacatacatatttgtggagtgatatattacatattgatctattttattattttataaaaacgaggaaaattgctatgcacacaacatgtacaactaaaattgattaacggttgtaaacggttgcaatgcatatgaacatattcttttttattgatctatgttgtactccttccgtttaaaaaaatccaacctcctactacgatgtaaaatattttatctatgtccagattcgttgtcacatcctagtacttgtttttttacgaagggagtacgtctttagttgtactcgaaaaggagaggagagggctttagcaggagctaagcagttgcgtgagttaatcccgcactctgtataatgtacagctatagtggttcttcgttttccttttatctctagggatttgtattttctcatactctatccaatgaaaaggcactccgttcaaaaaaaaaaaaaaagagaggagagtttcccggagagagagaaaggggaggcaaattgctcgggaaaagtcgggtgcttctcggccgccagatcggcggaagcgatatccgacgggtataacgccgccacgtagtcatccgcacgaggcaaatacgtggagcggcctcggctgctgcttcttccattcgctttcgcctacccgccgccgcgacacggaatttcaggcggcgccgctcgccggagaagtggtcggcccccgtcgagagggagggttagacagggagaaggagaggatgaggagcagcgaggccatggagctcctgggcctcccagcgcacacccgcccgtcgccttccgaggtattcatcttctcgattccctctctcgccgctccaccgacgaatctccaaatccgatgcttcttcctgggggttggtacggccttgattaggtagctcttgctcggaagaagcgattttagagctggattttggcgggacggggtgccaatttgagaacctgattgctatgcggttgggagttctttgagtttgtggtggtgttctgaacctctgaagcttttgattcaggttaaggctgcgtataggagaatggtgatggaatcgcatcctgatcgtgtcccgacgcatcagaagtctcaagccgagtcaaaattcaagcaggtcaggtacagattgatctctgatcattgtggaaaactcctaggccatcatgtttttcggtttcatggtgacggtgtgcttcaagcatgaactttatgatatgtgctttccacaatcaaatggccgatgtatgcttgtttttgtatcactagctttccaggacttatcataaacatgtatgtatatggctttgcaatactgcacgcggaagaatttttcatgtctgcatgataattagcaatactaatccgtttccagttggatgaatctgaatgcggatttaccaaatgagcattccgtacactttctgaagttgataaagtgtgagttttaacgtttcgtgcttctgttttttcagatatcagaagcatattcttgtttgaaggatggtatgtcacatttctgctcatctaaataatcaacgcaaactcattccctttacctatattgctactcactcaatcgcttaccaatgagatttttttttctttgttgtcgctgttttcaggaagaagatatgggagtaggatggaaggtaacaaaatcaatttcatgaacacaaaatttgctgttctttgtggtagctaatgagattcatcatcatacatgcagtacatgtgatgaggtctggtgttccgacgggatttggacgatcaaataagacattggttaaagccccttttctactcataatttttgcagcggtttcattgggtggattcagcgcttcaaggtaattcaaagatcccagagtttgccctctccattctgtttttatttctgaattgattgaggaatcaactttggttttttgaagagcataccagcggcagaagcaatgtgttcctctcagaatccatttcttccatagagcaaggcaattgtagcatttccctattgacaagcggagcagagttatgtgtacattgtaaaacaatcatgctgggaacagaagcaccaaatgcaagtcccatgtacattgtaaacaatcatcaagtttgtgaataaaagcatgagttgctctttgtggtttaccatgatagggtgctattatttttctgcctgtgccaagacagttcgtgctataaaacatgaacacataacagcattcaacaagtaaatggtctactgatgatttgtcaatttagtgatatttgttttcaacttggcacttttgtctccaattggtcagtatgacaaatgaagacatcaatactactcaactagcaaatctcttctagttgaactgttcatgattgcgacccaattgtcgtgttttcatttttttttcatcgtttgttcgactgctgataaattgtggaaacataaaggattgtgttcttgccgaactacgatgaaaagacatcaaaagttaactctaaatttaagttttaaaatttaacatattggttgtgactaataatccaacgagcaaacgatggacatattcagatatacattttgaactgaaaatatttcatatatagtgaacaaagaaagatcattacataaaccacgctgcaagtgaggtacaaactcagatctattgaagttgctcgtgctcatcctacagggttgttagtttatgctgattaaagtactgcatctctcttaaacacaaggatcaaccggaactccagcatctgtagtagcaatattaactcattcccgcattcctgcttgagttgagtgtaagtgttcgcagaacggctggattacattacacgagatacaactcatgcaaattatagtagttgcaacatgagaattcaagcatctggcagaaccagcggccgttaagagcctattcgcaaatcctaaggattaattactatgaatgctattcgattcacagaaattttcctttccaagttgttgagagaaaacatagaaaattttccatccactcaaacctcatgaaaaaattcctatggattgaagtgtgcatccattaattcttatggattgaagtgtgcatgcatttatattccttcaatattcctattcctatgtgtcgaactccaaaacgaatagcacctaaatagatttacaagaaacatgatactgataaacattagctgattcccagccttccccagcagagtaagccgacaaaaggataactgtggagacaatgcaagcacacaacagcacaaaacgaatatgtacataaatcatagcaagtttatagttccatggcacgctggcaaggttaccaaggcagctctaagcctctaatgcattactgacaatattgacatgtaccacaagccatagcaggggtagctttgtatccactcgaagactcagacacattgattaaatggacagcaaaggatctctgaacatcacatggttcattcatcgatccattcgtgttaagacgaaggggcttcaacttcggtactccattgaactgaacagcttgaatagttagcatattctggtgccactatggcagatttccacaaaatagacaataatattttgagcagatcataacctcccaatatcaggcactattatactgcctgaacaaaagatcgttgttctgtatccattttgctgattgaagaaccactggactatccttatcataccattaaccaccacctatgctgttcctggagtactggaagaaaaaccagtgacagtttgatcccaagttcccaactaaccactaagcttaaactagtaactatttcatctttagaagaaaggtttggcatactgtagatgcaccatcatactaataactttcaccagagcatagcatttgaagaaaccaccagggcctcaaattatccatctgacatgagcagacaaatgtaccaaggctaagctttcccaccagcacctgtcgtggcatcaaccactataatgttaaacgacaacggctgccaccctgaagaatgcggcacaaaccacttctttgtattgattatgatatacaaaatctgaagaacttcaccaagggcaagatgtttcaagcattgattctttaagacaattgcagcttgatacctgcaaacagaggatattgaaacaccataaaacagaattcaagaaaaagatacagaggattaacacatattgatgggtgtcaggccttacttggatctagaattctttatagcagagctgccagaggtggaagatatgaacctatgaacagcatcaaacgtatcttttggatattttgcatttatatccattatattcacacatttccaaagattttggttcttccccaaatagaatgacataggacctaacattttcaagacgatggcttgatgctgaatggcaagttcaagagccttcttaacatcaaaatttggtaagttagcttctccataacgtatacaatctgaaatatgctgttctattggtggaatcttctctgtcttcaatacttccaaagcacctaatatatttcttataagaccttgagggtcagaagatggctgtggatatcctgggttcactccccattgtccagcattttgcatgttgctgggcatactaggtggtgttggaggtctgtaactattataagcaggctgaacattatgaggagagccagaatggttagggtggtagttcatgttcacaccttggttgtcatgaattcctctggggtatccagaaatatttatccgattcaaatcaggataattaactggtgggctgtgatagggaggggcacttggccaggattgcagtggtgcagtaggagcgccattatgcccagctgatggtgagcatgagttggttctttgtgaactcaatgtatgatgaaaaatctcagatccactatgaggatgagtaattgaattttgtggtcttggagactgggaggtatgaggtttatgatgttttggattatagccaccaccgttgccagagtcaggagtaccattcttcgcagcagattccgctgaggcaccagacttcttactattgaagtcatgtggagcagtcttttgatggcaatgagcagattttgcaggctttttaggcagggaaaagggctgaacttttggtttacttgactggttcacctttgccccatcctgtgattcagagcttgatgatgaagatgacgatggcatagaagactgagttggatggtcagtagtgtattctttagaattatcagcaacttcaactgaattttcttcgttgcttgctggtttagatacattgtctgactggtttcttcgaggttgcttcactttagattgcttatctgccttgccattaccacccttttgatgatcagactggagaccattctgagggtttgtgtctgtagtagtgtctgaagaatctgaattaatgttcttagacttatctaactcaaccatattgccacttgctgtgctactaacatatggcgactctgctagaggtggttctccagctacaaggcttttccagagccaaacacttttcgctgcagcagtaagggcctgagacacatttggaggctgtgctagtagaatattgtaccgtctcattgtaagcttatgaagggcattagagaaatcccgatcaccagaaattaacaaatagtttgctggtggagggttgtcaatagcccagaacagcatgtcaactaagatcttcttatcacttgcatctttaatacctgccagttgataggaaacaaattagttgatatcaattctgtcattgtttaagagaaaatgaaactgtttaataatataagtcttgcaaattcatgaatctttttatgcaaaaaatttgcttccatgaaacaagctctagtttgcaagaataattaagaaacatggattcaaaatcagcacgcagctatgccaatgacatgtataatcgccaacattcagaagaatatctgggatgcaatatagtggttaaggctgtacaggtccggttaaactggattttgccaacccacacaggaataacatggtatgtgcctgtatttattccagtttgacaaaacataactaggttgattcacccctaatagtaataactcaaaatcattcttcaaaacattacacaaatcgtacaactgtggacctaagagaagatgaaaactcgaagacgcggttattagaaaacaaaattgacctagtctactacacaaagtcaaatggaagacatggctactagaggcttagaactttgtaacccgtagtatcatatccgcaaacacaatcaaaatcataacagcaaccagtacaaataactactgcagaactactg

SEQ ID NO: 27349 - DNA, 6014 bp, Oryza sativa
gggggttccgtttccgtaccggcggggacgtggttgagggagatgccggtgctggagagggcgtgggtgacggcgttgccgatgcggccgatgtcgccgtaggcggagatggagacggggccggtgtagccggcggcggcgagggcggagctcatgttctgggcgatgaggttggggtcgcaggcgcgggggacctggcagttctcgatgtcccaccacaccgacgtcttcgccgtcgcgtactccgccatcgccaccgccgccgccgccggtcgccgactccggtgatccccccctagggttcgccggcggtgaggtggggggagtggggggctggggtttgcgggcgtggagaggattttttattggttttcgacggcggcggcgtcgaggtggactcgaggagaagctattcttttgattttttttagataaaaaaatataattaaggacgatatttgtatatggataaaatagtttggtgcgaagtggagagaagtataaaaaaaacatatacacggatatccgtacctggatttgttttttctaatgcggggggagtaaagttcaatggatacaataagatctttttacttatgctaagtcaaaatttaaattttaaaatttagttttagagttgattttgtgattttttttataatgatttattttacagtatttgtttttaatcgttaaggacacgtatataaaggttatacgtataagttattttctaattgctaataaacctgtcgataagcatatgaataagcgaaacgattgcaccaaataaagtatttcctttttgaaatttagacgtacgtttttggaaggcatgcaatcaaatttgtgcaggaatccaaaccattagattttccatgcacacattattgaacatctgtagtagaatatatgcacgtggattttcattattactaaaccattttaaatttttgattctaaaaataaacccccaaatttattgaaaaagtaaactttttttaccacgccatccgaaggggagtagcaagacaatgcaaaggcagggatcaggatcctatgcagttgactgctccgtgctgttatcactgacatgtgataaatgcacggtaaagtgactgcagaggatctcatcaatccgcaagggcagtagcctaccacgtcattgcgggtgccatgtcatgggtttttttactggtgccaattaaaatagtatgattagagatgtttaaatatagcaataggtttttggatgggtttttttcaaaaattttaaaaagtgtttcaaaaacaatccatggttgttggttgctatctgttttctccatagaaaaggtaaaggttaatcatgacttgacagaaagattttatgtttttatacggaaaaagagagagcccacatagcagtgcgtatattcattcgcaaatgaaggctctcacagttcgctctacggctaataaaccatagaaaaataaacgagtcaactgaataaaaataatttatcggtgtaacttttattattctttgtattgtaaaaatcaaaactaaaatgaaaaattttatctgcaagtaaatctttttggcaggtacacagagagcacaatggtgatggtgcatacctaccatggaaagcaatgacctactatcaaaaggcgcagaacaaactgcatcatcaggacatggaaaaaaagcaaagctgcgtcatcgaaagctataatacagagtaaagtagtaaaaccaataaaagcagattgggctatagaacaggaaaatgcactactttaaagaagttaaatcagtgaacagctaaaggagaatgggccgatgagttaatttcttctcctttttattagaagaataaataaatgaatttagtaaaaagaaaacatggttacaaaaaaaatgatggaggcatcctttggaatagagaaattttagagaattttcgtatgaattaaaccaattactgtgaaatcctacaaaattcataggttccaaaagacttcttaagggacatgtgctggcccatgtagtagtccttttgcttagacaacaagaaagaacggcgtctgaagaaatggtttttgcagaaccgtgtaacttttttttaaaaaaagagaatcgcaacttaaaaggtttatgttccctcttcatgagagtgtacttatcttatgttttttacattgtgttttgtatcacatgaatgattaatgcgcaccatattgtttactatctcattgactcaagaaacgtccacactttgaggttttgttaagtgacgtgttcgtcgctgtctatcacggccctcgttctagcactggaaggccttgcctgttcggccgctccagtccccttcctcctcaatcttccgcatcctcgccaatggcaatggcatggagaaggagatccatatctcgtcctagtcaaataaagtttttaggtttttcctcaagtaaaatccttatagggttttagatttccgagataatcgagagtttatctttgtctatggattacggaatctagacaattattgacaagatagaatagatcttccctctgttggtcaagtttttatttaattggcagtatcggctttaggacctggtttgccgacatgttcacttatgccagttttctaactcgttggaagaatgaagacgatgatcgatgctcgtttatatggttttgcacatgttgaagttgatcgatgttgtgactgcactcatttgctcgtatctcttgtggtaatctaagatatagagcctctttgttctattttctcatattcttcctttcttgcttttgtaacaacagggttgtgatatatcctcttatttaatatatgggagaatagcatatttggtccttcaacttttgcttggagatcaatatggtcattgatatttcattttgttcaaactggtcctcaaagtctatctttcagtctgctatggtccttagacccaccagaaaacatcacgcacacataccgtctcacaatcttatacagatttgtcatgaaatgtctaatatacccttacatacaacataagagagaaaaaagaaaaatgtcacacacatttgcaaatactcaaatatatcgatttgtctatcaatacatctaacataatcaattttgtgtatatatcaattcttgggattagattaaattatctaatcatataaaattaattagttacagtatttcatatcacatacaaatggacagatcagacatttcaccatccatttttaataagatgatgacatggcatgtctacattacgcttctagtggacctaaggttcatattggaccatatgacaaagtttatagatctgattggaaaaaataaaatatcaaggaccatattgacctcaaagcgaaaatttagggaccaaatgtgctattctcccttaatatattttatcatgtttcgaaaaaaaaaacagaaaatagttcatgctttgttaactttaggatgaactagttggtgctaaactcaacaccaagcttttataacccctaggtgcatacttgatttgcaaaattccagaaccgacagcacgaggttttctccccagatcaatggacagagaagtttcaaaagctgcaaactatatgtagaacaaaagacattcacttgatgaagttagcttactactgataactatcaaagtacaatctgcaccaagccatgaagctcaacaagtacgagaagtatgaacaatgccatgtgcgtggcagaagaattctacatttcgctacaaggcagagtagagagagagagaaagagagagaggagacttgtgctcatgctgctgcaaagctgaagtgatgaaaccgtggcaactactgtagaaggttaacagctataggtggctggcacttgaaaacaatattccaaaccagcccaggaattacaagagacaagagcaacctaattaattacagagatggtatcaggacagggaagccttcaaggcaagggctcctccgaatctcccaaccgtgacaagtgcaggtaagcatcggtgcctaaatgacagaaaaggcaagactggtcagatcaacatatagtggattataaatctagaatttgtgataattgcaaaacaaagaaatacacaaaaaataatcagttaaacatggatggattgttcagcatctaattctataacaagtaattggactttgtcagcacataaaaaaacagaaaacctcagctaaacaaaggctaaattattagacattcacattggttagaaatcagaaaggaaatgaagtgtgggaataccgtatccttccatagagatgatttgcaggtcaccaccaaaatatcgagcatacaggcgactgattggaagaccatagccatatccagccatagttactccttcactagggcaatccatatcaggtggattctttgcagtgctatatagatatgtgaaaattcttggaaggccgctccttggtattccaccaccttcatcactaacctgcatcagcataacattgatgttgaaacacttaaatatcacttcccttattttatgaaaattccaactccctgatgtttcctcacatggaatatttctcaaatttattccaactagaatacattatatattgcaccaaaagattgagcaagatgtaacttctaacgacggaaagcatctgccacgtaaaaagacagtagcacctatcattcttgacactgaccagtttctagtaatgatagtaatgatatgccccacaaataacatggcagctgtacagaaaggcagcttgacttgcatcacataataacagtatatcaaataatgttcttcagctaattaaattttctgttcgtcaatattactagaaacaaatataccattcaatttgcatccacttcaaagataaaatatagcatctttcttactgccagattggtttaaagttgagacatgtcctgttcagcagccagcgctaattcttacctgatccttctgccagtcaccatccaactcaactaattcgatataactatataagtcagagttattcatatttgctatttatgccaagaatgttaagatcgtatgataaattggtgccagtggaacttccattacagtcatttgagtctaaaaacttgtaaaggtacaactcatttaatgactgctcatacccaggagctaggatgctattaataacagatgtttggtgatgtaatagatgaataccttgatagttacatcctctgccccatcagcaacgataattctaactggaggaacatctttatcggaattcatatatcgttcctgtactgcacgcaaggagttcttcaccaattcaaatagcatgagatgtagatgtgatgaaacatatctgcagtttacaaggttaaaggagttaacacattagtatgccaaaatttagtaggcagtaaaagatgaccccgaacaaattatgtcttataagaatagtcaaattgaacagaaaacaagctctatgacaatagaagaataatcacacaagatgcactaacagaaaacatgaactggactaaaacatggttaatgaagtttgaaaaaaactaatgttaatttatatcggagacttacggaaatgtaaaagttgggtctccatagatgtcaatctcaggagctgatccatattccctcaaacaaatagaacgggcatcttcactggcagcttgagccacctgtataggggacaattctgtattaatgaggcctatgacgccaggctctgggtcaggatcatgcaaagccacatgctgccctgaaattaagcaagttgacaataactcagaacaagaatctatcaataactagaactgcactcttatatgattagacaaattagcacataaaccaccatacgatttaggacaggttaggagataaagttgactaaaaaaagatgtcactgccggacaccaaatccagagttgcattatgacaaaaaagcagtgtcaagctgatgaagtact

SEQ ID NO: 27350 - DNA, 5883 bp, Oryza sativa
atcaatagtgcgtaaaagcgagctcgtcgttcctattcctcacttctggaaagtatctgatgtcgcggaaagagtccaagtaccaatcccgcaccttcaaatatggcgaacaaacccaccatcagtcccacaataagaaacttaaaatttgcatgaatgaattcagctgcgaaaattccttgattaaatatttactctgtgctgactccaaaattattctagtacaggcgtgataagatcaataagacagcacaacataaacttgaagcaaattaagaacccccgaccccactccaagagaacaaaattcaagcaagttggcgagcaagaatatctaaaattgccccccttatcctactttttttagaacacctttcgaatattaacaacacaaacacacaattgatgctgtgtcaagagttatcgactactacaccaatttcaaccaatacaaatcgcacattttaagtagttgcatgtggtagtgatgtaccttattcacactccactcccccagaattacctttcaaaaaaaatttcccagaattaatgataaaggtgatattctaataataacaaaacatgaaagacatcaaaggatccatccaaaaggcgccacctctttttagaataattcctattaaacatcactgcaagataagcagattcagataagcatgcaacggcataacccatccataatcaaccgagccacacaccgaaaactcgccattaattcatcatccatccacgggccaaaacgacagaacaaacaatcgccatgattcagtgtgggcatagagtaatatacatccaatcgcccaccaaatcatcaatcaatcaaccaatcgatcacaacgaacacacagagagatagagaggtgcgcgtggtaagtaactaccttgaggatggcgggcttgcgggagaggccgaaggggagggactcgagctcgagcgcgcggcgcgcgatccggattgggagctccttctgcaggaactgcgcggagagcagcaggttccgttccgtggggcgcgacccgaactccatcatgtagcgcaggctcacccccgtctgcttcatgctcccccacctccccacctcctccgccaccgccctcgccaccggttccgacgccatcctccccccacctccacctccacttttacctccttcaccggcggcgagatttggggatcgacgagcgcggcatgggaggccgagccgagctcgcgcgcttataaagcggaggaagcgaagaacagaggagaggtgtgtggcgtcaagaaaaataaaaaaataaaagaagaaaaaaattgctggattagcgctgcactggtgtgtcccggatagaaggagaggaatatggtggggcccaggtgtcagtgggagaggggtatcccgtgcaaggtctgtggggccgaggtgtcagtgggagagggtggtttactggtgtccagcgctaggtctgtggggccgggtgtcagtgggtggttggtcattggaatctgttgttagccacatgagcttatctactatgaattagtgggataaatctcaggacaatcgccccagcttaatcatgtgtttttttaatctatcgtttcgacatttccgtaatctttatccaaaagtatgttgtgcttagtgtaaatatgttcgatcagaatttccgaaacctcaaaattcaaaaagttctaattggatcgaataaacaagcattcctcgtatattaatggccgaaggaatatttttgaactaaattaggcctatgtttagagtacaattaaactttagtagagggatgcggtcatggtcgacgacgaagacgacttcacacggaaatttggtccaatggcactaccaggagaatgaatcttttttatgctaaatgaatcatttcatttatgctaatttactagtggacactattcatggaagattcaggccacatgctcattttccccccacatgcatgcacaacaccaccaaaccgcagaaaatgaccccaaacgattccaggcctcaaaattctccaaaatcaagaataaatatccatgggttaaatttttaaaattaaccatatcagtaggaaatatcacagtggttaagaatctttcagaaagagatatggctagctttataccataagttgtgatctaagtgacaaaggccattggagagagttccaggcatggagcgaggcaggatggccacaggtttggatccatggtggtggagagatccaacgattcggcgcaaagggagaaccataggttttgtttgtaataatcatcagtgtaatacgttattaccttcgaggcttaattcttttcggattatttatcgaattgttgaaacgaattgtttacttcacgtttttaaaaaaatattcatttttttgaatgaaaaaaactttcttctactatatttgctcagagaacttgttttaagagattatcaagtttatttaccaaaacaattaacttgtgtacaaaatagataaatcaaaaataataattcgctcaacgatctatttcaaatctaagcgtttagatcacttgattgattccaactgtaataatcaaggcgttgcttgctcggagagggcaatgatgtgggtcagaaacatcgctagctggtaattaactcgcccatttaattaacagaaatgtgacatctctgaaaccaaggttcactgattggtctgcacatagcattatatggctagagatatttgcaggagcaacattaatttgtgacttattatttcacttaggcccgtttgagttcacgacggacaaacattaaatgcgaacatgaaaaacaaaaaatattaacgcttgattaggtgagtttgaattattttaaatcttaagaaaatatatttatttgatattttaaaacaatttttggatagaaatttttcgtacgagatgtaccgtttaactgtttgaaaatcacgctaataaaattcgagtaaaatatgtattttaatcagaacagaaccagaccttatcacttatctgagcttgataaatttccgataaattagagtgttctaatcagttataattcgtttcatgatttagggcggaattattggcggcaacacgactatcagttggtacgactcatagtacagcggtttgtggtgggggctatggctgtggatggatggaggggaatctcttttaatttctctgtgtgacacgtcggtcggcccaataatgccaagggatgaagttgacacctctggatgaacgcttggccgccacgtttccgtctccttggtcatcacggattccagggccaattagctggctggttcacacgtagtcttccgtcgttcatgttggtcatattttaattacgtttaattacacgctctgtggagtatacatatatgccacgtctcctgtgaaacattgattaaatttcacaaaactatatatttaagataatatattacaaaactacagatttaacactgaatttctcataaaattatagatttaaggtagaatattataaaactacagatttagtaacaaaattatcgtggaactatatgtttagcatcaatttaattacaaaacttagatatttataactcaatcataacatattagtgctaagaatttaaaccccaaaacctatatctttgtgataattttattattaaatttgtagttttgtgatacttaatcttaaatctgtagttctgtaataatttcatggttaaatatgtagttttgtaatacatcacattaaatctgtagttttataataatttgatcaaagtacctgcagttttgtgaaatttactctgaaacattttttggtagaagcacactgtatacgcagactctcgtagcacacgtatactcactcatatgaacgtacacacgcacatcttactcatatgagcacctccgaaagactgtgcgagcatatcttgagattaacgaagtcatgataggcgtctagcacgaaaaaaaaattaacaataaatacaagcatcggcgtaagtctaggacttcaacttaggtagactgattccataaaaaaacataaccagttgagttacactcacttcacactttatgaaacattttgacgtgcctcaagccatcaaccagaattattcttgtaaattgtttaagcatgttcatataatttttgtaattatagcatcttttaaaatctacagctccataaaccgtagttatcaaacctagaaaataaaaataaactagaaactgggaaactaatacttcttgattctcaccaattacgtcttaaaatctcaggctcttcaaacaacacgtacgagctcatctctataaacgtgcacatgcatacaacgtacactataattgtcgatgagtgatactcgtaaaccggatgagttgggtattgatgtacattgtaacgaggatctatgtaatacgacatcaagcaaacagaagataaggattatactggttcaggccccttatcaggtaatagccctagtccagattatatgggactcatgatggaaaaacacagaatacaatggaagtagacgaattcgatgataccgacgagatcgtagtcgatgtattcgacaagatctcccgatgacttggctccgcgtactccggctttgtaaaccgtggtgggtgtgttggcgatgatattcgatgccttgtatccctctctgggggtcccttttataccatatatcatcttgatctccaagtaagactcagagacatcaaatcccgtacgagacaatagaaactctatcccctcctagtaggactttggaaatcacttaactcgtagggatattttctataatttgtagcggattcctacaacacatacggaaataacccgtgtacatgaaggtataccatatccatatattccataagtcgtagaataggaggtatgccttattcgtaatcatgacaataataaccatctctgaaaactgaaccagaatatctctagattgatgaagtcaccataacgccttgttatccatgtgtacattaccttaagaaaatagtcgtaaatatgaacactcgtcaaatatagaacttgaatattttaccataagaaatcacaccaattaagcgtgcacctccaaacaaagactctagttagtatattatgcaagaggagtgacacacgtcacacgcgtacagtttattaactcgaccggatggaagacaaaaatggttggaacgtacagtactagcatatactcgtgtaacggcattgaatatcgattgatctgtcacatatcattgttagtaacttttttgacaagtcgataagcacgatcacaacatctaaacgtcttgtggtgatatagagtcgccaaccacctcaatctagccgaacggccaaatcaagatgggttttaagggaaaacaactaaaccggctagcgaaactgaattagagatcaaaatcagcctctaggccgatttagatcgatacgaggataactacccgtctcgtgggcaaaacggaaggttttcaggacaaacctataaagaggtgtcgcactctcgcagcggcagcggacggtttatggcgcaaaccgacaaagatggactaaactagggtaaaatataaaacatagtaaaagaacgattcaaatagattgtattcgggggttttacaatgaaccggccttgtcccttaaatagggattggtcttgccctctacaggcccttctctatgcccaactcaggatagaaaccaaaggaaacacgaaacatgccttcccgagcaaggaaacccgagacccgacaaaaacagacttggactcggaccctgcccgtctgaccgctacatacctgcggtcagaccggccctacta

SEQ ID NO: 27351 - DNA, 2030 bp, Oryza sativa
agaccggccctactagccggtcagaccgcccacatgcctgcggtctgaccggccctgtgaaggaaacccgatactttccaaactttggcaattttcccctatttcgtccataggtgccaaatttgggtgtaaacacatgccccccctacctttttggtgaacatacgtgaacctaaaagtatagaacatgttatctcagggcgataatccaattaccagccataggacttcctaagtatcttgccaaatgctcgggaagtatttcttcaagtatttcccattaatcgctctctgaaaacaccgtcttgaagtatcttcatctcctttaaagtcttcaaacgcttgtcgatgacgtcttcaaaattgcttcccatcaaggtcttgtaatcttcaactgacaagtcgtcttacttgaaataccgaagagagccaagatttacctcaactggcaaaacggcaatttcaacaatgtttctttactcgactcggcttatccattagcctgagtgtagtaaagagaagaacttaacaacttaatatcataagattcagcaaaacttctttggacataaaagaagctcctttaacgtttgaggaataccgaatctatgaacaatatgcttcaaaataaagtcaattacctccgtacaagtaatattctcgagcggcacggcttcggcccacttagtgaagtaatccattgcaactagcacgaaccaatgcccttttgatgacgaagaataaatttgaccaatgaaatctaaaacccaacctcggaacggccatagtttaatgataggattcaacacagcggtaggcgctaattgaacattgccgatccgttaacaagcttcactccctctataacatttgaaacaatcatcaattattttcggccaatgaaaccctactctcctaagcagccaatttatcttacgggccgattgatgaatttcacaaatcccttcatgtagtactctcctagaaactttagattgatcattatctaagtaatactccatctatttttcggcgatataatatttgagcgcttgccgctgaatcttccaattaaccttaagtgtaggatctttcaaatatctaatcaaaggaattccccaagctatttctaactcatgggcacaaatgtccgaattcacaattaattcggccttttaatcaattgtaacgtgccccccagcctcctgtctgagatcggtcagaccggccacgcaatgccggtcagacctccctgtctgctcggtcagaccagccatgcagagccggtcagaccgccggtaccactggtcagaccggccatgcaatgccggtcagaccacccctggtctatgactttgccaatttcgtctaaacttttgaaatcaagcatcggcctttagtatataatttttcttcacataatagccagatgcttggtgtatcaaattattagaccaaaattccttctctctagacatatgaaaaactataacatccaactaacatgtctagatgaatactaattcaaatggcttttaaaacaataatcaccatggcatcaaaacacttagccaattgaaatatgatcaataatgaatcaccaaagtcatatgcctcacacacatgaattccaataaactacaaatgtaagtaatcggcttgagcatgtatgtaaaatattagcaatgccaatgtttctaaagaaaacaattgtagaataaatcatcacattgaccattgacattagccgaattactaaataagcaaaactttcatggtgtaataattataaaatctatatcttatatggtgatccataaaaacacatccaatttggctttaaataaatatcgaagactcatgagccaaatcatacttcaaacaaattatatgccaacctaccaattccactacttagaactggcatttacagcatgtatgtataatatcaattcgataagcaaaaacacacatgtgctagatagtaagcaatgttctaacatggcataggcatataatataaataatgg

SEQ ID NO: 27352 - DNA, 16711 bp, Oryza sativa
ggggtcctacatgtcattgaaataccgatggcatatctcaaactttgaaaaattataatggtatggttacaattttcccaataatataatgatgaacacaataaactcataccttgccttagaatctaacaaacggcggctcgaagatgtggtattgtatccatcgccgttcatcttctcttggttcccttatgagcatattaatgtcttgccccctaagcaaaatcggccttcttgatttcacgatttcgaaggcaagatgaataccgcactaacatccatagcatcatgtgaagaagacttatctttaatgaccgatgattcttctctcatcaaattgaatccatcactactccgtgaaatcaccgatcttttaacttttacttctttaggtctccacactcgcttaagtgtcgttcaaggctctaaattgatacatgttttgttctccacatcttcggcctccttttctttttgacctatggctcgaagacgctgtagcctcctcttttgagagcgagataagccagaaggtatccacttcagctgtggttgttttccaggagctaagcaatgattcttcatatttttggtcgaagtggaagctcctatgttgctctcaattttccctctcacctttaatgccccccagtctaatcggcctctgggcccggtcagaccggctgcaagccatcagtcagaccggccagtaaggtcggtcagaccggccgtagactggcggttagaccggccagctgtcttggttagaccaccaatgttgacagtcacggcggcggcttcgatcttctttgcttgcgtggtttccaccgcatctccagtaggtacatgaacatattgagactcctccttgacagtgacgacctccgaagctttggcttctttcctcacccacaccttcttcacctttttcacctttgatccaccggaccgattcttttgtgggaaacggtcttgtcttgagttagaatgacttggtattgtcctaggtgattgcttccatccttgatgacacggcatatgtggttgaggcatccatggaatgtaatacataaaaggataaccaaatgatgacattggatgtggataccatggcatcacaaccggaggtttatatggagttggtatagttgatggctccgattgctttgatgtttgaccaaatctcttcctacgagatgatcttggtcttttcgaatcactagtttggttatcaaatcgttgaccagctaatcctttcttgtacttagccataagcatctcaaaagtgagcttcggctttttagtcttttgggaactagatgacttatcttttgtaactttatgatcttcagccttcgcatttttgatcctattcttgggccgaggatccccaataataacacttttccctttctttttgccaacaccaatagaactaacagggagaggatcactaataattccggtcttaggcatagatgtaaccgaaatagtttcacaagtgaccgatgaagtatcaatcggtctttgctccatcaagcttgcatctttgaaataaccatgaaactcatgctccatttgtgaccatgtagaaattgaattaggagcaaataaactataccatgtagatgcaaagtttgacaaagaaagaggaaacaattttaacttaagcaaatcatcattaccggccttaccacattgatcaataaattggtcgatatgctccattgttgttctagcatcctcacctgtgaatttcgtgaagttgggcacctcaaatccttgcgggtatgggaccgaatctacgtactcaggatacggcctttgatatgtatgcatagctactttggattctatttcaccactatcccgcaagacattgtcatcatcttttccaacatccacatgaccgatttttgattcggtcttaggtgacaatgctatttcattttcgcttgtaatataatccgaaccatcacttagttcggctatattttcaatgatgctattctctaaactagcaatgcaatccgaaccattgcttggttcggctattccattattgtctaaattagtaacacaatacaaaccaacacttggttcgactataatggttgttgcattatcatccaagctagtaagacaatccgaaccaacacttggttcggatataatcgttatgacatcattgcacaaattattaacacaatccgaatcatcgcttggttcggctatacatgatattgcactataatctaagctagcatttaagctattgtcatccactcggctttcctgagccagagcttcatgcaacacatgatcaatatcaagaaatatttggccattcaatttctctttaatagaatcaagaaatccatcatatgcaatgttggccaaatctttgtcagttattttcaaactaaaacatcggcttttaatatatctaaaccttttaatataatcagcaacagattcattgtatttgtgcctaaccgatgttaaattagacaacctaagctcagtttcactagtgtggaaataatcatgaaatttttgttctaattgagcctaggaaaaaatagaatttgccagtaaaaaagtaaaccatgtaaaagcagtaccggacaaagataaagaaaacaagcgcaatttacatgtatcccaattatcctcaccatattgcgctaaaaattgatctacatgctcccttgtggtcctactatcctcaccactaaacttggtaaattcaggaattttataaccacgaggatatgggataatatcataaaaatcaggatacggcttttggtactctctagcacgattccttagctttgcgatattctccctgatagtatttctaaaccaatcctccacagtttcaggctttggtggatctggtggtgtatttggtggcctaagaggtggttattgtggcgcaatataattatattggccatacctagtatcggaaggatatcccctattagtatcattgtaggcattaggaatatgtggaatagcatgtctaacagtattaacaggtgatgaataataattaaaattagtactgctaatcgtggtatgaaaacctggaaaaactcccagggaaccggtctaaccggcccatggcccggtctgaccggtggtcagtggtgcggtcagaccggccacaggaggcgcgatctggccaggatagggcacagtctgaccggctatggtaggcacggtctgaccggcataggatgcggttagaccggtgtcatgaccgatcataccgttagctaggttttgcatatagccgattcctatgtaatcggctgtataatcacacattgacccccatagcattataagcatattgtataggagcaaaactagaagtagcatatgcatctatacaatgatcattaaccttttgaatagcaaagtatgggttgggcgaatcggaggttacctttggtgaaactacaacttgaggtagcgggacatttcctctcacgacgccttgagtaatattgttgaacccgttcccactcgtcatagttgatgaagaaattccttgattaatttcggccatatagctcatagtcgaaatttttgaccgaatagattaatatacggtctcgtaattttcgttgcatactactgtgtgtttgtagcaaaaatttacaaaaactgaaacttcccagtgatagccgatgcaaattgaatcggctttaattttttcttttttaataattcactcggtttctgtgcacagcaaaaaatatacagaaatcaatactactgctgctggctctagatagatcggctttgtacagcctgatcgttttcttttcagcacacgttaaacagcaaactataaataggattggatttctgatttttcagaccgtgtacagcgaggacactaccggtcgcttgttgctgtttccacgcgagaataaaaatcgattccggctgtatagccgaaacactcgattagatgggaaatcgatgaatcgatggcagcaatcagcttgatgaccgaacagtatcgctgccaaatagattgatccaatcaaaaatacgtggcagcagtgacgaattttgggtagattgatttcggccgtttggccgaaattcttgactcgccgaaacgaaaaagtgactagattaaacgaaattcggccgtgatatggtcgattagatcgtttcccagcggagtcgccaaaaatcatgttggcaacttttttgacaagtcgacaagcacgatcacaacacctaaacaccttgcggtgatatggagtcgccaaccacctcaatctagccaaacggccaaatcaagatgggttttgaggaaaaacaactaaaccggctagcggagccgatttagagatcaaaatcagcctctaggccgatttagatcgatacgaggataactactcatctcgtgggcaaaacggaaggttttcaggacaaacctacaaagaggtgtcgcactctcgcagcggcggcggacggtttacggcgtaaaccgataaagatggactaaactagggtaaaatagaaaacatagtaaaagaacgattcaaatagattgtatttgagggttttacaatgaaccggccttgtcccttaaataggggttggtcttgccctctacaggcccttctccatgcccaactcaggatagaaaccaaaggaaacacgaaacatgccttcccgagtaaggaaactcgagacctgacgaaaacagacttggactcagaccctgccggtctgaccgcctacatacctgcggtcagaccggccctattagccggtcagaccgcccacatacctgcggtctgaccggccctgtgaagaaaacccgatactttccaaactttggcaattttctcctatttcatccatagatgccaaatttagatgtaaacaaccatattacatcattgccgggactaacatgaggcatggagaatcgcacaaacatgcaactacgacctacggatcgatggcgcacgcatgtgttgttgtttgggatcgtgtcgcgtggtgctgtaaatattaattattgatcgaattcgttcgttagagaaacagctcgggatgggaattcccttctgtactactcatgaatctggatatttatattcaaatttatcattagaattagatttttatgagacgaagaaagtatgctactattagagagtccgatatggtgttcgcatgacctgcttctctgaatgctaggagatctagtgcgtgtatatgttgtaatggaactatatgaaggaattacatattattatcatttcaaatattaatataagaattcatgttcctcgatatattccacttaatagcatatgggcggttggttctttaaagataatggaataatacatcatgcctttattttagaaaaaagctaatatataatcacttattacaaacatagctcgcttaacatagagatgctaaaaaaatccaaacatgacgaggcaataagtctaaaaactccaacacagaggagaaattaatacatcttatttaattttatttgtaaatatctatccaaagttggtgaagatatgtgtgaccgttgactctaagttccagtatgtaatatgtattagttcattatcctcgtcatattttatattttttagttgtgcggtgctaatatattgccttggaaagtacatcatccatataagatttagttaaagatttatcaaaaccatattatttatactcaaccataaagtccaacagaaaaacatatggttctactaagttttttggtttttgagcatatcattctaaaaaaaaagcaggcacaccaacacgtgcgctgattttgattttatagtatgattaataacaaaccacccattctattagagaaagaaaaggtcaaacggggcaccgcaaagctacagctacagattacacgcaggccaattcctatttgatttaaggcaggaaatgcgtgtattcgatctgtttcgtctatctgacgcataagagctggatgagcaccgatcatcaagacatcaacgtgtgacagaagatcgatgaacagttgtacactactacaattctgcttgcctgtatttaggaacaaaagtataataaatatttgaaaaaaacattgcacgctatctacgtactgactaatattttttcttcttcttattttgcaggcatgcgtgccaaatgagaagtcgttatattagcttggatcaacgggtgggcatgtactggtacgtgcaaaagcccaattcatatttttgtactcgtgatttgtcatcctgatcagtaactactaactagaggcagcagcactacgtggaatccggagacgtgcagtgccagggcatgcatgtgaaaaaaaaaaaatgaagtgcacgccaaattgagcaaccttagccacgtgcacacgtggatggataacgcacgcctgcaagtagtatagtggcaaaattatgtaaaccatctcaattatcactcttgttttgtgatttaatccattacttattttgtttcaaaaacctactcacccaacactaacataggttgaaattgccttatcaaccctcccccaccaccccaacccgcgcacgcgcagtccaaattttttctaacttaaatgtgcgccaagccatatatagcatccagtctcgttcaatattattaatgtaatgaattcaactcgaactcattctatgaaaaaaaaaacagtgttacttgtaggggtggaaaaaaaatttgggctcgtgagcagctcgggcttggctcgagctcgcttagcctggctcggcttgaatgccaaacgagcaagcccaagcttcctttttagcttggttctgaaacgagccgagcctgagctggcttgcgagccgcttgatttggctcatgagcctagcctaggccatcatgtatttatatggatgattttttttctagtgaagttattatttgtcaatatgtaatttatcatctatattttaatgaatttaatatataaagttattttaattttacatgttgatgatttgttattgcttttcttaatgattacaaattatatagcttcaatggaaggctcgcaagtcagctcgagctagctcgagccagaaaacgagctgagccgagctcatgttttagctcgtttccttaatcgggtcgagccaagccaaacctagcttattacaagccattgcaagccgagcctagctcggctcgtttccacccctagttacttctagcttacaaactcttcgttggaccttgagtggagaaatagcctaaggacaaatccgagccagctgatacaaatccgcgtcaaaataaaatgggtcgaatgtgctactcacatgcgtgtacatggcaatttcaacatgtgagtgttgaggtggatgagtttttggaataaaacaggttgtgacgtagaatataaaaaataagggtaacaattagagtggtttacgcaattttgcatagtgcattccatgcttgcttgaatggacttcgacttttgatgcaattacttttctttctctttgattgagatggcatatatgcgtttgggccttgagtagctgtcggcctaatttgtacaggccatttaagagcaatattatccggcccataaaccgattggtgggtccgagctgggcatcgccatccgcaatagggccgtggtaagccagattgggcctgatgagttggatcgaaaggcaaactttttttcttttgccgtcggatggataggatgggagtgggaccatcgacaacgcatgccaccaacgagtgagacctaaccgctgctggcttcctgccaactgtttttttcccaggttctttttttcccggcatttatatctaatcggatatatgcggccatttaaattaggaacttagcctcataaacaactcaatctataattcgcttctatgaagatgtgaactcacgaccttagggtactactcaggtcactgtaaccattaggctacatgcttcctgccaactagacgacctaatcgcttactacgtgattcgtgtataaaaataaatttattttaagatgaagggtataaagaaaacaaataaatggtactgataaatgttatgtgtcatgatatgcttaaaaaaccaccatgggtcaagaaaaggaggaactttgctcccttcaatcacatatttgattttccttcaaaaaaaatatgtatagagatgtaggcactcatattcacacgagcacacttatctatataaagttttaaaatttttagcaatcaatatcttctttaaatatgcaaatcagtcgaaaatcacatacaacatataaaagatttatgttaataattacgtcatatcgctattttagcactatgttatatgcctactccttatgtttttgtattttaaaacctaaacccttctaaaacttttttccataatctgaaccttttaatcacaccagcacacctgatgtggtaaaacaatactgacacgccacactcatcgggcgtgacaggtttgtccggccaaataacattaccacgtcagccggatcagcgtggtagtgttgttttgccacactagtctagctgacgtggccaactagttcagatattgaaaataatttttgaaatgatttatttttaaaattaaaaaatttaaaagttcaaaaaacaaaaaaaggatcactccttattgatatatttgactaactacatcgatgtttaatatagtaggtggctctcatcttttctctatggtttatagtttataaaccatggtcaaattttaaatttaaaacttgattataaagttttttttatcgtagtttattttttagcattagcttttaatatcgcttaggacattgttaaggtaggatattaaaccaactctatgtgcatattaaactttttcatagtaaaaaaaatattgtggtacctctcctttttcaaaccagcattaactcaacaaaacttacctacctcccttagagcaaggataataatatagcccacttcctaatattagcccattctaaagtcaacacatataatagattagctataattttcttctcctatctctatctctcacttatacatttaatgtatttgtcttgaaacttgtgttaagctagcttttgcatgagagccaacaccattctcttttgtttacctctctcctccacatgagcttatagtatgcttatagctcactattatacttgctcttatctcaaaatcaagcaacccataatgtgaattttatccttaagcttcgttcccctcttgcttttccctccctaatcaactggaccgcacagctaatacccttgtcggatcccgactccaccccacccgaacccgctacccgcacccgcacccgcaccaacccatctccttctcctcctaactcaactcgactccaaccgccgctcaccggaatgcggcggtgacaagacgaccaaccacctcctgcgactgctcggatcccgcgacgcggcggcggcggcgaaatacggagatccggcagctggaggcaagagagagagaaagccatggcgagcgacgtgcccatgagccccgacctggaacaggtggacggcgagatccaggacatcttccgcgcgctccagtgagtcaaatctccccctcccccaccgccgcctcctcctcctcctcccccctccagcattccgcccctccctccaccggtttagtgggctgagaagcttctcgaggcttctgcggaagcggcggcggcggtggctcagatcttccccactcgcccaatctgcgctcgaaattgttcgcgggttccgctgctgggtccactgcttttcgtttgccggaatgggttccacaagatggcaagatcaaggacctcaacaggcatctccacggcgctggaacatctcaccgggaaaaagacggactgcacggggggggcctcccttgcctgcctgaacactactgggtgctctggtgatgcacaggctcacgcctgaacccatggtttagtttagcttctccatctgtgcgccattgatgttcctggcttgaacaagcaatttaaatctttttgcatgtggcgcatgagttctgcaactgctctgcctgttagatggagcactaatgtcttgatagatttgtgtaaatgtgatgatttggtgttttctcgcagcttaatcaaagaatttgatcgtattctcaaagaggatgagaaaaagaactcggctgatgtcaacaagcagctaaatgataagaagcagctgatggttggtagtactagttttcttcactagtgtttgtgttacccttactggacaatttagctcacaagtgtaatttgtttcttgtgtgttaaaacagatcaaagaattgaattcctatgtcacattgaggaaaacgtaagtagattttcccctttcgttatgcatgtgttattttttttccttatgttgaattcagcgtttcatttgcatatgtgatcctgttacattgtacatcacttgtggtaatagacatgcaactctcatggtgtttcaggtaccaaagcagcctgggtaataagaggattgaactatttgatactggtaatgatcaggtggccgaggacaacactgttcaaatggcatcaggtggttgtagtttcttatatcattgttaacctgcccctgagaggtaatgtgttcttattctaaccaaagcactttggtaattcttcagaaatgtcaaatcaacaactcatggatgccggaaggaaacagatggaccaaacagatcaagttattgagcgttcgaaaaaggtgcgctagtagattttgctttcatttctttacacacttcaagagcaaattttacaagaatcctttcttgtaggttgttgcacaaaccgttgaagttggatctcaaactgctgcagctctatcacaacaagtaagttttttgggatgataaaattcaacagaatattccttggacgtttcttgttagaaaggtcagtcctgataagtttaatccagcaccctaaaattctctttacatccttttagacagaacaaatgaagagaattggcaatgagctagactcggttcacttttcactgaagaaggctagccaaatggtgaaagagattggtcgccaggttctctctctctctctccccccctgcacacacgtatgttactcgtttcgtcccaaaataagtgcagccctctagttcaaatttgaactagaaggctgcactcattttgggacagatggagtatatttgaagtggctgtgcctagacttacaagattcattgctgcaggttgcaactgacaaatgcatcatggcattcctatttctgatagtctgtggtgtgattgcaatcattgttgttaaggtatgttttaattgcttttgcaaatgtacccatgttgtttaccttaggtgacatcacttgttgagataaaaactgatcctatatcctccgtatgtgcaagttcaactaaaagcccatgacctatggtgaaaatttctgtccagttaattgtagagccagttagtgcacctagctagtttctcgttaactctacgtgttctattatatgttggagataagaatgacgaataaaaggagcaggaatacatcatttggataataactagagctagtgatcagtcccacatttggtgtgttacgtcatgcaatgctatacttaactgattcagttccagaatgtcatagattgtttcatttgtcacattttacattacaagctagtcttacattactatgcaatgaatgaccggtctgccgttcttccagattgtcaaccctcacaacaagaacatcagagacatcccaggactggcaccacctgcgcagaacaggaagctcttgtccatagaatctttcggaagcctctgagcattgcgagtgggaggcaaccgagatgtttgggagaagatactatgcacgtcgtgacaattcttttgcgcttgtatatcatctcatgtcgttattcccttccactgatctattcttttcttgctgtaattggtcattagtgttggatttacgtttgatggttgcagtgcggcttcctgttggctttatgaatgtgtgtatatgtggtagtgatgaggatacaaagatatttgttgttctttttattctgcaagtaatcacgtgaaggcttcagtttgcagttgttccagttttcatatctttgtgaattgtgatttgcttcagtctcgtcagaataaaaaggtaacatattcgtacaaaatctaacgcccaacttggcagggtcagacaaaagcatctgggcaaaacaacgtcgttcaggccaaaacgtaaaataaagatgatagaaatgcaaggatcctagatggatcactggacttatgttacagtgcttgcaaaaggttaccgggcaacaagttatcttagctcttgtacgtcccaggaagaggagcttgtgttaactgattaattaacaagtaacattaaccctcccatggagaggaaggctatgtcatctctcggatcgaactaaagaagaggcagttcaggctgtagagggctgtgcatcctcgtcggacaataataggtcactgaagaaagaatcagtgagacaatctttagcggaatcatacttggctaggcgtttcttgaacgctcggagctccctgtcgtctttggaagtaaatgtctagcaacagttactgaggttagcaatggtggcaaatttgatttgtaggcaataacaaaatcagcgcaaattcaaacgttgtcaggaaagatgaactcacggagtatctcttctgcagtacgatatcgacaagataaattagccatacgacgtttgtctttggaaagctgcaatgacaattaaacagacctcaaatgtttccgattttgaaagtatttttctatcaatttctgattaaaaaaagtttactgtagttttaaatccatgcaaaagtaacttcagctagtgaatagccatacacatagtttgtgagtcggctagaataattagtactttgctattgcaagctaacaaagttggtctgaaactacgaatcctgcaacaatgtcaatgacacgcgtatgtaaatggctcaagaattgttctgtcttatgtagtggagtacttacctgccctcccagtaatcattggtaatctgtttcatttttcggtatgtttctgcctgcatattataagaaacatatattacactagcccaaaatgatttaacatgctactttcaaagtgatcatctgaaaacctgcttatctcgttttggtccttcaaataaggcagggtccgttgacaggtctaaaaagaggatagcatcacctggagagtatcattacaaacacaaaaattgtcaaatggacaaaacataacacgtaaaaggctaacaaataagaaatgaccgtatcactttgctcttgaggaaaaaagaacaagaaccacaaaggtgttacatacatgcgtagcacttgagatgcaaacttgaaatattttatggagctaactgaattgatcatatagtaataccagaagttaacgtacatggactagccagaagatgggcatattcagctaggatctatcagatccaatatgaacttggaggtgcaaatgtaattattactcactccgtcccaaaataagtgcagttttgcactgttcatgtccaacgattgactgttcgtcttatttgaattttttttaagactagaaaaaatgcccgtgcgttgcaacgggtgaaggctattttaatcttattattattatatacggtttagttaaggtgaaatttactgtgggaattcgcttggatatatatatatatatttagaaaatcataagctgcaattaggagttcgattgtctcaagttagcacacgagttttttaaagagattttttatacgactcctactgtatttccaaaagcgaacaaacttaaaaacagactcaaatacggatatgtattttcaaaagcgaacaatcgtaaaaaccgtctcatacacgaatggcataccaaaataccggtaaaaacatctttaatttttataatagtagagatagagaagaaaatatatttttggaaaaaatttgaattgggaatttattttttaaaatacttataaataaatattaaaaattctcagtaatagcgcttgtgctgggtccacccatatatataaacacgagaatggcttggtcaacatgcatgcacgggctgacatgaggacaacggcagattggcccaagaggtagatttgcatatgcacgtgggatgtgttgtgtggactgcaaacttgtgcctgacaggagcagttcatgggctgcccagttagaagcttggcccaggcagggctatttcatacgcgagcgcagttacagacatggaaattaatcgtaatcggatagcaagttgattcgagggaaacgtaaaacacaaggaaaaatacccaagaacgttcaccgactcacaattggtcgacgtacgaaaagctaggcaaaaatatcttgaatttttataatagtagagattagtatttttattgttattagataataaaacatgaatagtactttatgtgtgactgattctttttatttttttcataaatttttcaaataagacggacggtcaaacgttggacacagatacccatggctccacttattttgggacggtagtattcctctgcaaatgttttttgtggctaaaaattttgcttatgatcacaacacaaaagcatacaaaaaatcaccagttttagtaattctagaaattgtaggccacatcaaaatttaaaactacaaatgggtgcagcataatgtaatgaaaaaaaatattaggttcatggagtacctgtattgatccgagaaagcgtaaaatcaattattgagacgttcaaaccaaaagttctagtacacatgtttttcccttgaagagtgaaacccattgtatgattcttgtcttgtgtttcatctcgatccaatagaatgttacccctgcgaaatgagccgcttgtaagcaataatagacaactaaaactgagaagaaagaatatcaacaattggtctgagcagttggggttcccaataggaaccttaaaaacaactcaactctgtccacccattgtcaccacctatattttgacccactttaagtattgttaggattttcccagctacctggtatattaaatccacgtgtacttataaaaatatcaaaatttcacattctaaatattggcccttgttttgcatcctgtacaaacacttaacaaaactaaaaagaataaactacctcatcaatgttacatcatttcgttggagaacactaaactaaggatgtgaatggaaatcatttttgaaagtacaaaccaatgcaaatctcgatgttcaaattcgcacgcgctttcagcaacagctaaagcagcagtgacctgcatcaataagatgatttatagtttatccaaagactttgtagttgaggtaaagttcataaaagcttaggatacaccaggtttatacttgaaccaataaactgcaagcctcattgtagtcaagcaaagcaaatttttcaaggtctctcccaccatcagcttgcacaaagacaatatagcactgcaagaaagttacaaaaagatgtgataaccagaagaaatggtcacgcatgcttcaccacaataactgaacgatgtgtggtttgaacgatcagaatcctacttgttcattcgaaaaatcatttggatgatcattctcagaacaacatttggcatcccaatcttcccaagcacaaataagtgaagggtcatatggaccttgacaaacccaaaaactgcaaaaacagacaaatatcagaagaatttaggccacttggttgttgggtaaagctggcttagtcatttcatacaatttctacaaagataactacaagataatgaaaatcgcatactcttttgtctcaatgaaaccatggcatgaattttctttcacattatcaccccggtctgctcttagattatttagtgttagacaaagcaaaacttcctcaagaacttcttctgctttctgcaaaacagaaccatccaatgactaatgagtacctgaaaatttcagagtggacagcacaaatgaatgaaataaaccttttgggtctctccattaactagtgatgttccatcaaagggaaccactttacagacagtactaccagccctgaaggcctcaccgaatgttccttcaccaagcttcacaatgctgcctggtgtactatttccatgaacatcttcgttaaatgacgaataaagactgcatagtagttaataaacatgtaaggttgaaccacctaccagtaagtggaaaacgcttcagctagggttataggtgcagattgattgcaaaccaaaaggagttgagcaaaggcagtcatagcttcagcactcaatgatggaatgctgctatcatcaggttcttccttaatcttaagctcactaaaggatgtaaaaatgctggttttgtcactgagccctgaagggattgttcttttcataggatttgttttagaccccctatccttttcaggggttctacaactgtcgtgaagactgcaatcactacggactgatggtacaactggggtctccatgatatcaaacaag

SEQ ID NO: 27353 - DNA, 10131 bp, Oryza sativa
ccttttctgctttatttaaatttggatttgaccatgcattgatcctacccctttgtcttctttaaatggctgagcacccccccaaccaccacggaaaaggcatggatgattttgtgacaaaattggctcccatgacactggtggtgggctaccccaacgcgccagaatactcgactgttccaccgctcattggcgagtttcctcaccgtgttcgcttagaggtccatggctatgtgggtacctgcctcgctaacatggtggttgaggcatccggaggcaccgcagaccacgcctcgctaacatggtggttgaggcatccggaggcaccgcagaccacgcctgtcaggaggcagcatatctgatgatggccaggcttcgtgatcggcacagctacaccttctgcaacacggcgtaccgcttccaccctcgtcgagcaagtggctatgatatcagcaccttccgcccgatagccggcgagaacgacaccaccttcggccacatgtgcgccatgatgaggggaatggacaggatgtactcggatctgcacaaggcatccaaggccttgaatgatgggaatctcgtgaggatcatagctctgaaggatgagatagcgcgcctgaagaagaagaatgctcagttgaagggtctcctagcgccaggaggagtccggatccgcaccacgccccgcaagtcaacaacggcacccgtgcgcattcaacttgcgcccaggaacccacctccgcctgcagctcccgcagctcctccagctccgcccgcagttcccgcagctccagcgccagttccagctcctgttccagtgtcagctcccgcgtccgctctctccttcactccagcatcagccgtcaggggcccagccagtggcaacggaggttggttgcctgctactcccagtggcagccgtgaccacagcagcagcagttccagtggcaccgagccaggcagatgcgagacgtatctgccagattccaggagccgctcagagggacctggtgacgagcaggaggacgccttcgactccaccgaccgcaggagccgttccgagcattaggctcgctttccattagtttatcgactatttagcatttgcctgttagtttgtgtgtttaggtctgctcgcttgtgggtcagttgacggtcgatatcatgtgcctataatatggctgtcttaataaagatttttgcttgctgttttaagtgttttaatttagatcagaacaattgcagtttaaattcctatataataaagcttagttcttgagcatctgtttttcttcttttcccccccgtctgcttttcctccagatggtctacaccaggaatggtagccgcacaacaggcgagggcagcaatggcgaagaacgcactgacggggtgcatcccaacagcgattccggcaatggtccgccaccactccccgagaatccgactctggcccaagtaatggctcatcagactcagatgatggcagccatgatgcagcagcagcaccagcagatgcaccaaaggatgcagcagcaagccgagcagcatcagcagcagtttggtccccctccccctcagtccaaactgccggagtttctacgcgttaggccacccaccttctccagcaccaccaaccccatggaggcgaatgactggctaaatgccatagagaagaagctaaatctcctgcagtgcaatgatcaggagaaggtcgccttcgccacacaccagctccaaggtcccgcgtcagcttggtgggacaatctcatggccacccgcccgccaggcactgaagtcacttgggcagagttctgtcgcagttttaggaaggcgcaggtgccagacggggtcgtggcacaaaagaagagagaattccgggcactccaccagggcaacaggacagtgactgagtatctccatgagttcaatcgcttagcgcgatatgcaccggaggatgtccacactaacgcggagaagcaggagaagttcctagcaggcctggatgacgagctaaccaaccagttaatctctggggactacgccgactttgagaggctggttgacaaggcaatccgtcaggaggatcagcgcaccaaaatggacaggaagagaaaggcggcgcagttccggtccaaccaaggaagccaccagcgaccgcgcttcactccaggacagcagggtggacctaccaccatgatcgtccgccagcaccgccctttcaactcaagcagcttccaccagggcgccagtggcagccagaaccaccatggaggtcagcccaaccacagtgcagctccgcgcccaccaatggcaccagtacagtcagctccgtccgcgcaagccaagaaggagactggaacaaagccagggtcctgcttcaactgtggcgagcttggccacttcgctgacaaatgtccgaagcctaggcgtgccgggccaaggttcatccaggctcgtgtcaaccacgcgtccgcagaggaggcgcaagcagcaccagaggtcgtactgggtacgttttgtgtcaactcagtccctgctatagtactttttgattctggtgcaacgcattctttcatttcaaagaaatttgtgggaatacatatgggttaagaaaagaagagcttagtacaccaatgagggttcataccccgggaaatagttcaacctcggtcagttatagcccttcagtgctaataggaattcaaggatcaccatttctagccaacctcatccttcttgaatctaaagacctagatgtcattcttgggatggattggctaaccaagttcaagggagtcattgatttgcaaattgcacagtcaccttgaccaacaagaagggagaaacggtagtgtacaaatcactagtctcaccaaagcaaggggtctccttgaatcagattgaggtggaaatcccagtggtcaccgaggggaagagttcgaggaaattggaagatatccccatagtctgcgagtacccaaaagtgtttcccgaagacctcactaccatgccacccaagagagagattgaattccggattgatttggcaccgggaaccgctccaatttacaagacaccgtataggatggcagccaacgagctagcagaggtcaagaagcaggttgatgagcagctgcagaaagggtacattcgaccaagtacttcaccttggggtgctccggtcatttttgtggagaagaaggacaagacgaagagaatgtgtgtcgactatcgcgcactcaatgaggtcacaatcaagaacaaatatcctttaccgcggatcgatgatttgtttgatcagctgaaaggagctaaagtgttttctaagatagacctgcgatcaggctaccaccagttgagaattcaggaagaggatattccaaagacagccttcaccactcggtatgggttgtatgagtgcacggttatgtctttcggacttaccaacgcacccgcattcttcatgaatctgatgaacaaagtgttcatggaatttctggacaagtttgttgtggtattcatcgatgacatacctatctattcaaagtccgaagaagaacatgagcaacatctccgtctggtactcaagaagttgaaggagcaccagttatacgccaagttcagcaagtgtgacttctggttgtctgaagtcaaatttctgggtcacgttattacagctcaagacgtggcagttgatccatcgaatgtggaatcagttaccaagtggacaccacctaacaccgtgtcgcaaattcggagttttcttggacttgcaggttattaccgccgattcattgaaaacttctccaggatcgcccgacccatgactcagttgcttaagaaagatgagaagtttaaatggacagctgagtgtgacaagagttttgaggagctcaagaagaaattagtatccgccccagttctgattctgcccgaccagatgaaagacttccaagtctattgcaacgcatcccgccacgggtttggatgtgttctaatgcaagagggcagagtggtcgcgtatgcctcgcggcagttgcgtccacatgaagggaattatccaactcatgacctggaattggcagcagtggttcatgccttgaagatctggaggcactatctgattggcaaccgctgcgaagtgtatacggaccacaagagtctgaaatacatctttacccaaccggatctaaatctccaacagcgaagatggttggagctaatcaaagattatgacatgagcattcattaccatccaggaaaagccaatgtggtggcagatgcattaagcaggaaaagctactgcaatgctttatgcaccgaaggcatgtgtaaggaattgcagcagaagcttgaacacctcaacttggggcttgtggaatatgggtacatggctgccctagaggcacgacctacgctcgtggatcaagtcagagcagctcaagtaaatgatcctgaaataacagagctgaaaaagaacatgagggtcggaaaagcccgggatttccacgaagatgaacatggcacaatctggttggaagaaagattgtgtgtacctgacgacaaggaactgaaggatatgatactcaccgaggctcatcagactcagtactccattcatccaggcagcaccaaaatgtatcaagacctcaaagaaaagttttggtgggtcagcatgagaagggaaatagctgaattcgtcacactctgcgacgtttgccaacgagtgaaggcagagcaccaaaggccagcagatttactccaacctcttcaaatcctggaatggaaatgggaagaaattggaatggatttcataacaggtctgcccaggacatcatctggccacgattcgatatgggtagttgtggatcggcttaccaaaaccgctcatttcatcccagtgcacactacttatacgggcaaaaggttggcaaagctctacctctcgcgaatcatgtgtctacatggagtacccaaaaagatagtatctgatcaagggagccaattcacttcaaagttctggcagaaattgcaagaggaattgggaacccggttgaatttcagtacagcctaccatccgcagaccgatggtcagaccgagcgagtcaatcaaatattggaggacatgttaagggcttgtgcacttgattttggtggagcttgggacaaaagcttgccgtatgcggagttctcttacaaccacagttaccaggctagtcttcaaatggcaccgttcgaagcattatacggctggaagtgccgcacacctctcttctgggatcagacaggcgaacgtcaactgttcggaacagaggtgttaacggaagcagaagagaaagtcagaaccatcagagaaaggttgagaattgcccagtctcgacagaagagctacgcggacaaccgccgaagggagctcacttttgaagcaggggataacgtgtaccttcgtgttactccgctccggggagtacaccgttttcaaaccaaaggcaagttggcaccacgcttcgtgggaccataaaaaatcttggaacgaagaggagaagttgcttatcagctagagcttccatccaatatgatcggtatccaagacgtgttccacgtgtcccaattaaagaagtgcttgagggtacccgaagaacaggccgattcggagcacatcgatatccaggaggatctgacctacatggagaagccagttcgcatccttgagaccagcgaaaggaggactagaaacaaggtcaccaggttttgccgggttcagtggagccaccattcagaggaggaagcaacctgggaaagggaagatgagttgaaggccgcccatacgcacctcttcgccagctcttccgaatctcggggtcgagattccgtttaaggggggtaggtttgtcacaccctgaagttctttcccaagcctaaattgaagttataaatggtctcaagaaaataccagtgcaaagcaagactaaaccttaataaattaatgcaaataataatcagaattggcatgtggaatttttcttgagttctacatgtcgaaattcgctaacaagatttttagtggaattttcagagctctcgaaataattttaaccaattaaaattgagcacatgcaattttaaatcaaagggaaaatcttttcctccttttctttttcttttccctccttttcctcttcttgggccgtcggcccagtccaccccgccgccgcgcgcgccctcctccttgtgggccggcccaagccgcccctccctctccccccaggacgccgataggtgggccccacctgttgaggtcgtccccttcctccggccgcccgccccacgtcggcaaccgccgccgaaaccgccgcgcccacctccgccgctcctcccgcgcccacgcggcgtcgcccacgcgtcctccccacatcgccgccctctccccgcgtctcccggcccgcgcgtgcgctcgaaaggggcgggattcgcattttgaatccccccattttctctctctctcctccccacgtcgccggcggaatcggaggccctcccggccacatccgcctccccctccgcctataaaatgttccccgtgcccttctctctcgttttccgctctcgccgctccctcccatgcttcttaccgagctcgcgccgctcgccgcccgcgccgccgcttgccaccgcactccggccgcgtgccgccgccacgctaagccgccgccaccactagcttcgccgccgcaagatctttcccggccgccgccttgcgtcgccagaatccaaccgagaccccttttccctcgcgtcgccggtgagttccctctcccctccgactccggccggcatggatggccgccgtggggtatttcctccgccctaattcctctcctctccttccataggtgtcgccgtcgcgcgtccgcacctcggcatcgccagtcttcgccgcctccctcgttttccgccgccggtcgtcgccgccccctccggtgaggactccctcccccttcctttccttccccatcccgcgtgcaccgtcggttttggccgcgccgctgctccgtctgtgcgcctccgccttcgtgccgtccgccgccgcctctagccatggccggccggccggctttgaagctgagccgagcccggcggctactccctgcgccgtccgatcggcccgaggccgatccggaccgtcggtcctgtggaccggcggtggaccacccgcgtggtcccggtccacggtggaccggccgctttgtgccgctgacccatggggcccacgtgccggcgccccctccctctccccttgcgcaactgacatgcgggccccgcatgtcggcgccgcccgctccctttgatgacgtcagccctaggcatttattgcgcaataattcaattaaggattttttctgtttatagtaaaaacacagtgaatcttctaaaattcataactaattcatccgagctccgtttaagcccattcaagtctcagtaaatcaagaaaaatgtgtagaatccattaaaaatggttttgttctctgtttcaatagtcttatagcctgtttgtattgtttgctttgtatatcgcttagattccggttcttccgacgctccggtgtacttcgagatagtcgccgaggttcctccagcagcagagcaaggcaagtcatgcctgttacttgaacatgttgatcctatattacaaatgttctaatgttttccttcaaatactgcattgttttacaataatacaatgggatgtttacctactgttacagccatgctattttggtaccatgctcctttgttagcttgggttataacatgactagacattggactggggattgcttagccatgcttagttcaactagcacacaatggggaaaatcctattaatgtatagactgtaggttctaatggtaatgttggattagtgccaccgcttcggtgttggttaattaaaataaatcacatggtgggctgtgggtgcatggttttgttggtcgcgcccatggtagttaaggaccggttcgcgggatgccctggaagaacttatcgtacttatcacaagccagcgtgggcaacggctgggcttgtagtgtagctttcctctagctgacgcatccaggcgagggtgagcgtgatggagtttggatgggccctgcgatggcctatgcggcttccagattcacctaggcacgagaagggactgcccgctgccttgcgaggagtgggggggaaacctgaggtgtggtgtgcttggttagagggggttatgcgaagggtcctgtcacggcctctttccggtatgtcgtggtggcatgccggcgcacggaaacgtgtcgtggggctgtgtcttgtgggtacagttgtacatctctgatcagagtaaaactattcgaatagccgtgcccgcggttatgggtggtcaaccagattcaccgtgattagtctcaccctagtttagtctaatgaaattggatagtataggtggatggttgggcctgttgcaacgtggtatagcgttggacagtggatgattaatattgattaattgttacaactgttttactcttctcaacttctgtttataaatgcccgttttatgcaaataaaccattatagctaccccttgataattccctgcatcatacccctattccagtatgacttgctgagtacagtgggtagtactcagtcttactctgttttccccaaaaccccagaatttgagtatgcgtcagatggcggtttctccgaggagtaggcttcgtccgtgccgtcgaggatgcctgtggagtggtgtttccgctgcagatcaagtcaaggcttagctccagttatcttttatttttccgctgcatttatgtaaggctttgataatgtttgtaagacgtggatctgtatgtcaactttgtcgtttgtgtaccccggccggtcctggacggggattttaatggacattctacttggaattctattcagaaatttctgggcgtgacattcctcaaatagctttaattgctcattgtgaaaaagagaataaaaatataaaaaaattaataccgaatccttggaaacagtcttgacgttaaggacgtattcgatgtgagcaaaataatggatgcggaatccctggaaacagtcttgacgacagggacgtacccggaataaaagagaaaaatataagaaaaaaggctcaagaaaagaaaaggttcaaaaaaattctcttagttattttgtgctaaagtttatttgggaaagagttataaatgcaataggtatatgtatttagtgtttattcttcaacatatgtgcttgttaagatattgcattataaatcgtatgaaatcatgaattttgattcttgattcaaggttaattgtaaaatctttggttcatggttatactttaatgcatgcttgttatcttatagatgggtttatcttctttttattgcaacacatgacttgatatgctatatgtatgctaagctcttgaacattactgcacataattcatatgcttgaagaaatcattgtaaaaagggggagaagtaatgtgaaaatttttggatttttgggagaagcaaggtgattttttggagagttgttgagaagagcatgtttttggttcgattgggaatttctttctttcaaaaagggggagaagttttcttttggattttcgagcacgatgtgtacgtttgtgcgaagtgtgcttttttccacttttgtttttatttttccaaacaccaaaacatttttattggtttgccaatgtgttcatcaagggggagattgtaaaatcaaaggtgtttttgattattattctgtgatgaacaatcgggcattggagattattggttttgttatttggaatttattcacaaagtggttttgaagatgattggatttcacaagtgatcgcaggatttgttatttcatgtgaccggtcagaccgggcagtgtgtgccggtcagaccagcggtgatcgagcggtcggaccggctagcccgcggtctgaccggccgacgctgtgtcggtttcggtttcgggttgtttgtttggatatccgtgattatttcatgattatgacttctatatggatactatatgtatgtaatactgttgt

SEQ ID NO: 27354 - DNA, 738 bp, Oryza sativa
ctggattcctaaatttttattatcatcttttggtcgacttctgcttgtgtgtaggctttgtggcaaggaagaaaaacgtgtggatcgtggattccggttgttcgcggcacatgaccggtgataaaaattggttctcctccctcaagaaggcatccaagactgaatcgattatctttggtgatgcttctacaagtgtcgttttcgctacacgtttggttaaggtaaatgaaaattttgaattgaagaatgtagcgttggttgaggacttaaagtacaatttgctttcagtttcacaaattgttgatgaaaattttgaggttcactttaagaaaactggaagtaaagtttttgattcttatggtgattctgtgttgaatatttctcgctatggaagagtgtttaaagctgattttgaaaatcctgtttcacctgtgataacatgtttggttgctaagtttgataaagatgtgatgttttggcatcgtagacttggacatgttggttttgatcatctcactaggttaagtggtttggatcatgttcgtggtttgcctaaacttaagaaagatcttgatttggtttgtacaccgtgtcgtcatgctaagatggttgctacttcacatgctcctgttgtttctgtgatgacggatgcaccgggacagctattacatatggacactgttggtccagctagagtgcaattcgttggaggaaagtggtatgtgttggttattgttg

SEQ ID NO: 27355 - DNA, 880 bp, Oryza sativa
cgatgtttgcttcatggcgcgtggtgaatctgacacagagtatgaagataatgaggtaagtgcttttgaggaagctattaatattttgagtgaaaaaaataagaagtgtgagaagatgtatagaaaacaggaatttatcattgaatctcttaaatctgaaattgctagattaaaatctcttattcctaatgatgatgattgctcaaattgtgaggttttaatgaatgagatttcaaaaattagagatgttaatgctgcacatgatttgaaaaataaatcttctcttgcttgtagttttgctttgcacacacgtactttggatgagttgtttttaacgaaaaagttgttgcaaaaatatcaaattgcttttcatactagtttgatgtttaacatgatttctgctaaaaagttaaaacaacctcatgatgttttggattgcttaacatgtaatttgaataagttgaaattgaaagatgctttaggtcgtgttgagttcatggaagatgttgtgaaaaacaatgaagtgctttcttgcgctaaatgtcgtaaaagcaatggtgtcatggtagattgtgaaaattgtgctaatttggaaaaagaggtttcttatttgaaaaattctttgctaagattttctgatggtaaaaagaacctcaacatgattttggatcaataaaaggttagcacacataaccgtggtttaggttttaatccttatgctcataattctagacatcctcctgttgtgttaggtgttggtgctagaagtggtgagattttggttaaacctgatactaataaaactgtgtttaaatctgctggtatcatgtctaatatgagtgcatttttttcaaatccaatgttgtgcattcaaatctcc

SEQ ID NO: 27356 - DNA, 3074 bp, Oryza sativa
gaaagaggtcttgaacatgaattttcttctcctcgtgttcctcaacaaaacggtgttgttgaaaggaaaattcgtgttttggttaagatggctagaacgatgttggatgaatataaaactcctagaaaattttgggctgaggcgattaacactgcttgttatatttcaaatcgagttttcttgagattaaacttggaaaaacttcttatgaacttcgatttggacatcaacccaaagtttcacatttgcgtgtttttggttgcaagtgctttgtcttgaaatctggaaatttggataagtttgaggcacgttctaccgatggattgtttcttggttaccccgcacatactcgtggctatcgtgtacttattttggagactaacaaaatcgttgagacttgcgaagtttctttcgatgaggctagtccaggtagtagacccgatattgcaggtacactatcacaggttcaggggaaggatggtcgtatttttgaagacgagagcgacgacaacgacgacgacgaggtcagctcggccggacagaccgagcgccaagccggtcagaccgccggtacacctccggtcagaccggcacaggaggtgcggttagaccggccagggtcgtcagctgagggttctattaatgctgttcgagatggtcctccggagactacaactttgaccagtactgatacagaacgtgggtcaacttcagaagttgctactcctttgcacattcaacgacgacatccgccggaacaaatcattggtaatataggtgagcggactacaaggtctaaggtaacgactcatgatgtttgtgcaaattctgcatttgttgcttcttttgaacccaaagatgtgtcacatgcattaactgatgaatcgtggattaacgccatgcatgaagaacttgaaaattttgagagaaacaaagtttggactttagttgaaccaccttctggacataatattattggaaccaagtgggtattcaaaaataaacaaaatgaggatggtttgattgtgagaaataaagctagacttgttgctcaaggttttactcaagttgagggtttggattttgttgaaacttttgctcctgttgctagaattgaggcaattagacttttgtttgcttttgctgcttcaaaaggttttaaattgtatcaaatggatgtgaaaagtgcttttctaaatggttttatacaggaggaagtttatgtcaaacaaccaccaggttttgaaaatcctgattttcccaaccatgtttttaaattgtctaaagctttgtatggcttgaaacaagctcctagagcatggtatataggcttaagaactttttgcttgcgaaaggttttacaatgggaaagattgacaaaacactttttgttcttaagcatggtgataatcaactttttgttcagatttatgtggatgatatcatctttggttgttcgactcacgctttggttgtagattttgctgagactatacgcagggaatttgagatgagcatgatgggtgagttatcgtactttttgggattgcaaattaagcaaacacctcaaggtacctttgtgcatcaaacgaagtatacgaaggatctttaattttgagaaggttcaagatggagaattgcaagccaattttaacaccaattgattctacagctgtgttggatcctgatgaagatggtgaagccgttgatcaaaaagagtatagaagtatgattggatctttgttgtatctaactgcttctaggccagacatacaatttgctatgtgtttgtgtgcacgctttcaagcttctcctcgtgcttcacatcgtcaagcggtcaagcgaataatgaggtatttgaatcatacacttgagtttggaatttggtattctacttcatcttctatatgtttaagtggatattccgatgctgattttagtggttgtagaattaataggaaaagtactagtagaacatgttattttcttggtacatcattgattgcatggtcttctaggaaacaatctagtgttgcttaatcaaatgctgaatctgaatatgttgctgctgctagttgttgttcacagattctttggcttttatctactttgaaagattatggtcttacttttgagaaagtacctctcttttgtgataatactagtgctatcaatattgctaagaatcatgttcaacactcacgcacaaagcacattgatattcgttttcacatggacaccaagttgcaaattgctgatattttcactaaacctttggattctattcgctttgcttttcttcgtggtgaattgggcataattcatccttttggcatggtttgagggggagtttgtacctcatggttttatcaagcaataatatgataatgagaaaaattgagaaaagagagctttgtttatgcatatggtattttcttgtgcatgctagcaatactttgaaggtttatttgtctctagcatagcttgtatgtattctagtcttttcatgagatttagattttgcttttaagggagattatgcatgacacttaaattctacttgaattaagcaaatatgcaatgatgatgctagcatatggtttgatttataaatgctctatatatatgctttattgacttgttattccttgtcacaccctgaagttctttcccaagcctaaattgaagttataaatggtctcaagaaaataccagtgtaaagcaagagtaaaccttaataaattaatgcaaataataatcggaattggcatgtgaatttttcttgagttctacatgtcgaaattcgctaacaagatttttagtggaattttcagagctctcgaaataattttaaccaattaaaattgagcatatgcaattttaaatcccagggaaaatcttttcctccttttctttttcttttccctccttttcctcttcttgggccgtcggcccagtccaccccgccgccgggcgcgccctcctccttgtgggccagcccaagccgcccttcctctccccccgagacgccaacaggtgggccccacctgtcgaggtcgtccccatccttcggc

SEQ ID NO: 27357 - DNA, 3460 bp, Oryza sativa
ccattattacttggaattctgctgtctagtacttaggcaattcacagtgcacacgacaatgttggggccacgtcaaaaaaataaatatagacgggatgtatcacaacaaatctaaataatacatccaatactaaattcggtttttatgggacaaagagagtagacaaatagcttgcctggaggagagaagggattggggactggaccgtgatttcaccgggttcgcgtcaccaaagttggtaacgagagcctcgcggcagtttcgtcataaaaaggaatcacatccgctcgagacaagaaagctagagagagagagagggaagaacagtgtccgagctagatttgcgctggagaatctctccggagaggggtgtggaggtggtgacgtgatggtgagcctgaccccgatgacggtgcccttgccggggacctcaccggcccacacctcctaatacatgccggaggaggggagaggagtaggggcgctgacgccgctagatccgcccctagctcaggtggtggtggccggagcgagggagggagccagggaggggcggccgttggctcaatctgcggggagcccgtcgtgtcacatcctgattttcgtttcaggatttagaaattatttaataaattattgttagaatttatattaaatgttcattaattttcaagtgaagttaaatgtgggaaataaaatttcctaaatataaagcatggatggatttaatttttattaaattctccatggttaattatactctctggaattttcttggatttttcggagctcaattcccaattttaatcatacaaagaacatttcagtaattacccacatatttaattaatcattaaatggtctgttttaatattgttaagtactttgagtgtccaattagttccaggatttttcttgaaattatttgagcattgaaagtatttttaacaattcaaagatcattttggtgattaatttaattggaaaagtaattaagcttgcagccctctccctctcttttccgaagtccatttcatgtccctccttcaatcgggccaaggaaaaggaagcccagccaaagtctactttacctcccactgttcatcttccagctccagacacagcccgagctgccgtcctgtgcctgtagccgacgccgcttcctccaccaaatccggcgcattcgttgatccccttccaaaattgattgcaaaaacggattcctctctatctccactacctaatcccgaagaaacccccatcaaattcgttatctatctcacgaattttggccgtttttattcgggtgaactcggataaatcctaacttccttcaccaaatccatccgttcctgagccgatctcctccaccatgcctatataaagcatcccctagtcgtcctcttccgtttgccccaagtcccgagctctaccgttgcccgtagcgccgccaccgcgtagccctagccgccgccgtcgttgttgtcgttccagccacgccgcgccggggttgtggtcgccgccgccgcttggcgtcgtcgctgtcgggtttgcgcggaggaggagcacctcggccgcccctttgcagctgccgaagaccgtcggagagccgtcgtcgccgtcaagtcaagccgagccgccgttggagttcgtcgccggccgtcgtttgtcgtcgttcgtcgttgttctttgcacctgtgagtttgcgtcgtcgtcctcttcgtgttggtgtctttggatagcccaaccgagctctctatcgccggcggagttgtggtccagtgccatggctgcgatgatgtcgtgatgacatcataaatcatttatttaattcgtaataattatctggattagatgaaaatcgattaaacttcagaaattcataactaaatcatcgtaactcggattcgagtggttcaagttgctaaattcatctaaaatcgagatctacatgttaaaaatgtccacatgtactgtttatgcttgttttttactgttttattgattttgtttatttgctttagtttccgacgttccggaggagagcgtttacattgaagaaggttcaaaagcgtttacggaagctcaaggaaagtcacacagatcccaaacaaccctttgagcatgttgaacccgtttaaagctaatgttttattttaacttatgcattattttcgaatgtcatcgggtggtaagcctttcccaattaattaatggccgaaaatgatgttatttttcctatgggttataatttgattagctagaaccttatatattggtttagttcagctaaatgctatatgtataattgcttagccatgcttagaaacattagctcattaatgggatgaatcatatatactacattattatttatgattatatttaatgatagctcacgatggttaatcgtgttatgataattaattgatatttaaaacttgtcaatggtgggttgtgagcacatggttttgaaggtcgtgctcatggcaattaaggaccggttcgcgagctactgttgtgagacattaaccgtgccaaccacaagccagcgtgggcaacggctttaccttttgtatagcatgattcattacggggtgccagactgagaagcggcgagaagtctgtgggggtcgctggggagtccatgcctctggtaatatttatagagggggtgattatgatccaggaatggtgcactgtggtgagttgtgttgtgcagggggtactgtcacagcctctattcgggtactttccagtatcgcgacgcatggtagacatgatgttgaggctgtgtcttgtggatacagcggtacacctctggccagagtaaaactattcgaatagccgtgcccgcggtcatgggcgggttgagcaatgtttttcgttattagtctcacacctctcacaataattattgatgctataactggtaataatttgtttagctcctggtttggagttagatctgtgcagccgggtatggttgttcagggtggttgggcctgtgcagcatgggtgtgctgtgcagtgttgattaaaattgatgattaattactctactatttcactactcttaaatgtttgctaaatactgcttttgcaaatgagcctatgttatgccatcctttggtatccttgtgcacttgcatatttgttgtgtggcttgttgagtatatcatatgctcaccttgcaataatcaatcaacctcagttgaagaaaaaggatccagaaggaaaagatgtttggcttataccccagttgagctgcctgtgggagtggagctgaagccatcgctagaccgttaattccgctgttgtttttcttttcttttgtaagtatgtaacgttattattatgatggatttgtatattaaattgtcagtttgtgtacctcggctgatttctggacgagggtattatgcacaaataagttcggaaattactagtgaatttccg

SEQ ID NO: 27358 - DNA, 3208 bp, Oryza sativa
gttgagagaccgacaggggggaagaccgacaaaaagaggacatttaacttttgccagttttaaaagttggtctttaagaatttgtcactcgctgcctataacatgtgtgctcttatgtgtacatatggattagtgctaaattctttatcaccacttgtaaaagtggcaaatacttattctttaaaaagggataattttattttcatggagcaacttaaggttacaggctcagggttcacaattacgacgaaaaccggtcgaattccacgaaatttcgaggtttcgacaaggctcgaaagtagaagccgtctaagatttcgatgagtttcattcaaattcaaatttgaattgataaaaaaggaaacaatcaaataaaatcttataaatggtatgatattcatagaacctattgggatataaattttcaaaagaattaatgtatttcgtgtatttactgaaatttacagtaggaaagaaaagaataacgaattaaaaaaaaggaaaaaattcagtttccctccttttctaattactgattgaaattttgatgatttcgctcggaatttcgccaaagccgaccggttttcgcaagcttatcggtaaattcagggaatttgtattcaaattttgatttatcaaatgtgttcagaatctaccggctttctagcggatttcgcaaaaaccgtcattccgccagagcccgaaacggaaggccatctcggaattgtaaaccctgttacagcactgaaacttgtgtctaacatggtaattcaacctatgtggcatgtgaggttcaagaattatatgtgccgcactactgctgcccttacagtttcatggtgttatctttgttgaaaacaactccatcaatcctaattactcagctgatttatacattttaaaatttatcttgaaataaattaaaatttttgctttttttcctagggagttgctaaaaaaaattggcacaagattttatagctaaaaaactttcaaatataattatagtacaattacacagtttaactataaatgtaactattattataattataattatagtgtaacaacattgcaacttctctatataacttatgtataaagttacatgcacatttttaatacttaagttatataaaatttataatatagttgtcaaaaataattaattatattatagttacatttgaaagtttttcctagacaagttttttatagtccatttacctagtatcatccataagatgttcttttaatacacttacctatccatccattaatatttttctattaataagaggcactttggttttttatactcatcgttaatatttttctcgatattttaagaatttatttttctctactactgtaaatgtaaaagtgaagtcttctcctccaccaccctcgtacctccctcgtcacatagaagattcaccccatgtacaaaaatacagtgtttctattaaaaaaatcaacccaacataaaaagattctgtaaaatcaaaggtgttttttattattattctgtgatgatcaattgggcattggagattattggttttgttatttagaatttattcacgaaatgattttggagatgattggatttcacaggtgatcgtaggattctatcattttatgtgaccggtcggaccgggcagtgtgtgccggtcagaccagcggtgatcgagcggtcggaccggccagcccgcggtctgaccggccaacgctgtgtcggtttcggtttcgggttgttcgtttggatatccgtgattatttcatgattatgacttctagatggatactatacgtatgtaatactgttgtttgctactaatgagtcaagttggagatagcttggtctcggaatatggtttctttgtttatttcatgtgtaggtgactcgatgtctcgggatagtatttgcggtgatggatcgggagtcggcttggggataagacgacgtccgtggtggtcagagattatgcgggatactaaggctagagttgatgcacgtggttgatggagattccatatggtatacgatggaggtattgtgtgcgtatgagatgcggagtcgaatttggaaggagtccaaatttggtatgattggttatgtaaagtttgtgtcttgtactagagggtttcctaaggtgtttaggacttctagtatgagtttggtccgtgactttaggttgcctacctcatgtataaatagagggggagcgtgaggcttcccggtatcgcttttgagagcaattgagttgagttttgagttagggtttccagtttagtcgaaatttttgtaaggagtgttgttggtgcactttgtaaacacagagagaatcaataaagtcgtcatccactttaagagttcttcgatttttgtttaccgggttttagcggtctaaccagcaactcaccagcggttagaccggcgagtacatggcggtcagaccggcggcgacagcaagcgcggcaggcgacttcggcggttcgaccgatcgatctacatcggtcagaccgacgttcatcaggcggtcagaccgcgatccgtcgaatttgagggtaacttttatttccactaaaagttttcggtttttggatataccaaccattcacccccccctctggttggcttagttcctgtgattcgatcctacagattctccttaaaaaactatagagaaaatccatgaattgccatcgacaagcaccctaattccagaaatgccatcaacaaaagcaaacttcccagaaatgccattgcacaagtctctttcttcccaaaaatgccatcacagtcaaactgctattaacatatctccattaagttgtatgaaaagacaatcttacctctatgcaactatttgctcacacagcatcattttgcagtgtgtgctcacacaacattattcatatttctgttagcacgtaaattcacagacattattattttgctatcaatcaaatcatttcagaattaaattcacagaaatcagattcaaaaaaaatttcacacattcgccgcttccggactcactgcacatgcagcaactcagcatttctgcatcgtaagagaaatccaaaagaaacttcacctaccactggtcgtcggcgaggagcgtcgatgcggtggggaagtgagcacagcgagaaagaaaaaaccccgaggccaatgtccactgctcccggttcgcgaggc

SEQ ID NO: 27359 - DNA, 2985 bp, Oryza sativa
gcctccgctgtggaccgccgcgccgccaccgtggactgccgccgagccccgcgccaccgccgctgtggacagcctcgccgccgcctgcaacctcctcgtcgccgctgtggaccgctgccacgccgccgtcgccgagcccccgcaccccgctggaaacccgcctctccctcgccaccgctgtggaccgccgcaccgccgccgtggaccgccgcctcgccgtcgcgtgcaacctcctcgccgccgttgccgagccccgcaccaccgccgccgtggaccgccgcgccgccgccgggagagccgcctggattgggttcggtttagggttagcgttagaaattttcaccgtttcatctttctttttcttttaccgtgaaaactggtatatcctgcactgagggtaaaatggtcattatcaaaaaaaataacggttgtaacggtgtagagttgactatgatggtatttttgggagaaagaggcttgtacaatggtatttctgggaagttgcttttgtcgatggcatttctaggattagagtgcttgtcgatggcatttcatggattttctcaaaactatacaattgttactattggatatatatgaacttgtaggtttcgatacaattgttactattggatatatatgaacttgtaggtttcgatacaattgttactattggatatagtttcgttcggtgaccgctactccctctgtcccaaaaaaactcaacctaggaggggcacaatgaatccttgtccaaattcgttgtcttaggagaggccacatcccctcctagattgagttttttcgggacgtagcgagtagtgcactaagtcaagtgacacattttgtcgttccatgtgtacgggcgctattagggcactcacagtgcgccgtgaattttgttgaattccgtttggcctcggctgccaaacaggactccagaactccaaaagacacaaggtcagcattgcgtttttgcctccaaaaaacgcctgagacgttttccccagtctcgatcgaggccaaagcacgagtagcaaactttggtcatacgcgcttcaatttcgtgagcccaaccaataacatggcagcgaatttttactgtttgcatacgtggaacgctcaggccgaacgcctgcgcacagcactgttgaatggccttaccatgtactccctccctcccacccctcctagtataatgaatcaggactaccctttatccagattcattgttctaagaggggtcacgtccccacccctactaagttgagttttttttgggacggaggaagtacacggcacagaaaaaaagagcacgtacaacacaatatacaggcgaacattatttttattttgttttcataccatatactaatgctaataatgctcacattttattaatcttcttccagttcaggctaacaacaaacagctgctacgctataccaaaaacatatacgaatttgtttctcaatgcaaaagttctttcccgaagagcccagcaatggctcgtccagggtcgtcttgcttgaccagggattctcccaccaaaacctacagcatcaacagacacgcttaaattttcagcgaataggatttgtagaaatgcgaatgaatttcagcaggaacatgcaattttatattgatatattgtagcatatttccttcctatagcatataattttggacgaccacaaatctaacattgactcttgtcattaaggaaaaattcgaggtaaattgacaagtgaaaaccgcacaactagtgagaaaagggaaatctgtactaactaacccaatttctcagatgtttcaacaagtttgtcgaatactgaaatcgtataggactagtttacattaatccacaagtaatttgaaaacttacagcggaaactccagcattttgcacataagcaacgtcatctgggttgaacagccctgattcgccaacaacctgaaaacccatcataagttggataaagaccagcacaaactagcaccctaggtgtttcagcaaacctaactatccaaggaaccaaaagtcaagtcaatatcactacaaaaatttatggataacactaaaccctaacatttcctttgatagtaatgtcatgtgcatgtacattgttacgaacaattggaaaatctcatcctgatataccaacaaaaatcacttatttcttcaatacttctagtagttcatctagaatgcacaacagagtacatataatgctgaatagacaaacaggtcatttcaatcttctattgaacagaatatgtgcttgctggaaaggctaccattaaggatgcatgatctgttacaatactaacaggatataatttgaatctagtctagactactaggttacaaagatccgacacaataaattgtttgtgtatggcaggatattgaatgaacaatagctattgactgaagttgtcttcttttttttttttttttgaaaccgtcagctattgaacgaagtcaatcataaggttatgaattcttagcatttgtaaagattgtgttgatgtaccaaagaatccattctcccatatcattttcctcagcagtatacataaattgcataaagtttacacataaatatatctgacataattaattttctattttccatttgctgtaaaatagactgtcgcaaacattcagtcagtgataacagtagatgcaagttaagaattcaacacaataaaagaacaggcgtccaagtgcctacttgtcatacaaagtcagtaaccatttacctaagattccaatatatagaataacagtactaacatttgattgagttgaacagatgcatgaaaatacaactagtgaattgtcacacattagcatgggatattaccaatattcccttctccctgatggtatcaccatgcatatctagcaacatctttgtgtttgaagtatcgacaacaaatgtttctgcagtgtaaatatttttggaagtaagcaggaaa

SEQ ID NO: 27360 - DNA, 1872 bp, Oryza sativa
caacatgttgggaaaaaagtgagcacaagaaaagtatcataccaaggctgcggttattgatgccaataagctgaactccacttatattcagcacacgctccatctccctttcatcatgaacctaaaataacatcaccggataatagaataaaaattaagcttggatctgtgcagattattagagtgtaatcatttcagttattaactcaaatagtacatgttaacaaaaaaaatctgaaacatcatataagttatggtatttgttttccatataaatgtgaatatgagacttatctccacgaaacatgcttcaccaccactccataggccagtttaaatcccgtttaaatgatgtaagctagttttcaattcatgggaccctccagaattaaaaaaaaaatcattgttacaaaatataaagcagtgactaacctcaataagagctgtcattcccaactccttacatatgcgaaggaagtactttatgtcgagatcaggtagcacagcggcaataagcagaattgcatctgcgccctgagagcgggcataatagatctgccatttatcgatgacaaactctttgcataggagagggcactgcatttacacaagatatgtacatcttgagaaaaaaaatggtaatacacaagcattgtcttcatgtttaaataacacatatatcaaccaataccttcactcctgacttccgcacctttgcgagattttcaaaacttccctatcaaataaaagaaagaattagcttagaccagtaaaagtacatgttccaattccaaatccattaacacatccaattccaaagccacctgaaaatacttctcatcggtcaagatgctcaagcatgcagcaccattcttttcataagcctgagcaatttcaacctgcaacaaatttcacactagttatgtaaccaagctttgaagtagcagcgaaaatgacaactaagaagccaaaatctcacaggattgaagttctccctgagcacacccctacttggcgatgccttcttgacctcagcgatcaacgctggcataccattgcgcttgaaggctgatgctaaagcaccgtagaagtctcttgcaggaggagcctgccctgcagcctcaatcacctccttgagaggcttcttggcatgcccctgcacaagaccagtaacagcaatcagccattgtacgaagtatcaagaatgaactacagaaatcgtttctccaaacaatattagaaacagacacaagcatgtcatttggcgtccaggtacacaattttatttttaggtaatattcccttgccattaattagaagaaccacaaactgagcacatcttccgagggatatcaaatattaagatgaaaaaaaagaaaagattaagcatcaaaaattctcctgcaccttgatcttgaacatcaagtatcaacagcatagctaatgaatgagtgtgatttgtaccaaactaaattattgaggtaattgatttgggtttatggttatatacatacctcggctacctcaacctccttgtcccaaatgatcttctccaggatgttgcggggagcacccagctcctcctcgatctccttcaaggggacattgggacggcagtgcctgcggatgcggatcccttgactagccgctatgtcgttgatcgacttgccgttctcccactgcgctagctccaccgcgttcaccatgtcgtcctgcgctagctcctcgagtatggagtccttagagaaaaatggaggagcatttcaagaaacgacggatataaacaggaaacaagaaatactccgaaatggcgctcaaaagagggcaaaaaaaacaccatgtagacttcgaatccgtgctcaagaaatgggg

SEQ ID NO: 27361 - DNA, 3481 bp, Oryza sativa
gcgcagggaaaggaaagccctgtagacagagggcgaggcgaggagggactccatcgcacgaggagcacgaggtgggtgggtgggtgggagggttggtgggatacggatacgacgacggggaagagccggcggcgatggggtgtctctcctcgtcgcaggagaatggggttttgattttataagccaaggcgggggaggtggcgacggcggttagcacaattcgcagaggcagcgacggtccgaggccggagctgaccgacgtgacggggcagtgatgaaagcgatgcccacaagacacggacccgttcccaacttggcctcccctgggcctgcctcgtgttctctcgctcttttcgttcctttttttcatattatttcataaacaaacaaaatactagtaaattatttttaaaaggtcctacatctatcctaaaatatacagtccgtattaaattttaaaatgaaggtaattttgtcttttactcagtccatccatcaagttagaaatattgtatcctcaagttacaatattttgaaatgttgatcataaataacttatgagatgctttctctaaaattaaataaaatgcatgtatagatttatcttaaaaaaattatactatcatagtatgattcacttatttaattttataaactcgttttaatatcaaattattggtcaaattttaaatgttttcataaaattttatcctaaataataaacatttatgggaagtatactatatttttctgcagcataaatattaactaggaaagctagattttttgtgtaggtttcatccctatatatagtcatagcttattcatcaggttattaaaatgaattatttgctatatgcatcgaaaaatatgttttctaacaaaataaagcataacaataatagtcgtgaaacggattattcatgtttgcattataatatgctaaaagtggatgttgtaatatgctacgtactccaagccaaccctaggatgcaaatcaacatattggtttattgaaccaacgtggtacctaagaacatggccaataaagactatcagcggtctcaacatgtcatatactagataatatcccgcgctttgctgcgggatttatgaatgagtatatgttaaatactattgaaatgataaaagctaaaaagttgagaaaataatgtgagaaagatgattaacacatacttgtttatctctataatataatattgtagatgatatgctatgcttgtatgggatttaaaatatactagaataatagtaattgctagtgagtgaagatgtggcatacttgcatgggattttaaatgggctagaatagtaattgctagtgggtgatgatgtgacatgtttgcatgttgagctttagcttctaataattgttaatgggtaccaactatatagaatgtatagataggataaagccacaataaagaccacttaaaggtatattttgcgttttagtccttaattattttttgtcaaaccttatagtactatttttattaccaaatcaactaaaacttttatattttagaccttacaacaataaaaatatatatatatatatatatactcctaacctctatatggacccagcgcaaacctctccccccatcttctttttctctcccttatcccactctctttctattccgccaccatccatggatcctcttctcttgacagtaacatcttctcagccactaatgtcaccttctcttccaccgttgtaatgccgcctctcccccatctccttatctatgagcgatggcaaatgatcctcacagcgacggcggatctggccgcaagctcactagcctttcccccctccccttctctacgagtggtggcggaggatccccacggcagcgacagacttggtcgcgagctcacaggacctgcagtggcgaggagcaacgactatctcgctgagagccctcaacagtagtggtgagcggtgacaacctcggttacagcaagcagctacaaccacaacaagtccggttctgtttctcttttctcccgaaagcgtgtcgcggggctccggacttgcccaaatacgtggcccgaagtaggggtggaaagaagccgaacctagccaggcttggctcggctgctggaagctcgcgaaagccaggctcggcttggctcggctcggttctccaaccgagctatacattaggctcggctcggctcgtgggctggctcgagccggctcgagctggctcgtgagctttgcaatagcagcagttgtattgccagcagcagttgtgttgctttgcaatgacttggttattcagataataactctcaagtccctacaaagataattaggtatattgtatgcagccaacatataacaaattgatggggttttttggttttcggccagaagtctttctattcaaaccgagcctactaagctcgtgagctgctcgcgagctggctcgggctcggctcggttcacaaacgagctaaaacccaggctcgggctcggctcgtttaggattcgagccgagccgagccaggcgagcccgagccgagcttgagccgagttcacgagcccgagctatttgtccagccctagccccgagctgtgtctttgtagctcccgacccgaggcacgacaaggcaaccagaacctctgtaggtcgtgcatggtgtcgtgagaccttggtccctaccgccacgagcgtttaggtccgacatggaggctcgagaccactttatacagtggtgcattgagtatggccttaagcatggaggatcagaggagctcagcagtaagatgagtactagcacatgattgatcagcagtaagatgagtccttctagcacatgattgatcacagtgcttggtgagaacctgcggttgtgcaacacatataaaagagtaaagtacatgttcgacagaaatcactcgtatcctcgtactcataaaatgcagaataagcaaactagtgtttttctgttcagcactagtccaaattagtagtcctaacccattctgtgagctgaaatggcattgcgtaatttggtgattgatgaaacatgttcttgcaccatagtccataaatattggtacttggtaaagaggagttcccagccattcaccatgtggttttttcaggtaatctcagatcatgtgtccatgctttaatttgtttgttcgtgggcaaacaagggatgaggcggccaggctgcgtttgcaacccctttccaaaccgctctcccacgttttcaaactgttaaacaatacgttttttaaaaaaaaaaattttatacgaaaattgtttaaaaaatcaaattaatccatttttttaaaaaaattagttaatacttaattaatcacgcgctaatgaatcgctccgttttccgtgcaaggtgttggtgttgggagtcaggggtggtgaacacacctggcagtgatcgaaagagtgaattcccaacactcccctctcgtttt

SEQ ID NO: 27362 - DNA, 16697 bp, Oryza sativa
cggtgagtttaatttcttgtttgtaagcttcaaatgattttctcataaatcattttgtaattaaatccgattaacactgttttattcattatagttaaatcatcttcggtgattatattttactgaaaaaaatttaaatcatcttcggtgacaagtgagccgcataaaattttagcttatctcaaccatgttacatctctccaatgaatataatctactctggataacttcattgacaatgttctagcttatgcaatttagtatctctttccactggtagacgactagacgtcatcaatataatctcgatatgaagttgtcaaactatcccaaagcagtaacatgtatataagcattttacagtgtgtaactgtggccattacgcactacggacaagtttagcttagatccatggcttcgccacctagttcgaccttgtactccaatccgcaacggcattttactgcatcagaaactccctacaggacaaggagatgatcagctaatcaccactgctcaaagtagcttcaccactccctatcggcagcatagtatggataaggtaaccaaactagatagcatcagcgtaccttcatttcatttatacgttcttcaagagactgaaagtactcaatttctccagctttatcagcttgtagagctttgtgttcctcctctaaggatttcatatccatctgttgtagtggagcctgcaagcaccagagttatacaacatcacaaatgagaattaaaaacaatgttagaatggtagaagagcgtgcctaaacatacaagaaagccagaaattgcatttttctcttgctctatgacctgcttactctgaaaagtaaagacataatcctttcagtttcacccaaaaataggcataatacaacttgcagatgtcatagatctaaggatgggtgtcagaattggagtacttcgctgatttccgtaagaagtgctgattgtttttctttgatctcgtcgatcttatgtttagttgactccagttgaatcctgagttctccttgcttgcttccaatgtcatttccctgtttattagttagtgacactctggatcatttttaagaggatgggatgagatattaatcaccttatctaggctcccacatgagttaagtattccatggctttgtcctgcatacaaacaacacaaccaagtcaatgtaaagttgtaaaaattgttcatcattataacttaacacaagatttctctatgtcatccaatgtttagacacgctacaaggcagagactgctaatctaacacaatgaaaaaaaattctcaattttagtgatgcagcccaatcagttctaaccatatcaattggtgcttttagattaacaaaggttggcactgtactgagactctgggagggagggtggtgaggaagactgtccagaaaagaagattgcagaaacttctactccatgctcaccagttaatcaaaaaggaggaattagttagatatgtaaataaacattatatgattttgttatagcctttgtaaagagagcatatgatgcaaaaatgagtgggggaggacctcatcaatcaatgatttctagaataaacagtggtttggccagaaaagggcaggtgcatatgcctgagctgaatacataggagaatggacttcgctattccttcttgatcaacacttaacctgatccctctttatacaaggtcggcttcctaataatctaagctacgtatagtaatcaaatattaatttaggtatctaaatttcatgccaacttttagatagaaatgctatgcaatttatagaagtctccagaatccagatatcttcttatcaattggtgccacttccacacaaagcctgaactggtgcagctgcacatcggctcctcctttgatactaccaaagtcaaagtataacagcttttagttctaatccacatgtgcataataaatctacaagtctgaaatttcacagattgagccaggaagtgtaactcatgcccccaacttccaagaattgcaatcagtgcaaatgcatttgtcatatgtcatatgtgtacttgtgtagggcatgcacatattaaaagcatgcagtctgctttgcttcatggccttcctcagcacctttcatggtagctaactcagaaacacagattgatgcaattagaactgactggactgcacaataacatgtttcaactatataatgaaaaaaaaaaactgcacaatcaacataccacatattgacgcttaccaacatggatacagaaaacccatgaaaggacttaagtaagataggaaaaaatagcattggagccactatttatttcacttcatattcagaagagctgtaccttgaaggttttgcttgctctgagactcttcaacctgaaagtgtattataacacactaattaaacagtagttgcttcattgtaacagggcattgaaatgaggagcagaggttacaagatgatatcattgaaaaacaagtgatcctatctgctcgaaatacttgcagactacatgttgaatatcaagcggaagctccctgattttaataagcatggttgagataagggcccttaggcctgattgaggtgtatctggacagctggacccaagtagcgacagcactaagggcaggggagaagagggagagatcaaagacttgtctgttgttttggttaatatatagacacgagcctacacttaccaatataaatgagatcagttgatccttgacaacttacctgtaattcaactccaatctgaacaggctttgtgaacagtaaccacacgtgaacagtaccatgggtactgatcatgtacacattgttgcgggccctagagagattgattacctcttaaatatgggcctaatgggtgacacatggcactgataaaattaagatgacttgataatttgtccaaatattccagaattattttccttttacacaagacttgggttgtcattaataaacacaatggttatgatgctcaaattaacttttactttggtaagtggttgccttatggtacagagaatttttagttactggtgttcctggtggggcatatatactatatacctcatgcaacttattagtagcataattggtgaagtgaatttataaatagtccacccaagtattaaacaacatttgttgcttctgttctctgaagttctattggaaatttggattttgggtaggataccagtactggaataaactggctaatatatttttgaatttgaatttaaaattcaaatttgaaatttataaaattgctatagcctcatgtgtcacctttatgccatcacatatgcaatagccaaaagaaaatttattatgtcttcagctcatgctaattgtgcaatgacctctagacatatatatatgtgtgaaaatgtgttatatttgcgctatggactctagtgatatatgtatctatgtgctatatcatgtataatgttcatctctaattggctcatgtattatgttgatctataatttgttatggattcatgcatcatgttcatttggaactataagattgcactaattactatacacaattttccagatggatactgttttcaaattaaatgtttggacctgaatttttctccgagtaaatctggtaaatggacagttctggcgaataccagtatttcataccttgtcattactagctggctcaaaacaagtactagtgtaccacagtattaaacaaaagggcaataagcaataacagaacttatctccctccgtcccaaaatgtaagcatttttagctatgaatctgggcaactgtgtgtccaaattcatagccaaaagttgctatattttgggacggaggtagtagtaacttgcagtaacagtatacatataagtttctttacttacataaaaataatcacaagaaaggaaaacaatttcttcaaattacagtaacatatgcgtaaggcttacagatggttcaattgtaatcaccttaagcttaaatgcaccaagccattcctgtgaaagaatggaaagtgttacagcaatggaatgataaatctggtatacttcctcatggaacataaaactgactagaaaagataaacataggactaaaaaaatatgttaacctgttgctcttgtaatttgaccgtcaggctttctattgtctttgtgtagaacaatctgtcatgagagcagaattagcgtaactacgatttacagtacatccttttgagagcacaggctacaccttttctcaatgagttttgaagaagtacttgcgatttcctgatggaggagctccaaggtctgcaagtacaatggaggaatgaagacagaagtctgactgagaatttatgaagttagatagacaaaaacaaaaacagcaaacaaaaaatgtccagatgataagaaagatgcacggcatacagaattttggattatactactgttacaaaagtctaatatcagagggccttctggggccttcctgctatatgaaattttcatgtgttgtgggactgggctagggtaagagtctaggctgttacgcccttttgatgagctataaagaccctaaggctgcgttcgtttgggtgatagggagtgagaatgcacattgttttccgcggacacgcttcccaaactattaaacggtgtgttttttgcaaaaattttctatatgaaagttgctttaaaaaatcatattaatccatttttgaaatttaaaatagttaatactcaattaatcatgagctaatggttcacctcgttttgcgtatcttcccaatctcctcaatccccttttcctcaaacacaccctaagacttattgggcgtttggagttttggactatccgtagagattgattgattaatggaagtagatatatatccatccttatatggcatatctttaatattacggaaaagatgattctaaccgatctaatcttatcaaaactaattcgtggcatagtaattacataaacaatatgtggtgcaccgatgttacactacacatgtgaacaatacccgagcccataccttaggcctcttcttttataagctcatcacaacacgaaaatcaatgggaaattttacataggatacaataaataccagtgttctaaaagacagcactaggcgccagatagctgccactattaggcaatagatggtgcattaggtcactgaactaccttgggaggtaaacatgtttgaactggtagcagtaacagttggttttacaacttatccctcctctcatatcctgttctcatatcctgtcaaacaaaacaaatcgcgctgataggttggctcttcatcctctccatggatataaaatactcgtccagttaaaatggcataaaaactcatgcatgatcagaaaagttattcaatatgctccaatatatagaaaatcagaaaagttatttctggggaaagtaatgctgtagagttagaaagagattttcagtatattttttcagattagaagcaaaatatagagaaacgtggtttgagttttcaaaacacaatctcagtacacaaaatacttgtcaaaccaaagaaaataaatacttatcatcattgtcatttccatatgccacaaactttttgtaacttctaaagaaatatgcctcataacggtttatggtaagctcactaatgtagtagtgggtattgtgaaaggttgtagaagtattagcatatgtgagaagtgtgccaaagttagtgacaacaaaatttttcccttgtctctaacaattggcacattttgttcagattaaactgacaactgttcacagacagatctaactagtaaatgtagctctctattggttaggaacgaatagtcatatgacgaacagagcatgcaagtatggtggagctccaatgcatctgtttatgtatgaactttaaaagtgtcatttagaacattaagcacaacaatgtttaccacattcaattgaaaaggcaataacataaatacttgatgaccagtttcagaatcaccaaacatcaaattatcttgcttgtcattcattctacacggctaaaaatttgggcattacaagaactatagttttgtaacctccaggaaagtgatgcaccaaatggaatcaaatattaaattagaaaagcaggaaattcgtcccaaatgggataaaatttcgactctacagcaggcaggtgaataaaactttcagctctctaatgttaaacagcatttaattgtatagacctaaaatggtttatggacgtttcatccacgatagacgaaaattggtactacatccaaggcaccaaaaaaactcattgaatgtgaaacgactggcaccaagcagagcactagaattagaatgatcagtaccgggactaatcacctgcttcagcgtggcgcactcaatctccagcgtggcaatcctgccctgcttctcggatatctctacgcagagctccgccctcgccttcgaaagctgctcggactcctcgctagcctgcttcgtctgcgccctcactacccaaccaaaaaccccatagcacgagaaggcgttaccggaggaaagaggcagaagcagggccaaaggggctgggcgccctaggggtggggggaccttgggcgaggtcggcgccgtgggcgtcgatggcagtgcgctgccgctgctcctccgccgaccgcttcgtcgcttcctcctccagatctgcaagaccaacaaaacgaaacaggcggaattcagggagggatgtggattttgggggatcgcagcgcaggacgcaccgctcatgtaggagcggagggtcttcatgttagccaggtactcctccatggctggtccgccggagtggtggagcggaacggaggagaatacgacggcggcggcggcgaggagaggatggagacgcggcggaggagagtatgggcgagcgagagagcgctctcgaggtttccgttggaagtgaggtttatgcttttatccaaccctcgagaaaagaatttaagatcatgtacttacctccgtttatgatgtatagcttcatcaggagatcgctaagtatttttttccaccacttttttttcacgatatagtttttattttcggataagattatatacctaaagtatatgcctataaagtttatacatattttataggttaaaattttatatacccgatcaaatttaaatttggatttaaatattcttatatagaatatttctatacataaagttatattataaatcaaagtctatacacatgaatatatttttaagggtattagattttatttactcttttttatatatatttttaatattttaaatttatgatataataggaagggaagaaggagaagtagcgtacgcaccaagaggagggacgggggatgattgtacgtaccaggaggagggacgggggatgattgttctgggttatcacccacccattagccctccccgcttcatcatcttttttctcaaactatccttaaactttgattaacacatcgtcctattgagtacaattttacatttgactatttatattttttttaagagaaaccatttattgatgagctcgatgttttatattttattattgagactagcaattatgtcagagtgttagaacgggaagaaaaatcgataaagttagacagggaaagagagagaattgttgacaaaaagccgagtataataagttgatataatacaaattaccaaagactagtcatttaagaattaacatatgcatgtctttagcatgatagtaacaatgctaacaatgtggggggataatgcaaactactaccaccttttttaataaatgacaccgttgactttttgtcacacgtttgaccatttgttttattcaaaacatttacgtaattattttttgtgagttgttttatcacttaaaatacttttagcatgatttatatcttatagatttgcataaattttttaaataagataaatagtcaaacatgtgacaaaaggttaacgaccgtaatctattaaaaaatatattaaaaaatagagggagtacttgtctttttacttacaattcagtggcttaaaaataacaagtttggtaactggtaagtagaattacccctgagtcttttcataaactaagggtgtgttcggcaccacatgttctcaactcttctccctcgtgttccgcacgcacgctttttaaactgttaaacgatgtgttttttgtaaaaagtttctatacgaaagttgtttaaaaaaatcatattgatccattttatttttaaaaaatagctaatacttaattaattacgcgctaattaaaaaaagaaaatgcaaactgggagagagagagagtgaagagaggaaggggaggtatgacaagtgggtcccatatttttaaaaagaaaatacttactagattgccacgcgtacgccacgtaggacaaaaccgctctggattaggtcgaggggagtgattcgtccggtattgaaagttcagggtgagcaatgtctgtttttcaagtttagggggtaattcggtcgaccgcgatagtttagtgggtaattcatacttttttaaaaaaaaacacatgatagataactctcgtactcgtattattctggttgttcacagagtacaaaactatctatagacagcaaagctatatatagcttttgaccgttagaaatatgtggggtcgtacgagattctcaagcaaggcgagcagaatttcagaagctgacgaggaaaacagaacaaaacaggggagaaacaagcctacagatgatggctcggtctatcccgccggagtccggtgacgagaacgtctcggcttctgccgatggtgtgtatgcctccttgttcattctctgcatgaattgcctttcctacactgggaatgcaaatgaaattctctcgtggtagaagatcgaaattaagctactagctagtttctcttggagaatgaaatcaacaacagttttcttccacttcccatttgttcgtgcaaaattgctgctaaaatatttaacgattttactcatgtttctttttttttccccaatggaatctgaacggctcagtgttgctttgctaaaaacatgagggtttgagaacttctctcgcaaagacatgcaggcggcctattttagggacagaagatgacaaaagaacatcaaggaagagggcgtacgtgtagagaaagacggtgaaatattttgccagccagccggccggccggagtccgacgatcgagcacattccgatggacactgcaggcggtacaacaaaccacgcctaaaacctcctttacttgtaagtcatcgtcgcaaagttctaccacaaacaagtgaaacgcattgatcgtcaatttcgtaaaaacacttcaaatgcatagatcataagctttcaaatctcggttgcatatcgtttgctggttagtttgttagccatagtcaagatttgaattttgaaactttacttgggagttctttttcatcgtaatctatttttagcattagcttttaaactgcaaacaaatagatataaaaagttgtgattagttcattttggaatttgggattatttcattcaattttgggtcattagaggaaacacttttaatcatttagatggacatccacccatttgttgcctgtcaaattaaatgattatgatttttttttaaaaaaatggataagatatattaatacttcctctatttcacaatgataagatatattagggtgccatcatttggcatattggtggaataagctaaacggtatatttgcaaatgaaaagtaatttgtgaataaaatttttatatatgtgttattagcgatctaaaagcaaaggctgaaaaataaccttcaatgaaaaaaccctaaaatcagcttcaaatttaatattgaaaattcaaattttggctgataagcatatgaatatgccaaacgatggagacctaatacgttccgttccacaatgaatctagacatatagcattgcctacattcatatagatataaagaatctagacacatatttgtctagattcattagagtatctatatgaatgtgaacagtgctagaaaagtcttacaatatgaaatagggggagtacataatatgtcacttcataaacatacaagtttaaatttgacttctatgagttctaacaaaaacataaaaaattaactctaattagtatacgtatatactcacagttaaatttgtttttcttacaactcgtaaaagttaaatttgaacttgtttgtttaagtgaatattcatattaatctatcttatcttgtcaattgttttgatttattattttgtaattatctagttgacatgtaataaatatatgaacatatccaaccgaatgattaaaagccctctccgggttatcagccataatcactatcagagttttgtgtgtgtgtgtgtgcgcactgcagaggagggcatggaggaggaggtgaacgaccacccgatcgaggaggtccggaacacggtgccggtgaccgacgacccgtcggagccgtgcctgacgttccgggtgtgggtgctggggctctcgtcgtgcgtgttcctcgccttcgtcaacgagttcttcatgtaccggaccacgcagctgagcatcggcacggtggtggtgcaaatcatcacgctgcccatcggccgcctcatggcgtcgacgctgccggcgaggcgcctccgcgtcggcggctggtccttctccctcaacccggggcccttcagcctcaaggagcattgcctcatcatcatcttcgccggcgccggcgccagcggcgtctatgccatgaacatcatcgccatcgtcaaggtgttctacaagcgccagatcagcccctacgccgccatgctgctcgcccagaccacccaggttgccactcatgcattggttgattagtaacaaatcgaagacctgatcaaacacacattgattaatccaaaaatggccttttatttgatttcatacagttgcttgggtatggatgggccggattgttcaggaagtacctggttgactcagcctacatgtggtggccgtcaaacctcgtccaagtcaccctcttcaggtaatggtactaattaccagcagttattttgtcgaaatatttgtttctgaaaaatatatgatgcaaatggggaatgggcaaacacaaactttattttgagcattttttttttttgcggggaaacttataagcaaaatttggaatgtttgtcacgcagggcgatgcacgaggaggagaagaggaacaaggggcagctgacgcggctgcagttcttcatcatggtgatgacgtgcagcttcgcctactatatcgtacccagctacctgttcccggcgatcagcaccatctcggtgctgtgctggctgtacagggactcggtgacggcgcagcagatcggctccggcgcctcgggcctcggcgtcggctccttcggcctcgactggaacaccgtggtgggcttcctcggcaacccgctggcgtcgccggcgttcgccatcttcaacgtcatggccggcttcgcgctcagcacctacgtcgccgtgccgatcctctactggaccgacacctacaacgccaagcgcttcccgctcgtgtcgtcgcacgtcttcaacgccgccggcggccgctacgacaccgcccgcatcctcgacccggccaccttcacgctcaacctcagggagtacgacgcctacggccgcatcaacctcagcatcctcttcgccatcaactacggcatcggcttcgcgggcctcatgtccacgctctcccacgtcgcgctctaccacggcaagcaagttttcccgcacaagctcttgctaacttagtactcccgtcagtcataaatatttgatatgtttatgacaagattcagctaaccagcttgcaaaacttttgacttcaatttgttcgagcagggacatttggggcttgtggcggaaggcaacggcggagcaggcgaacggcggcggcaaggagcgccaagacgtgcacacgagaatcatgaagaggaactacaaggccgtgccacagtggtggtttcacttgatgctggccatcgtgatggcattgtcgctgtacacctgtgaggggtttggccggcagcttcagctgccatactggggtctcctccttgcctgtgccatcgccttcaccttcacgttgcccatcggcgtcatctctgccacgaccaacatggtcagcacaagtagaattactttctctttcagccttgaattaacgttaactaagctagtatagtagtaaattgcattattgttggttggttgtttctttcagcaaccagggttaaacatcatcacagagctcatcatcgggtacctgtacccggggaagccattggcgaatgtggtgttcaagacctacggctacataagcatgactcaggcgctgacgtttgtgtcggatttcaagctggggcactacatgaagataccgcccaggtccatgttcatggtgcagctggcagggacggtggtggcgtcgacggtgcacttcgcgacggcgtggtggctgctgacgacggtgaggaacatctgcgacgtggacagcctgccgctggggagcccgtggacgtgccccggcgaggacgtcttctacaacgcctccatcatctggggcgtcgtcggaccgctccggatgtttggccgtctcggcaactactggcagatgaactacttcttcctcgtcggcgtcctcgcgccggtgcccgtctggctgctgtcgcgccggtacccgcgcagcgcgttgctccgggacatcaacctgccgctcgtcctcgccggcgccagcgggctgctcccggcgaggtccgtcaacttcgtcatgtgggggctcgtcgggttcgtgttcaaccacgtcgtgtaccgccggtgcagggcgtggtggatgcggcataactacgtgctcgccgcggggctcgacgccggcgtcgccttcatgggcgtgctcaccttcgtctcgctaggatacttcgacatatacggggtgcagtggtggggtggcgccgccgatgatcactgccccttggcgtcgtgccccacagcacctggggtgtttgccaggggatgcccgcctgtaccttcttgattgatcaggacaccgcatctacatgtatatactccatatgacagatggttactcaaatgtatatattatatcctcttgtcttcctctcttttgccccctcctcttcatacactgtagatccaatggtcgccactcgccagccggcagtggtcacggcctcaccggtgcattacacctgcaatgcaaagtggctatgagcctatgaaggtgtcagtttcttagacagcgagccatgctcgcatgtgcctctttccgcctgcctgcttggatcctaatctggtcggtctttgtgctgtcctctggtctctggttgctattggcacaaattgaggacttttggttgtgtgttgcaaggcttcatgtgaaaatatagctcaaagccagtagggatgacctcgagaggcatcggttccttatgggatggttaataaggttctctttgatcttgccccattatgtctcattgggtgaaaaacaatgattcagcttatcagaccgaatgacaacgctgagtattggccttacatcatgttggttttcgccttagaatccattaaaacctatatctctggacaactgttaaaactcaaaaattctcggtttgtgattacgcttatccactgaacaaaattttaagctccggtccaacaaaaatacctcgaggtatcagtacctcacggtaccaaattgtttccgtgggtgagggctggatcgacagaggcggcggtgtgcggagagaggggaagagaaaaaggaaggaggaggtggctaccttgtgacggcgcgggaatttggatcggcggcgatggcagtgggagaggggaagacagagagaaagagaaaagggggcatcgacggatgaggatttgggagcggggaggtgagcttggggtggtgtagcgaacagcgaagctcgccggcctttttataggcaagcgtcggcgctatagacgcgggagaggcggttgcgcagctcccagtgcggcatggatgtgttggccgtggcagcgacgtagtgaacacttggtgcaggtggcagcaccatgatgttgcggggcaacgcggggaagatgggacacagggaggctgcgatgcgacgtgacgaggatgggttgaatttaacggcgcccttttcgccgcccaattggtcaccaccagctatttaagtgacgcgcctccagtggcgtcactgtccttctcccgtcctcccccctcccccacacaaaatccaagccgttcacatgactcctatcctccactctttgctctagtgtcttccgttcacatcgccggaatgcgctcgcctgcctccacgtcgcgtggcgtcggtaggagttggtcgccaaccgccacgccgcgctcgacatggggctaatcatggggggaaacctcctccaggccgacctcgaggccaccaaatagcgcgcatcatcgccaaccccgatgaaggcagcgacgcggaggctatcgatgagtagacccggtcatcgtttctctcccgcaacagcacggccctccgccgtcgctcggctcctgctcctgtccctctgcaaacgaagagaaaggagagggaaagagagatagaagggagagagagaggaggaagaaggaaatgatagaggatggcatgtagggtcccaacatgacagtgtgtcccacaattatttgtgtgaacaacaaatgggtcttacatattcttttaattttaataccacataagtgccacgtcagcgtcacgttggatgaatactaggtcaacaccgccacgtaagcgctacataagcaaaaccgccctctaaaaccgtcaagggggtcaaattgcaccggttttaatagttgaatgatctgagatatccagtattgtagttcagggagcgccatgcgaagttacaactggacatgcaagacaacatagatcaatggaaagctgacgaatatagctatagtaggggaagtagtctatcttctccaccaagctgatattctagggttttgctggctatagcaattgattacgcaactacgtacaaatacttaattaatcacatgctaatggaccgctccgttttccgtgcgtactgtttaggcggggaaccgactagagcgaacacaacctaagagcaagtagtaattagatgagtagtgaaggtcagtagaaaaaagtgaacggtcgagggttatgattagttggacagagaatgttagtggagaagttatattttagaacaaatactataggctaaaagttattatattttaggatggagtaactactatatgagttggttgagaggttatcagattgtataactgcagacaccttataagatatttcctccatttcatattataagactttctagcattgtccgcattcatatagatattaatgatctagacatatatgtgaatagattcattaacattactcttcgtttcacaatgtaaatcattctagcatttcgtagattcattaacatcaatatgaatgtgcgaaatactagaatgatttacattgtgaaacgaaggaagtatatgaacgtgaacaatactagaaaatcttataatatgaaacgaagggaataatctatacttgggtcctatagtgtatagcttggttcaattggtacacgtgcagtgtgaacatctttggaataatagtgtattctgcatctcaccatgtctccagttaatatagtgcaatttaaatcaaaccagatactaatgaactacaccggctgaaaatgcaattataccaaactagtttatccgaagactactgagccctgcaaggaaaatatgcaacgatatatggtagccatatagcacccaagaagtcagcattcattagcctatagcacccaaccaacctacaaaattgccagcgcagaaaattgatacgcatacaaattaagatgcaagctgacctcaatggacactaatgattacgaaatttttaactaagaacagaagaaaaacgatgatatactactatgaattcaagatacttcatcgccatcatatcaagcctatgataggaaagatccacagaaaatatgctccagttgcatctcaaatcgactaaatacgagctaaactaacagccatagtgactttgctatctaatcaaagcatatgtgcgatctcttgaattctaaacactgaaaaagtgattttaaattctacaagccaatctaacaggagtcaggagtggtacagcaaccttagcagagccaatctaacaggcgtacataaaccttagcagagccaaatctagcaggagaggtacataaccttagcagattaaacttcaactcttcttttctagctgcagataatttatcttgccttgtctagtaccgaccttctgcaagcttatctaacacacacatggcagcatctgaagctgtctaccttgcatatggatgataacgaccagaagcaccagcaccactgctaccatagcctcctctagcaccatagagtccacccgtgccaaagccaacaccagcaccaggacct

SEQ ID NO: 27363 - DNA, 740 bp, Oryza sativa
tcattttccgccgctggtcgtcgctgccccctccggtaaggactccctcccccttcctttccttccccatcccgcgtgcgccgtcgcttttggtcacgccgctgctccggctatgcgccgccgccttcgcgccgtctgccgccgccggtcgccgccggtggtcgtgcacgctgccgcctctagccatggccggccagccggctttgaagccgagccgagcccggcggctgctccctgcgccgtccgatcggcccgaggccgattcggaccgtcggtcccgtggaccggcggtggactacccgcgtggtcccggtccatggtggactggccgctttgtgccgctgacccatggggcccacgtgccggcaccccctccctctccccttgcaccactgacatgcgggccccgcatgtcggcgccgcccgctccctttgatgacgtcggccctgggcatttattgcgcaataattcaattaaggattttttctgtttatagtaaaaacacagcgaatcttctaaaattcataactaattcatccgagctccgtttaagcccattaaagtctcagtaaatcaagaaaaatgtgtagaatccattaaaaatagttttgttctctgtttcagtagtcttatagcctgtttgtattgtttgctttgtatgtcgcttagattccggttcttccgacgctccggtgtacttcgagatagtcgccgaggttcctccaacagcagagcaagg

SEQ ID NO: 27364 - DNA, 558 bp, Oryza sativa
tttttgggataattacgacctgattttgtttcgatgacttgctctcgcctgttctactaccattgcaagcctgtgctgtgcatatcatttttttttcaaaaaataagtgttttggtttctcttaagtacggcattgggatattcttcatttgaaaaacagcagcaatttctgatttcttaacatcaccacatagtttgaacacaggatgtgtaccgtaccaaaagtggattttaatcttgacgactacactctccacataagagaattcatcagaagctagaaacagaacggcttttgtgttttgtcatttgatccaagcgtaaactcaggatggaaaactggaaccagaaaacttcgactttgtaggctcggagaaaaatattcactattacaaaaatccatgcaggagtcaagttaaaagaagaaacagggttctgtctttgagatggagtataatttatttaagatcattccctccatcccatcatccatgagtttgcaaacttcagctcacattctaaaaatgaagatgccaaagagagagaagggacagcaac

SEQ ID NO: 27365 - DNA, 1568 bp, Oryza sativa
gatgattctccacgatatcctcctaatgctccaccataagcaccatagccactaccatagtcaccagggccataagaactactgtaaccaccaggcctagtgccaaaacttccaggtgatctataggggccaaagctaccaccataattataagagttgcccaatccatcataaccatccgcatgtggacggcccctaggttcactatcaaatgaacgatgaggtgggttagagggtttctttggttcggccttcttgatctccacctacagcaaagcaagaaagtcaacctatattctcttaagacctttctacttccacgaaaatggagtgctaataacctgcagcctatataagacaacgaataaagcaacagaaacataacagcaaatcagcaagggttctcccagaggtaactggaagaacacagtttattaacatgtgcaggcatagttgtaccaaactagtagaattacaaacttcaaaaagcaatacaccgagtctcacctgagaaccatttagatcaatcatattgcctttcttagctaataattcatctacagttttttctgcatcaaagactacaaatccaaatcctcgtgaccggttagttgaatggtcacgaatgatttcatgttccaccacctttccaaatttcgaaaagaactccttgaattcatctgtcaaattatcgcatcaacatgttcagtatacttataaaataataatatgagctagtccatggttaggcaaacaatatatacatgtaataccttctttcaaagcagatggtaatccaccaacaaatattttcttcgtcttgaaatcttttaggggggcagcaccctttggaatagttctcttaatttcaacctgcatgtttcacgttgaatcatgttacgatataaacagagtgagagaagcaataggcaatgcctattttttgctaaaggaagttggactagtatattaacttataaacttatgacatactctggtaaccgacattcatacaaccaagctcaaaggatcaaaagaagtcaggtagcaacaggaatcaaacaatttacctcctttcattaataacatggttgtcctcaatcactctgtcaacaacagcaggatctgcaaaggtaataaatccaaatcctctgggtttctgggtaaagcggtccttcattatgacggcatcaactatctccccatacttcccaaagtattctttgaaagtacctgcatgttcaagagcataacgaagaaattaacagacagctagagtaaatctgaataaaacaagcaataaaaaaatagcctcagattttttacttcttatataaatcttagaatacaagatacagaccaatgaaaaaataatttccgagggccacacgaagatcagtacaaaaaaatttgaccttttgtatgataggtaacaagtgcacatgaaacccaattaaataattcacaacatgaaaaaggcaaagcatatttggtagaatagaagtatcagacatctattatcaacaaatacatcagctattgctttactaaaagtttaagctatgatg

SEQ ID NO: 27366 - DNA, 1662 bp, Oryza sativa
atgtaggttcaaaaatattgtttggtccaaccacagtgccagtaccctatatcacacatatattagtttttatttggtgcagcatgaattgttaacggaacaactgtatttgtcgctacgtagtgcatcccagaatatgccaaagcatgccaccaaagctaaggtcgcaaaattgccatgctcttaatcaagagaagagctattctccaccgggccaactagaccagatcaaggaaattattacctccagaactaggtcaatcgcaacatataaaagctaaaaacatgaagatctgaacaagaaccgaaccataaataactaatcaagcatacgccaaaacagccagtaaacacgagggagaaagtgaatctatagcagatctggacttacccatggtggtgtccttaggcagcccgccgatgaagattttgctgcaggaagagcaaaccaaagacaaaaccacacgaaaaaatacatcagaaaaataatgccgaaagatttcggaaccgagccaccgtaaggagcgaggtggggatctgggggaggggagaaaggcgagaggactgacgctgggctgcgccgtcgtgctccttcatcttgccgccggccatggcgatagagagagatcaaacgggctagggtttcgcgtttcgttgaaaaaggcgggtggaaggggaggacgcgtgagattggggatttttatctgccagtggaattgggatccggaagcggctaatttatgtcggtttcgactttggactttggacgatgatggccactgaccaccacgcgaacgttcgcgccgaacgttcgcgcggaacgtggtcgcacgaacgcagggctaggctgagttcgggagtaactcacctaccccacacgtaaaacggagcaatacattttctcatgattaattaagtatttactaattatatttaaaatatagattaatataattttttaaaacaactttcgtatatttttttttgcaaaaaccacaccgtttagcattttgaaaaaagtgagtgcggaaaatgagggtggtaaattggaaaagttggtaaaagaactcagccgaatacgtaaggagtgggcataaataaatctctagcaagactagcagattggaacagaattaaggcttcttgcaatcagttaactttaaatgataaaaaagatgtggttgtgtggaatctgacaaaaaatggattgttcagtgttaaatccttttatacagctctgaaacttcaggaaacatcctccatgacaggggtatacataagaaaatctggaaaatcaagattcctttaaaagttaggattttcatgtggttgatgttaaaagagagtattctaacaaaagacaatttgataaaaaggggtggaaaaaaggaaacaacttatgccagttctgtgaacaaaaagagacaatccaacatttatttttcgaatgtccaatagtaaggttcacctggaacgttgtgatttgcgcttttggaatgaaacagatcaaagacctgaaacacatgctgaactcttggattcgatcttgtgacaaaaccacaaaacagctaatgttggttggtgtggctgctataatttgggccacttggaaagctagaaacaaagcttgtttcaatcaaattttaccacataatccaacta

SEQ ID NO: 27367 - DNA, 6891 bp, Oryza sativa
tgtttcgggcatttcatgctgttttttttctttcttctttgtttgctccatgtgagcccctggggagagttttctcctcgggtctaagaccttaaatttccacatttctttaatggaaatggagggctttttgccctttgcttaaaaaaataaatctctagcaagaagatttggtatttggtaatactttgatttttttataataataaatttgtttggtttgtaaccttgccaaataatgacaagtaattttgagaaccactatagcactttgtttaataaacgatgtatggcatatgacatttccttttcttaatccggaaaatgggaaaatattgagaggataattttttttattatttttacttcctatcttagttatgcagtacaacggtttctaaaatgaatcatcattacattctctttctccacgagggcggtgacctcccaactccactactcattgtcgatggattgacacctctgggtagatctgcaccatgcgactgaggtagccccttcccccctcccccggcatatgtaagtgtgatgcaccccctacatctctttctccctccttttcttacacaacgtcctcccatttattccatctccttccccttttcttgcactacatcctcccatttattccatctccttccccttttcttacactacgtcctcacatttattccatctccttctgtagcaacctgattctcgttctggagactaaactctccaagacaatgagaaagaagaggaagatgctagacaaggtgagaaaggacaccttccctggatcgcagtcgaagtgtgagattttgatagccgattcacggctcccgtccttattagatccaactcttgcatccttagaactgactgaacatagggatgccaagacaggaaagaatttgtcgaagacatcacaagacgataaagcaagccgatgacgatgaggaggttagttgtttttctttttgtcttttatgtgttatgctctaataacaatgtcaccttgcgatagaaatttatacctgatgaggctcacgccaaatagggaatatactctctgacaagtgaacattctatgcttttctttgcctactatctttgttgggttggtccccaacatatcacatggatgcattcgtggatgaaatctgagttcaaaatgcaagacttgtgcaaaactaagtattgcttaagcttgtagcttgagcatatccctgaaggggtcttagtgcaccagtcaacctacacatagaaagtgttggaacaattttgctttaaaaaaaaatccttcgaaaaccctcatggtagaccaagagaagaggaggaggaagtccttggatcagaatttccatacttgagtgtaataggagcgctcatgtaccttgcaaattgcacaagactggacatagcatttgtcggcaacttacttggaagggcatcaaggatatcctttgttatcttcaaggaagcaaggacatgggactattctacagaaataaccaagatctcaccttggtaggatatgcagatgttgggtacctattacacccacatatagccaagtcacagactggttatgttttcctatgtggaggaacaacaatttcctgaaaatcatcaaaacaaaatattgtagcaattgcgttgaaccactcgaaaaatcttcgcactatacgaagcctcttgcaaatgtgcatggctttgtaggatgattcaccacattcaacaatcatgtgaattgaacaccatccagacccctacaattatttatgaagataatgcagcgtgtgtcacacaagtggaaatgggttacgtgaaaagtaatctcaccaagcatatcaaccccaagttcttctatgctcacgaactgcataagacgaatgaattaaagtattgcataccaagtcctgtgaaaatcttgcagatttattcactaagtcattaccgacatcccttttgaaagatgcatccaagggattgggatgatgagacttagagaagtgcaaaaggagaattttgctaactcacttgctaaacttaatccaaattccagaatgacaaagtacccaataagaataatggtgtgggttgtactctttctcttatataagttttctcgcagtttcttattaaggtttttaatgagacaatatatccgtgcaacacacaaaatgtatgctatgtactctttcttcaattatttcccactaggtttttaagaagttttaatgatgcataagcaatacgtggtgaagatccaaggaagaatgtgagaaatttggactttggcccatgaaggccagtctaaatgtccaatacatcaattgtccctcaccctattttctatatataataattgactatatataaagggagggggacaccctattttttatatataataattgactatataaaggaagaagagctgaggcttcgtgtgcatacgcaatccttttaaactgctgtacgtagtagagcagttgcgtaataaagggatggcctagttatgcgtacttattttctaagtataacaaaagttgctaagtttatctaggagtctaagaacaagtctaatcgtagttcacaaccaatttgggggctgctagctggcgcactaatgacggccagcggcgagcacttccctcctataactactctatattagttaacacttaacactaatgacgggtaattagagaatattctcaagatttttctttctttttgggagatttttttactaacagattgaaaatttataagtcaaatttgaaaactttcgatttaagatttaaattttaaagtcaaattttgaaaactttcagctcgagatttgaaaacttttaactcagattcgaaaactttcacgtccagatttgaaaaatttgaaaactttcaacttgagatttgaaaattttcaactcgagatatgaaaactttaaactcgagattcgaaaacttataagtctagatttgaaatatttgaaaactttcaacttgagatttgaaaatttttcaactcgagatttgaaaactttcaaatccaaatttgaaaattttaaagttaagatttaaaaattactagtaaactaatcactaacttaatctaaactaattactattttttcccctgtccatagggcaggaatggcaaaaacagcaaaaaaaaaaaaaaaaaaaggaaaaaaaaagaagaaagagcggcgtcccaaaaaaaaagaagaaagagagaagaagtgtgcgcgcgtgcgtgaaccttgtgggccaaaggtacgtgccggcagccttatgggccggaagtacgcattggcaacacatgcgcgccaactagcattcacgccaatttgaaatcccaaccaatcaacaaaaaacatgttttactttttttttcccattatgcctccatacataggttcctttttttagcctgaaaataggtcgcttccccctcgtagttgatatgttttacggttcacaggataaacacagaaaaatgggaacagataaaaaataagatactaggaagcagccatatgggtgattcacaagtctacaaagataggagtaccacataccagctatgattcccacgtaaacagcgtttcaccagttcttttcacaaggttaagatcacagtggttgcgtagaacgtctggaataaaatcaaatgcatttccaccatatgtttgcactttgcactcgacttttgtcttgtcaaatctataacattaaggtgatcatgaacattcattgcaccatactgataaaacgagattgggtatctgacaactaataatctaaacaaagtttgtgcagtaccatgcaatggttgctctgcaactcagtacataaaaaaacaaaaacaaaaaaatggcaaacaaaattcctccattaaatattaggttcatatggttccaaagtagccatagaaaatatccaggtagatcaataggacaaagatgcttgaactagtttcctccttagttggttactctgtacttctgcaaatgggaaaagttcaaattagaccttagcaattgatccatgtatgcaataattattgtcaacagctgaatcaaacagagtaaatggaagttcaaccagattatcttaagagcaactgaaataaaattgcaaattcaagtcaacagagatgtttcccattatcttgtggtaaatgaaattcagcggagttacacccgctgagtcaaagcgccacttacaaaactcctaagacatgaaaatgcaataatgcataatttaagctatatcaatactgaacagatcataaattgcctttaaactcgatttgtgacaatgcattgcacagtgcaagcaaaaggcatggatggaagtggttactacagtatcttacagtgtgaagaaagaccataaaagtttaaccacaacagtcagagatggataataaaaaaatataccttaacagtgttaagcagaatctttgcttcactgttgttattgaagtggtcacgaataggctgaaaatagaaaggataacattattaagacaagataagctattggaaccataccgtgcaaggtcttgataataaacaccacatcattatccaatgaaaacaggtcaatacaaaatacactagtgcgaaattgataccacatcaataaaaataatccatcaaaactagagaaaatgacaatagtcaaatgaagcaaacaacaaataggcaccatattattgaacagaaagccaaatgtgggaaactttacctgcaatatttggtttattgcttttgctagagctggcttaacatcagcaggatgcaaagcaccagtcttataatcatcgatgagttcatccatgtttgtaaatgtcctgtttaacatcaatatgcaaaaaagtttaacatcgatgctttgccttgtcatgtcagaagatcaataatagactaacttaatgtgctctgattaacagactggtggcataggcaactaacttaatgattgagccaattgatggtaaataggaaaaattccaagttatgtagctcagaacagaacatttacttgttaccgccatttgcttccttccgaaccacctcaaacatttcaaaccaagggaaaacaatatacttgatgtactccaagcatgggttcccatcaaccacgttgggagggcaaaatgcttgttttatcttcaaatttacctgagcctgcaataaattaagccatgaataaatttagaactagtttgggtagtgatgaatacatgctctgattacaagtacataacagaagctgctatagaagaccaaaaagaaaagaattagcaaattgtagaaacatactcccatcttcctaaattgatcatcatatatgtttatacaccaagaccaaggataatttaaatcacatcaatcaggacatcatgcacacattctcccacaatacatgcatcgattaaaacaccatgccaattacacattagcatgctcacattctcccatgctgcactaattgtattatgatgaaatccgtgtccatgcggttatatgatgatcaatttgagaaattttgagttccactatatgatgatcaatttgggaaggagggagtaaatgagaattttatttatccactagaataagcaaaaggaaaagaaaaactgcaaatcagcatgtaaggttgccatagtagccattcaaaacaacataggtgtctatcaacccgcatcaggaaactaaaaccaaagtaaaatcaccagaaaaaacataaaattatagcacttagatgatgacctctcctaggtaaatacccttaaaacattccactatttcttaggaagggtctagcttgcccaaagattgggatggtcccgagtaaaggcacagttttttttttttcacaaagcatagtcaatggggtcacctttagttgttcctatctcacttatcagttagtactttctttcatccaagttagtgaactttcagcagttatccaacactgaaaacagaaggatacactactattggacagcccttgctgcctaaacttgtgttatgaaaggcataccgcgtaataaatatgttcttttatattacaatagtgggtgtcacaaggttcagaagttatagaaattgatacttgaataacaggaaaacctcgtcatcttccataaaaatggctgaggatggatcactctttgacatcttttcctggccctccttaaaaccagggagcatgtctgcaattcacgttaagggagtaatacaatttttgacaatgttttttttttttcagaaagaaggcttagcatcccaattaatttgacagaccaaaagaaaagtgtcccgcgctgtttaattacagaagataaaggtttaatcaacatgcaagggcagattaggatacgatgtgacaaaataatcggtttgtttttccttttgatgtcggtacagtactccctggctagcacattgaccttcctttggtccatgcccaactggcaaatgtctgcctacaaaaggaagggataattagaataagcttcatgcctatatgaaattctggattacagattcatgtacacacgctctctttacactgtgactcaaggtacttctcaaaaggcatggtgtgcaatagcataaatttactaaccttcaagaaaaatatatcagcacactgcatacaaggatagaatatttgggcagctgtcaactcatccgaatcatttcgacccataatctgacaacatctgtgagccaaaaatatatactcacttgcaagttataaaattgcagttacacttcaggctttggaagtgaagaagccattagacgaacatatgcaatccaaatgtggttacctcattattcttttgacatt

SEQ ID NO: 27368 - DNA, 1987 bp, Oryza sativa
tgtaagcctaaaacttttgcacatctaagcttcatgcatcactaaaaaaaacagcccacaatgagtcatggcagaagagaagaacacaacaagctcatgtagtgaatgttgtagccaaagatgaggtaatgcagcatgttttcaatttgtggaacaagaataaacctcaaagtataggaacagtgaactagagtattcttcttctctggtcgtggttcttagaaaaatatcaccatcatagttgtttactatccaaaccaatgcacgcaccgtctagcatatatcagattaacatatgcaccaaacttagtttcacccatctggtccatacagtgaataaagcaaactttataggtctataggtacatccaacccaaatttcaaatttatttgcacagagaacttaaagcaagcatattagtgcaaatctccactccccagctaggtgaaatcatggtaattccattgaatctttatgtagagaccaagttaacttctcagtaagtagcattccagagaaaaacatcatgtaccacataaattatcaggtaaaatccatttttatcccttgaactttcactaaattcctattttcaacctcaactacgaacccatatatttttcaaccccaaaccttaaaaaccgggtcaagtcccaagactaatattttaatggtgttttttaccacatctaaaacaacaaaaatatgttaaactattctagttgctaatattatagtgactcaacatgccaaacatttcccggggaaatccacccccccccccccccccccccaaatcttcaatcctcacacaatgtagtgataagagaaggagatgcaaggaagaaggatataaagcatatgatatgtgaagcaatgccgtgctagcaaccaatatagcatagcaatgtgattctcaacatggataaaaccagcaactaaaaacaatcatgggagaagtttgtctggtttcaaaagtttaggctgttttatagttcaaggtgaaagatgaactttgatggaagtttgaggcctaaaaatggactttaccctaaatgaactcggtagccacataggagcacattttgatgataataataccctacaaagtacaaatgtgcatatcccttcaaaaaattgcattgaagattgaaactttggaagaaaaattctatatttcacctgtcctgataaatttatgctggtactttttaatttcccccatgatgaattgaactctagtctctaggcagccgatgcgaaattcgatttcttctacaagaaacttataactatttcagttcaagttgcaacataagtagcaacacagatagttgagaccttgagcctccgtttggctacgcggtggattcagataatcccaatagctttacaaattttggtgtctggcaaactgatttttcctttagtttggtgttacaaagggtaatattattacagtttgaaaatataaaacaattgagggaattatgagggttagataacatattttaaaacaattcgatcggcaaaacaaacaaagaaagattgtaagttttagtttgcacagcaatttaaaaaaggataagcacagggcagcaaccacaaaccgagcctgggaattagatcgatctaaaggggggagaggcggcggattcaccgaacctgggcaatgtgcatgcggccggagggctcaaatccgtcgtagcagatggggacgggctttttctgcagcagattcatgagctcgtcctcctggatacactcctcgccgatgccccgcagcaactcgaaccggtcttggaggctcatggccgccatgcccggggcgaggtcctctacggcggaagaagaggaggacgccgaggcgtcggcggagctaccggacggcgccgaagggtccatgtcggcggcggcggcgggcctgcgtgggctggctgtgtccttccttcctgtagtatgtgcgagcggcgggcggctaccact

SEQ ID NO: 27369 - DNA, 3742 bp, Oryza sativa
agggagagggagagggagagagagggagagagagagagttaattgaaaatgttaaggatttgaggtattattactagaaactattggaatatatggcgtggctttgagccttcggatctgcgatgcaaagtttgtagattagatgaatgacagctatgagattcgagcttttctgtgacatccatgaagcagatttcaacaggaggagaggaacagtccatgtgttccttgtgtaagtgagtgaagggagtttggggctaaaaacctacatgacatcaatgaaattagcctaatgaaacccctctttctagttcttcctacttccagttctcgaagcattcccatatttcttgtttcgtgtctcagtttgatctcagatcaccataatcttcccatggacaatcttgactagttagttcggtggtggagttctcatgttgttgcgattcttttgcaataggaaatttgtgccagctattctggataaaatgaacacatggtattctgttggtagcagatttccatcagaagtttccccaattaaaattggtgctaccatccaaactgtattttagtgtacaaattacagtgctattcttttggagaaagacgtgtcatggtatggatatgatgtcttaacctctaattcggcaattcgaatacccaagctgaaaatccaatgtccacaactgcataatcatgtcttatactgacattggaatcattacatggcaaccaattagatctacatgagaatatatggaattgcattacattaacaactgattttctgttacaggtctggcattgttagttgatgttccaagagatgataatattacaggtaactaattcttgttgtttaatccatcaagatactgttagcatagtaaaattgtagttattgtttacttatctcagcatgtgttagtcaaacctaactattgaatttattgtattcgatgcagctaaaatgatggaatcattacatattcctaaaggaattcaacgagtgctatttagaacactaaatactgacaggtaatggactccagcatagttatatgctcatttgtggtaagcatgcctagttaactgttatgccaaaaaaaaatccattatatatatgagcacacatatagttcaaaatcttctgctttatctgttcagcatggtaaaggcattctttctctcttccttaatctatgtctaccgaccctctatatttccttctgagatccaccccattgattgttaaatctgttggcagtgggtcctactgtatactccttgcatttacatttagtttactcactcttgttttctcagatattttaacatcatgattaattgagctcattatgctactagagccactagccaaaatcaccaccttttggtttctatatgaaaacccaaagtgcgtggagtttttttagttgctgcaacggcatgcccttttcatgtgtttctctatctatttagaaatgatgcgctgctgtttaccctatttcttcctaattgtgtattttgtgcatccgtagtctacggatagttttattgcgtattcttataatctatctattatggaatttcctgaaataccgcacttagtaaagctgtcatcttgcaggcaactaatgtggaagaaagaatttgacactagttatgtgggttttatggaggatggcgcacaatggttggtatacaacacagatattaaacttgtcggtgagtttgaagtagcaatgcatccttttgaggttccttcactatatttgtaaccgactcttatattatttagcgtatgcaactatccgtacaattgactcttatcttaagcttgctcatgcaaatgattattgttttggcatggtttgctttgcaactttttgtttttacaaatatatctccaatgagacttttgctaaaaatggaccctaagcagagaggtgacatttggcgctgtgtgtacatagcacaacatagcaagatttggcatcgtgtaggtttctgtatggatgttgcgtggaaccttatggtgtgtttggttgggcgtatgagactggatgggagatggccgcccgagtttttgtggtgtttggttggagggcatgatggatggggcggcccggaatagggaatattccctcaatatgctggatgagtgcatatggccgatttggctggatgaagccatccagttttggactgggtgatgtgtcctgttctgatttgctgtggttggtttgatttcgtgttaagcaagctccaaatgattttttctcgtaaaccgtttatctaatttatgatttgattacacaattatatttgttataattaaatctttaaaacaagatctcggatgattatattttgataaaaaaatatatatgacaaatgggtcccactaacttttggtttttcccatccatgctatatccctccaaccaaacaagaaattggatcgccatatccatacaaaccaaacaaaaaattggatcaccatatccaacaaaatatggatggctatatcctatccatgcatgaccgtgaaccaaacacacccttagtggctccactggccattttacatgccagcctacatgttgttcaatcctgcagcatcgtgttatgaacagacggcaccaaatgtcatagcaccatttggaagggttctatttctgtaaaaagttttttctaggggtccatttgtaaaaaaatgttttccgaaaggtctactttgtgaaaatcactagtctattcctgtttttttttttgggtaccatttatcatattagattaaaattacagtgtcttccttccaaaaacatattattgtttcttgtacttacggacttaccctcccttgataatcatctcaatgtctagtttggtccgatgaataagcatttagctggaagcctcttctcatgtttcacaagtgtgcatccccatcttacatgtcttcctgtttgagcaatgtaattgtgcaaatttgcacttctaatgtgatgatcttcagaaatcatgaccttaagggacttcaaagagtttttgtgtgttatttcatactagtatacttgaactcatctttcaggatattgtgtgtctcaggcagaagcagacatcagctgaccttctgttcaaggatgatattaatattgaatagcacgtttgcaggtttaagtttgtgtcacgagataggtcttgaaacatataacacctatggaaatggtatactgatctagtatggttgcctgggggatggggtactgcatgctgtgtatactccatgcgacatagcattagctcctgtgaaaatccagaattattatgtacttgtatataaaaaacatgggccaaaactaataagtttctgagtaccctgggtcagctttttcttttttttaatattgaatgatttttttttcaaataatagtgtctggagcatacatgacatgctaactaatacacatttttctatgaatcaatgctgaaaaaccagagaaaaaaattacttaggaacaaaagatttttcttgacttgtgaccctccacttaaggtcctatttaatcaagtagtgatgcaaatgaataagattgaaagcatggtaattaaagtcaagtaggaaatgtcatggtctgttttgacactttttggtagataatgctccttttttttgttttttagttctttcattcactttctatgtagagaaaattccttgtgtgcacctca

SEQ ID NO: 27370 - DNA, 11656 bp, Oryza sativa
atataagggattgaaagagttttgaggtgcacacaaggaattttctctatgtatgtactatcagggcaaacttctgtattcttgtttatttaaccttggacgatagtgctctagaggtaatatttttatcgtggtggtgtggtgccctacactacagttattgttctgtaatttctcatttctgttgtcattttcaggaatagactatttgtctgttgcagcttttgatgacttgatcccgtcacatttagttcttctcaaaaacagggtatggacatgtttcctggagtaattttgttatgttcacattcactttcagaatatttatggctcttttatctttgttattcatcttacgtttgttctgatgttctgaactttatcttgcctatcctgtatttcctatactcggtcacttacaacatccagcttccaatagaaatctgataggaatgcgatgtagttaagaaatagttgagtgttgatatatattgtcctcacctaaaattttcttattcttcctagcttggctatgttgaattcaatgtgctaatatcctgttaggcttcctgatgacattaatttctaaactgaacaatgtaaagttgaaaaagttgattgacaattcggtatgatatatcaaagtatccaaggataccagtagtcactcctgaaatttgttgtgccattttttttctacgaagactaatttatgtgtggcactctgcccaaaagaaaaagtgaggcactgttggcacagcacgatatattacacaaactgatatgtgccatatggcagagtcaaacttgtccatacacttgcaagatgcggataaatcaccagactccagtgtgcatataacacaagtgagcacctctagatatatggaatgacaagaaaaaaagtttggtagcaggaatacccacaatctggtatcaacttaattaggagtaccatgtttttccaagaagctgatgtgcttatgagtgttgcagctcatattctgccgtatggaatgtgaatgttaccctacgggtatgatcgacgtaatatattctattttgtttttcaggatatcattcttgtcgagggcctcaaactggaaaatatcatgcctgggatatactccttgcactgcctgccacttcggctgcggggtgctgaaggttcaccaatcagatgcatccttataaagtgaaggggactaggatcagtgcgtttgctagtatcaatgcaacttcagttgcactggatcactgcatggtgagaaatccatttcataacaacgtgtttcatactatatcaaccgttcagcctcaatgcttatttctgaatttatccgttgcttatgcccagatgcaggtctgccaaataaaattgtgtcatgtcggtgctaagctcttggacttggaagctgtacagcatagtcgtaaaacacacaactatcgatgaactgcacaatgggcacattctgcgacttctcttttgaacaaactcaattgaagtttagggcccctttgatttgtatgaaaaatgtaggaattttggaggatttcaattctatgaaggcctttgaaataaagaattgaatcatatccaattctttaaaattcctatggaataggtaattctatgtacattttgaaggaaagttagtaagaggtctaacctccaagtctatctctctcatctgattcccgtgtttattctgtggtccaatcaaacggttattcctgtgttttgcaatcctctattttacaattgtattcctgcaagaatattgtgtttttcctattcctttgtttttttattcatacaattcaaagtggcccttagtcatatcattgtggaattattagtgcttctcagcaggcatggtgatgtttttccccctcagttccgtgtcaagtggttgcatcaattggcaattataaacttcatacctaatatataatttcgtatgcatatgcattttcgagttggatgagattcaatagaatgtttgattcaatagaataggatgagatttaataaatgttcccttgaaatttgttaagaatttaggagatttgttaatgactcactctaatatatatacttgactagcaaagatgcccgtgcattgcaacgggacaaaacaaagaataagttaagaatatagatattgttgtcaatacttagcataatgagatattggcatagaagaaaggggtggtcgttctaaaaagacccgatagtttcacatgcaagcggagtttactctcgtaatacaaaataaagccttaaataaaatttcaggccttaattatgagttacatgcaatatatcgagaagcacggagaatttggtgtctcaaataaatattggagaaaaaaatcggcactggtatgagatcatcagtgccgttatttaaataaatcggcactgatgtatttagtatacatttttcacggtttttcaacggttaattggatccacaccattataaatatattataaatatagtgtattgaaaaaataccattgcaaataaatcggatggatgccactacaatcttctaaaaatagaaccataccactccgtcacatcgtcgtcttcatccccgtccccatcccctcaattattgcatccatcattgttggctccaatctcctccctcgctgacggccaactccttcttccttgtccctcgcgcctccctcgtgctactccccgacttctgccgccgtatgacctcctctgtttccatccctcgcgcatccctctcctcgttccccaccatcagtcgccgctgacttgagtggatcgggggccttggggctaaggcggactccgcgagcttcgcacgtcgaggaatgctgctaccagcgttgacttgagtccctacagtggaagccgatgaacacgtgcatgcggatgcttgggacgaggcacttcttctcacccttccaacattggaccagccgaccaagttgcagaagctggatgtgtgtactgcaagtcatcgaaaccagcgtagaacaggtgaacgacaagttgggtgagggactcatattgcttgatcctaccgtggaagatgtcgttgaggctgaagtggttcgtgctttcgtggtgtactagccctcgtcggtgttcgcgttgtccaccgactcgccgaggtcgccgttgctaaggtacacgcacatgttgaatcactggtacaggtaccactcatggcagttaggtagcatgttgtcattgaactgtggtggcaggtcgtggatgtaccccttgcaagctccgcatctccggtgccttgtgccacgactgtcattgtgacatcgcatgcagacgaacgccttctaagctgctaggaaaagctgagtgttctcgccgtcggacgagcgattaacacggtaagctgatcggaggcgcgttgtcgaactatcacggagacagagacggcgatgtgatggagataacagaaatcatgacggagtaccacattgttctaattttagaaaaattgcagtgacatccacccgattttgtgaatagtaataatatttttctaataagttgtatttgtagtggcattgatccaattaattttttcttacctaccattgattaattaattaacgtatttttttttaaaaaaacaacgaattaattggagccgatcctatccatccggctgttttgttccagctccattgtcgatcaagccgaataaaaaaacaacgaacaaaaaagaacagacatcgaagccgatccttcctatccatccgccctctcgctctccgtccgtccttcgccttcgctccccatctctccctgctagcgacgccgctatgagcgcactcccgcccccgcgccaccaccgccatcgcgtgccgtttctctccagtgtgtaggccgccggatccggccgcctagaagccgggggccaccggatccagccaccttgaagccaggcgcggccggatctgcggggaagcagtggcagtggtgatggtctcatcttccaacgagcagcggctgcctcccccatctccttgataagcgggtggcgatgcggttcgagggtgatgatggatgagagggagattgaccatagcgccacaggttttcccctctattcccttctctcctcaacccaatccaatccctcgtacctgttatgaaacaacatggtgatctaatggatcgcaattgaaggcaaccgcgcctcttctctaggcgctccttgacaatagacacgatgccactccttccccatctataaattgtactgcactgatcaataaagaaatccgctcatttattccctacattcttgtgttaaattctctctcgctcaatctctcaatctctcgctcaatcaattctatccacgttcaacacgttattagagagcgaaggcgaaggagatcgcgaagtgaaagaagggagaaacatcgcttttgatctaacagaaaagcaaatagaagaatcattagagaaggtacgatacctatcttttcattggatcatggatgtcgttctcggcctccctcgccatcagcgcgcatgccggctctgccattttcttcgccgacctatgaggagcacacgctggggatcacgcggaggcagggctagggttggtggccgccgccactaccctcgccgccatgtgactgcaactccggttgtggttcccccgcccgtccctgttgtgcctcctcctccgcctccggttgccgaagcacctcaccggatcctcgtgtagggggtgcagtactgcgcccaccacagatggacggcagtggtgacactacccggcgagccatgtgctcttcccccggagatggagtcgcagccgccaccatcaaccgctccttcaccacctccaccgacaccaagccgacgccaacgccgttcccccactcccgcgccagcggggtctggccggaccggtaccctggctgcgcgcacgggggagccgcccttcttcaatccgtcctcgtctcgtcgtcacgccagtgaagccgccgctcgccgtcccggcctccgccacatcttcatcgccgtcccccatggctctcctagccgtacactccctaacggggtgctggggaatggcgtcagggctcggccggcctccgactccgacgaggattgggagccgtcagcctaatccggctggcaaaccgccagcggacggaggggcggtcggggcggtagtggatggtggatggcgacggcggtggatggcggatggcgacgacggtgaggcggcagaggaaatggatggagacggcggtggactctgtggcggtggcgtcggcggcgcccccaacggcggcgtcggcggcgcacctcggctgcgtcggcggcgttccccacggcgacgtcggcggcggatgaacggcgcccccctcctgcctttttattaatttacctctgtaaattgataatgttaaccatgattgtagggacatggcaacaaaagagttcgacgaaatcgccctcgataggactaactatcccatctgggcttccgatatcaaaatcaattttgcctctcgggggattttaaatacaattgaggaacccaatgatggggatccgcaaattgagcccaggaagctcaatacaaccctttttcttttaagactctacattcacaaggatctcaaacatgaatatatgttagagacgagccctctcaacccttggaaagctctaaaagagcgttatgatcagcaaaaggaactcatttggcctgaggctaattatgagagggttcatttacgccttcaggactttaaaactgtggcagaatacaaccatgctgttcataacatttgttccaggttgaagttttgcgaacaagagccaacggaggcagagaagatagagaaaactctatcaactatgcttccggaggacaggatactgctcaacagtatcgtgctaaaaatttccagaaacattctctgcttatacatacattgactcaggcagaaagacactatgagctttctttaaagaatgcccaacagcgcccatcgggctctgctccactgcctaaggtgcacttcaatgtacagaataatgctgagaataagaaagcattcaagggaaattcttcgaataatcctaagaatctgactggaaagcgcaaacgcaacaataacaggcacaaattcaagggtcaaaagaaaggaaaagggaagggtaaggcaccacaacctcgtagcaatggcaacaagcattgcaacaggtgtggatctgacactcatgtcgctaaagactgccgcatcccgaaacatcttgttctcttgtaccaaaaatcccttaaggacaaaaagtcttctgagaacccaagatttggagcccaattcaatcttacagatgaagagcgccctgaggttgcaagttctcaccaggctcctgttgaaccagagagcaacctcaatgttctcccagaagatgtcgctccactctctgcgatggacgatatgttcatcgaatactgctcaatggacctacttggtgatttgcaataatctcggtgcgtcccacttagagatgaagctgctcttatctcagtgtgcttgaaacagtatattgatatcctataagtttgccaaacaatattggttgtaataagtagataagtacgaactcccttatattgtaaggttgtattgcttgctagtcattagagtatgtacttttaacatatgtaaacgtcatactatgtatttatgtatttgatgttttaattattgtatgtatgtatatatattggataaagaattcttaatcaagcaattcttctttcattatagatgtctaaggatatcgctccgattggagatgaattatgtcttgtggatagtggtaccacaaactctatacttagggagatcaaatactttcaaactctcaaaaagagagaaggaaaagttttgactattgctgggcgcgatactgtgatagttggctcaggacaagcaattattacactcccaatgggtacacaaattacaattgagggtgctttattgtatcctgattcaacccgtaccctactaagttatagatatatccgtcaaaatgggtttcacattgaaacccatatggataatcgagaagaatttcttctcttaaccaaacaaaatggatatggcaaacacatttgcgagaaaattccatctctcacatcttgattgtactatacatacattaagcccattgcacatattgcgtataaagtaatttttcaaaatgttgatgcattccacacttggcatgatcgacttgggcaccccagtatcgggatgatgagaaaaattattggcaactctattggtcatcatttgatcaccgacaaatttctcaaatcctctgatttcgtgtgcactgcatgtgctactgggaaactgattttgagaccatcttatctcaaaattagagctgaaccacttaaattccttgaacacattcaaggagatatctgtggcccaattgtgccaagatctggaccgttcaggtactttatggttttgattgacgcatctacaagatggtctcatgtgtgtcttttatcgacacgaagccatgcctttgccaaattaatgtcttaaattataaggctgaaggcaaattaccctgaacatagggttcaatcaatccatatggacaatgctgccaaatttacatcccatgctttcgatgattattgtatggcattgggaattcaggttcagcactctgttccatatgtccacacacaaaatggtttggctgaatcattgatcaaaagaattaagcttattgctcgaccattattgatgaattgcaaattaccttcgtcgttttggggtcatgcagttctgcacgctgctaaccttgtccaactatgaccaactgcatatcatgaaacttccccaatgcagttagtacgtggaaatcctccaagtatttcccatttgcgtaagttcggttgtgctgtgtactgtaggatcgaatcacaagaactaagccaaccagaggggggggggggtgaatggttggtatacccaaaaaccaaaaacttttagcggaaataaaagttaccctcgaaatcgacggaagtcggtcagaccgagattgatctgccggtctgactgagtggatgccgccggtctgtgtcgcgtcccaaaacgactctaaaatacatcctcgaaattatgcctagaataattaaaatccatgtgaaagcctccaacaattaaaatgtgcaaagttaaaagttaaataaggcttggaggatttttgtatatttcctaaaagcctaaaatgcgtaaataaattttagtggaattttcagagcacaaataataattaagaagaaataaacaaagttaaaatggttttataaaaagaaaaaccctaaaaagttccctttccctccccctctccctcttgggccggctcggcccatccctttccctctctcccctcttccccgcggcccattcggcctcctccccgcgcgcgtgccgctgacgggcgggcccgcccgccaccctcgctgacgggtggggcccacccgtcatccccttcctcccgccgctcccgccgccttggccgtgccctagcgccgccgccgccgcgaatcccgccgctccagtccgtccggggtgcaatcaagaggggggaaatattccccgtgattccctccctctttccccccatttttccctccctctctcccttggattcgttcggaaactttccccctaacctcgccggcgcatcaatggcggccggatcttccgcgcccgtttccccctcatccggccgctctctccccctcccaaccctatataaacactccccgtgcctccctccgccgtttccgccactcgccgctctctctctccgccggaatcgagctcgcgccgtcgctctctctctccgccgtcaccgccgagctccggtccgccgccgtcgtcgccccggaccatctcctgcttcggcgtcgccttcttcgggttcgccgcaacctcgccgacctcgtccacctctccgtttcggtcgccgatcgccggaacgccgccgtccccgtcgaccagagccgcgccgccgcctctctccgctccggtcgccgttcccgtcgtcgccgtcgacccggggtgagccgtggaccgccgattcgtttccccctttcctcccctctctcgggcgccgctccgccgcgccagtggtcgccggcggcgaccatcggggcacgagcgcgccgcctcccgtcggctgtgccggcgtggccgccttcgggcgcgtcccgcggctgccatgtggggcccggctgtcagccgcccgcgccctcgggtgcggctgacgcatgggacccacggcgccggccggtgtgagccgggtgcacccggtccaccgtggaccgtgaggctgccgcgtgggccccactcccgtggacccggtccgcgcgcccctcccctcggctgacgcagtaaatccaattttaaattaaaatttaaatgaagaaattcgcaaatattcatttaaagagcatataaccttcaaatggccataacttggccatttgaactcggaattggaccgctcaagtctctaatttttccttaagaagtcaagaacccatttttgtgctttgttcctgcttgttatatggagtttattagagtaaaagccttttcttttccgttggtcgtgtagacgctgcagcttcggaagatccgctcttcgtggaagttgaagccgacgtttgggaaagcgagcagggcaagtcacatcatccttgaacatattgaatcccagtttataaaattatgtcgctttaaattattgcattatcgctttatttaaattcccgcgttatcactgttttatctagccatgcctatttacctttgttatgaccttattattattgttattgttattatttccttgttcaccctagagtaaacaaaaccccaactagtggacactctactcatggtaccactagtatgattttaggtagatgctttgctatttaattaggtaacattaggtggtttttcaactctagactttgggaatattcatatcacctggacactatggaatggtttggttattgtggaattggcttcacaccgctccttctattcaaaatccccaaaatggttttaggctggctcggggtgcatggttttgatagtagcacctcggccatataaggaccggtcttcgggcctctgttgcaaagcactaccgtacttccacatgtctagtgggtaaggcttagtttgtggctcagtctggttataaacaaaagtacatggatggagatggacgaagtcgggggtcgatggacatctccagggcaaatgaaggctacacgagctgcggcccggtagtcgagatgtcatggcacagggccggtgtcctgttgctaggggctcagtcctgcctacctgtcccgggggttccggccgtaggtgggattgggtcggtactcttgtctatggctaggatgggttggaaactatgtcacgtcttccgtctgtataccgtggtggtatgtggcacatggttgcacgtgaggaagatgtgtcttgtgggtaaagatgtacacctctgatcagagtataatctattcgaatagccgcgccctcggttatgggcaagccgagcaatgtacccaagttagtgttttaattcttaaaacctgctaaacaactaaaaggaggaatggttggcctgggttggcttgggacgagctgggacccagggtcgggttgccagttcggtctgaatcatcgtaggccttgggttaaggcaggttcgtgtgggttcacggccttgataaataatattgtatagttctagaatcgtgtttacaaaatagctttgagcaactaaatatctttaaatgctgtttactgcaactctaaccctttatattataactcctttgtactccctcgcatttattctgcacttgtgggtgtgtcttgttgagtacggtggttgtactcagtcttgctcaatttttcccaaacccagaagaggagcccctagaagatgaaggctttggtgtctagctcgtgcctgccgtcaagtgcctgtggtcatcgccctagtcttccgctgtttcccgtttgtctttgtgtgtgctgggccttcgctgcccatgtaataaattaactatttacgcttccgcttgttaaactctgaattgtatcaacttttggtgtaccttgcctcctgggacaaggaataatacacgcacgtaaggaacgcccgttgggttatttctggtcgtgacagtctgaccggtgttgaatctccggtctgaccgccgaagtcgcctgccgtgcctgtcgccgccgccggtctgaccgccgcttgccgccggtctgaccgccggtagatcgccggttagaccgccgaaacccggtgaaacacaaatcaaagaactcttaaagtagatgacgactttattgattctctctgtgtttacaaagtgcaccaacagcattccttacaaaaatttcgactaaactcgaaaccctaactcaaaactcaactcaattgctctcaaaagcgataccgggaagcctcacgctccccctttatttatacccgaggtaggcagcctaaagccacga

SEQ ID NO: 27371 - DNA, 3286 bp, Oryza sativa
gggtgtgtcttgttgagtacggcggttgtactcagtcttgctcaatttttcccaaacccagaagaggagcccctagaagatgaagggttttggtgtctagctcgtgcctgccgtcaaagtgcctgtggtcatcgccctagtcttccggtgtttcccgtttgtctttgtgtgtgctgggccttcgctgcccatgtaataaattaactatttacgcttccgcttgttaaactctgaattgtatcaacttttggtgtaccttgcctcctgggacaaggaataatacacgcacgtaaggaacgcccgttgggttatttccggtcgtgacaagttggtatcagagcccccttgaccctaggacgagccgtagatcccaagccttagcaatattttcaaaaataaaaaaatcctgtcttatttgtgaaaatcctctagtctctctctgtcctgctgcttcatttatcgccaaaatctgacctttaaaatgttgtttttctttttgtttttgtttgtagatggccggcagcgtcagccgtcgtggcctggacatgactggtttcgtcttggagctgcggggcatgtgcgttgtcctggggtatccacatggagtggactaccagggcatgccgcttccggagcaggagggtgacgatgcagagccccacgctgcttgggaggttactgcagtgatcctcactggctctcccgagcggacttcgttggcagtcaccgcaggtggagattctttccccgccgcttgccagaacgccgctctcctcgccatcggcactcttcaccagcgctacccggacgagttgcagcactcgccctaccgctaccaccctcgccgcggaggagcccgcgacttcgccaccttccgggatgctagctcggaggatgacgctaccatcatgcacctggcgcgcatggtggaggcgtacgacgcggctcgtatcgacttccatcagatggtgcgccgtgggatggtcgagaacaacatgaagatcctggagctgcgtcaggagaatctgcagctgaagaaggacctagacgcagtggaggcgcagctgcatcagctcaagatcgcccagggagaggtctgtcgccccaagcgccgccgcgtctgccgcagccagaagatcaccgcccgcaagagcacctccaggcccgagcttgttcgtcagtccctggcgtggacctgcttcgtggagacccctcgtgccgagcccgcgcccgtggttccccaggagggggaagcctccggcgttggtagcacggaggatgcgctgttgctcaccttccgtcctggcctgtcgcagcggtagacgagcagttagtaggcttgcgcgtgtgttctttctcgtttgtcttcttgttggagtcgtgtggggcatggttatgccggtgtgtggcataactgtgtcggagcctgtctttattttatttgcttaagcaacttgaactttaatgaaccaatttaatagcagtaataaattcaagaattatggtagtcgtgggtggttagctttaattgtcagctctctctgtttgctggttttgtgtggggtttccagatggtgacgactaggagaagtgctgccaccggtgatggcaaccaacctgaaggcagcaaccacaacaaccatggcagcccacctccacctcctcctccgcctccaccaccaccaccagacaccaacgccattctcacccaaatcctcgcccagcaggccaacatgatgactgctttcctccaccacctccaaaatccgccacaacataatgctccaccaccaccctcacaacactctaaactcgccgagttcctccgcatccgcccacctaccttctctagctccaataaccccgtggatgcgttggactggttgcatgccgtggggaaaaagctagacactgtgcagtgcagcgatgaggagaaagtcatcttcgccgcccaccagctgcaggggcccgcatctctatggtgggaccatttccaggctacgcagccagaggggcagcctattacttgggctcgcttcaccgccgctttccggagaacccatgtgcccgccggagtcgtggcccttaagaaaagggaattccgagagttgaagcaaggcaaccgctccgtgatggagtatttgcatgagttcaacaacctggcccgttacgccccggaggatgtgcgggaagatgaggagaagcaagagaagttcttggcaggaatggaccctgagctgtccgtccgtctaatctccggtgactatccggatttccaacgtctggtggacaagagcatccgcttggaagccaagcacaaggaactggagtcgcacaaatgccgcttggcgaatttccgcaatcaacagggtgctaaccaaagggtccgctacaccaatccctatccagggggaacctcctcgcagcagcaacagcagcagcaacctcgctccgcgccccgacctcaattcgtggtgcgcgtcccacagccgcagcaacagcagagtcagcaagggactcgtgcgccccgtcctcctacgccaactgtgcagcctggtcaaggccgcagggacgctcaaggtccgcagcgtctgtgcttcaactgcttcgagcccgggcactttgcggataaatgcccgaagccgaggcgccagcaaggccaagcgcctccccgatccaaccacggtggtaaggacgtcattcggggtcgtgtgaaccacgtgacggccgaggacgtgctgacaactctagacgtcatcgttggtacgttcctcattcattccatccctgctaccattttgttcgactctggagcttcccactcatttatatctgtgccattcgtggggagaaatcagttgggggtagaaaggcttaggaaccctctgctcatcaccacccctggaggggttatgacagcaaagtattatagtcctgccgtccctatagaaattcaggggattccttttccctcggatctgattctgctagacaccaagaacttggatgtgatccttgggatgaattatttggctcaattccaaggagtagtggattgcgcgagacgcactgtcactctgtaccgagggccggaacaaccggttgttttctttgcacccccaacctccgtcagtagttcagaacttcatcagataggactgtcagaaatccccatcgtcagagagttcggagacgtgtttccggaagaactacctggtatgccgcccaagcgagagattgagttccggatagaccttgctccaggaatgtcacgaccggaaatcac

SEQ ID NO: 27372 - DNA, 7894 bp, Oryza sativa
gggtcgcttgtgcaaaggagtggttcctggagcaagatctatccggaactcaatctctcgcttgggcggcataccaggtagttcttccggaaacacgtctccgaactctctgactatggggatttctgacagacctatctgatgcagttctgaactactgacggaggttgggggtgcaaagaaaacaaccggttgttctggccctcggtacagagtgacagtgcgtctcgcgcaatccactactccttggaattgagccaaataattcatcccaaggatcacatccaagttcttggtgtctagcagaatcagatccgagggaaaaggaatcccctgaatttctatagggacggcaggactataatactttgctgtcataacccctccaggggtggtgatgagcagagggtttctaagcctttctacccccaactgacttttccccacgaatggcacagatataaacgagtgggaagctccagagtcgaacaaaatggtagcagggatggaatgaacgaggaacgtaccaacgatgacgtctggagttgtcagcacgtcctcggccgtcacgtgattcacacggccccgaaggacatccttcccgccgttgttggagcggggaggcgcttggccttgctgacgccttggcttcgggcatttatccgcaaagtgcccgggctcgaagcagttgaagcacagacgctgctgaccttgagcgtccctgcggccttgaacgggctgcacagttggcgtaggaggacggggcgcacgagtcccctgctgattctgctgctgttgctgctgtgggacgcgcaccacgaattgaggtcgaggcgcggagcgaggttgctgctgctgctgctgctgtgaggaggatccccctgggtagggattggtgtagcggaccctctggttagcaccctgctgattgcggaaattcgccaagcggcgcttgtgcgattccagctccttgtgcttggcttccaagcggatgctcttgtccaccagtcgttgaaaatcaggatagtcccaagagactagacgaacggacagctcagggtccattcctgccaagaacttctcttgcttctcctcatcttcccgcacatcctccggggcataacgggctagattgtggaactcatgcaaatactccatcacggagcggttgccttgcttcaactcccgaaattcccttttcttaagagccacgactccggcgggcacatgggttctccggaaagcggcggtgaagcgagtccaagtaataggttgcccttctggctgcgtggcctggaaatggtcccaccatagagatgcgggcccctgcagctgatgggcggcgaagatgactttctcttcgtcactgcactgcacagtgtctaacttcttccccacggcatgcaaccaatccaacgcatccacggggttgttggagctagagaaggtgggtgggcggatacggaggaattcggcgagtttggagtgttggggagggggtggtggagcattgtgttgtggcgggttttggaggtggtggaggaaagcattcatcaggttagcttgctgggcgaggatttgggtgagaatggcgttggtgtctggtggtggtggtggaggcggaggtggaggtggattgccttggtggttggggttgctgccctcgggttggttgccttcaccggtgttaacatttctcctggtcgtcaccatctgaaaacccctcacagaaccagcaaacagagaaggagagctgacgattaaaactaaccacccacgactactattattcttaaatttatcactgctattaaattggttcattaaggttcaagttgcttaggcaaacaaataaagacaggctccgacatagttatgccacacaccggcataaccatgccccacacaactcaaaaagacaaacgaggaaaaacacacgcgcaagcctactaactgctcgtctaacgctgcgacgggccaggacggaaggtgagcaacagcgcaccctccgagctaccaacgccggaggcttccccctcctggggaaccacgggcgcaggctcggcacgaggggtctcgacgaagcaggtccacgccagggactgacgaacaagctcgggcctggaggtgctcttgcgggcggtgatcttctggctgcggcagacgcggcgacgcttgggacggctgtcctctccctgggcgatcttgagctgatgcagctgcgcctccaacgcgtcgaggtccttcttgagctgcagattctcttggcgcagctccaggatcttcatgttgttctccaccatgccacggcgcaccatctgatggaagtcgatacgagccgcgtcgtacgcctccaccatgcgtgccagatgcacgacggtagcgtcatcctccgagctggcgtctcggaaggtggcgtagtcgcgggctcctccgcgacgagggtggtaccggtagggcaagtgctgcaactcgtccgggtagcgctggtgaagggtgccaatggcgagaagagcggcgctggcaagcggcgggaaggaatccccacccgcggtgactgccagcgaagtccgctcgggagagccggagagaatcactgcagtgacctcccaaccagcgtgaggctctgcatcctcaccctcttgctccgggagcggcctggcctggtaatccactccatgtggataccccaagaccacgcacatgccccgcagctccaagacgaagccagtcatgtgcaaaccacgacgggtaacgctgccggccatctacaaacaaaaagaaaagcaacattttaaaggccagattttgacgataaatgaagcagcaagacaagagagaatagcgggttttcacaaataataaaggatttttatttttttgaaaatatagctaaggcttgggatctacggctcgtcctagggtcaagggtggctctgataccaacttgtcacgaccggaaatcacccaacaggcgttcctgacgtgcgtgtattattccttgtcccaggaggcaaggtacaccaaaagttgatacaattcagagtttaacaagcggaagcgtaaatataattattacacgggcaacaacggcccagcacacaaagacaacgaaaaacagcggaagactagggcgacgaccacaggcacttgacggcaggcacgagctagacaccaaagcctttatcttcaaggagctcctcttctggacttgggaaaaattgagcaagactgagtacaaccaccgtactcaacaagacacacccacaaatgcggaataaatgcaagggagtacaagggaataataatatagggattaagttttgcagtaaacagcatttaaaagacatttagttgctcagggctattttgtaaacacgatcttagaactacacaatattattaatcaaggccgtgaaccctcacgaacctgccttaacccaaggcctacgatgattcggaccgaactggcaacccgacctgggttccagctcgtcccaagccaacccaggccaaccattccatattttagttgttgagcaaattttaagaattaaaacactgacttgggtacattgctaggcttgcccatatccgagggctcggctattcgaatagatttactctgatcagaggtgtacatctttacccacaagacacatcttcctcacgtgttaccacgcgccacataccaccacggtatacagacggaagacgtgacatagtttccaacccatcctagccataaacaagagtaccgacccaatcctgcctacggccgggatacccgggacaggcaggcagaactgagcccctagcattgggcaccaaccctccgccgtatgacatctcgactaccgggccgcagctcgtgtagccttcatttgccctggagaatgtccatcgacgcccgacttcatccatctccaatccgtgtacttttgtttaagactagactgagccacaaactaagccttacccattagacatgtggaagtacggtagtgctttgcaacagaggcccgagcttaatccttatagtggccggggtgctacttcccacaactggcatgcacccaaaccccaccgaaaacaggttttaggggttttgaaagaggaagagaggtgtgtgtccaattccaccataaaccaacaattccaaagtgtccaaatgatatgagaattcccaaagtctaaagttgtaaaacctcctaatgttacctaattaaattgcgaagcatctacctagaattaaactagtggtgtcatgagtagagtgtccactagttggggttttgtttgatctagggtgaacaaggtaataataataacaatgacaataatcatatggtcataacaaaggtaaataggcatggctaagtaaaacagtgataacgcgggaatttaaataaagcgataatgcaataatttaaatcaacataattttataaaatgggattcaatatgatcaagatgatgtgtcttgccttgctcgttttcccaatcgacggcttcgacttccacgaagagcggatcttccgaagctgcagcgtctacacgaccaacggaaaagaaaaaggctttaacactaaataactccacataacagcagaaacaaagcacaaaaatgggttctttacatcttaaggaaaaattagagacttgaacggtccaattccgagttcaaatggccaagatatggccatttgaagtttttatgctctttaaatggatatttgcgaatttcttcatttatttttcaattaaaaaaaatcctatttattgcgtcagccgaggggcgggcgcgcggaccgggtccacgggaagggggggcccacgcgtcagccgctcggtccacggtggaccgggcgcacgcggctggcggcggtcggcgccgtgggtcccgcgcgtcagccgcacccacgggcgtgggcggctgacggccgggcccacttggcagccgcgagggcgcgcccgagggcggcctcgccggcacggccgacgggagcggcgcgcacccgcgccccgatggtcaccgccggcgaccaccggcgcggcggagcggcgcccgagagagaggagggaagggggaaggcgaacggcggtcttcggctcaccccgggacaacgacgacgacgagaacggcggccggagtggagggaagcggcggcgcggttcgggatgacgatgacgaaggtgctccggcggtcggcgggcgaagcggagcggcggacggggtcggcaaccactcggcgaagcggacggaggtgtcgccgagtaaggaggaagtccggagcggcggcggcggcggaacggagctcggcggcgacggcggagagagaggagcacggcgcgagcacgattccgacggcgagagcgagcggcgagcggcggaaacggaagagcggagctcggggagcaattatatagcaacgggagggagagagagcggccggagagagaggaaacgggcgcggagatctcggctccattgaatacgccggcgaggtttgcgggattgattccgagcgaatccgagggagagaggggaaagagggggaatcgggagaggggattgcggggaataattcccccctcttgattgcacgcggggcggacgggagcggcgggattcgcggcggcggcggcgctagggcacgggcgcggcggcggcgggaggagggcaatgacaggtgggccccacccgtcagcgagagtggcgggcgggcccgcctgtcagcggcgcgcgcgcgcggggaggccgatgggccgcgggagaggagagagagagggagagggaagtgggccgagccggcccaagagggaagggggggggaaaagaacttcttttaggattttctttttataaaacctttttaactttgtttatttcttttcaattattatttgtgctctgaaaattccactaaaatttatttaagcattttaggcttttaggaaatatacaaaaatcctccaagcctcatttgacttttatctttgcacattttaattgttgaaggctttcacattgaattttacttattcttttgcacaattttgaggatagattttagagtcgatttgggacgcgacaaacctaccccccttaaacggaatctcgaccccgagattcggaagaactggcgaagagatcgggatgggctgccttcagctcgtcttcgcgctcccaagtagcttcttcttcggcgtggttgctccactggaccttgcaaaaacggattactcggttcctggtcctgcgctccatggcgtccaggattttcactggcttctccacataggtcaagtcttcgcgaacttcaatttgctctgagtcggcctgctcggatggcactcgaagacatttcttgagttgcgacacatggaacacatcatgcacgttgcccaaggaggcgggcaactccagctggtaggcgacttctccgcgtcgagcagtgatacggatgggacccacataccgaggtgcgagcttcccttttgtctgaaacctgtgcacacctcgcaatggcgtgacccgaagatacacaaagtcatacactgcgaattccagatcacggcgacggttatctgcataacttttctgccgagactgtgccacctttagattatcccgaatgattctgactttagcttcagcttctctcaggatatcagtcccgaacacttggctttctccgacttggtcccacaatagcggtgtccggcatttgcgcccgtacaacgcttcatagggtgccctttgtatgctggcttggtagctgttattgtaggagaactcggcataggggagactcttatcccaagtcttcccgaagtccaggacacatgcgcggagcatatcttctaggatctgatttagacgctcggtctgtccatctgtctgcgggtgatatgcggtgctgaaattcaatcgagtacccagctcttcttggagcttcttccaaaagtgagaggtgaattggcttcccctatcagatacgattttcttgggaacgccatggagactcacgatcctagcgaagtagagctccgctagtttattccctccataggtggtcttcacaggaataaatcgagctaccttggttaatcgatccactattacccatatagaatcatacccaccttgggtttttggaaggccggtgatgaaatccatcccaatttcatcccatttccattctggcacttggagaggttggagaagtccggccggtcgttggtgttctgccttgacacgctggcacacatcacatagagccacaaactctgcaatttcccgcttcatgctgacccaccagtatttctccttcaaatctaagtacatcttggtactgcccgggtgaatggaataaggactttcgtgagcttcctgaagtatcagctgtttaagttctctgctatctggaacgcatacccgctttccgttccataaggttccgtgttcatcctctgtgaaaccagcggctttaccctgtttcatattcttgaggagtccatgcatgtccggatcattcttctgagcctcgcggatttgatcgagcaaggtgggctgggcttctagcgcggccaaaaatccacgaccaactatgtttaggttcagggcttccatctgttgattaagctcgggtggaatgcctcggacgttgagagtattgcaatggctcttccgacttagagcgtcggcaaccacgttagccttaccagggtgatagtgaattcccacatcataatccttgatgagttctaaccatctcctttgccgaagattcagatccgactgggtgaagatgtatttcaaactcttatgatcagtatatatttcacagcggttcccaatgagatagtgccgccagatttttaaagcatg

SEQ ID NO: 27373 - DNA, 3335 bp, Oryza sativa
agggggggggggaaaagaacttcttttaggattttctttttataaaacctttttaactttgtttatttcttttcaattattatttgtgctctgaaaattccactaaaatttatttaagcattttaggcttttaggaaatatacaaaaatcctccaagcctcatttgacttttatctttgcacattttaattgttgaaggctttcacattgaattttacttattcttttgcacaattttgaggatagattttagagtcgatttgggacgcgacaaggaaccactcctctgcacaaacgaccctactgtatggcagcaaatgaattgaccgaagtcaagaaacagttggaagagttgaaagaaaaggggtatatacgtccgagtacttccccatggggtgctcctgtgatttttgtggagaagaaagacaagacgaagaggatgtgcgttgactacagagctctcaatgaagtcaccatcaaaaacaagtaccctcttccccggatcgatgatctgttcgatcagcttaaaggtgccactgtattctccaagattgatcttcgttccggatatcaccaattacgtattcgtgaagaagatattcctaagaccacattcaccacgcgatacggactgtatgaattcacggtgatgtcgttcggtttaaccaatgcacctgccttcttcatgaacttaatgaacaaagtgttcatggaatacttggataagtttgttatggtgttcattgatgacattctggtgtactcacaatcagaggaagaccatcagcaccatctccgtctggtgttgggaaagttgcatgaacatcaattgtatgccaaacttagcaagtgtgagttctggttgtccgaagtcaaattcttagggcacgtgatatctgctaaaggagtcgctgtggaccccgaaacagtgaccgccgtcaccgattggaagcaacccaagacagtcactcaaattcgcagtttcttaggtttggcaggatactaccggaggttcatcgagaacttctccaaaatcgctcgacccatgacacagttgttgaagaaagaagagaaatttgtgtggagcccgcaatgcgagaaggcgtttcaaactctcaaagaaaagctggtttcctcgccagtgttaatcttgccggatactcgcaaggacttcatggtgtattgtgatgcttcgcgccaaggattggggtgcgtgctcatgcaggatggtcatgtggtggcctatgcctcacgccagctacggcctcatgaaggcaactaccctacccatgatttggagttagccgcggtggttcatgctctaaaaatctggcggcactatctcattgggaatcgctgtgaaatatatactgatcataagagtttgaaatacatcttcactcagtcggacctgaatcttcagcagaggagatggttagaactcatcaaggattatgatgtgggaattcactatcatcctggtaaggccaacgtggtcgccgacgctctaagtcgaaagagccattgcaacactcttaacgtccgtggcattccacccgaacttaaccaacagatggaagccctgaatctaagcatagtgggtcgtggattcttggctgcgttggaagccaagcccaccttgctcgatcaaatccgcgaggctcagaagaacgacccggacatgcatggactcctcaagaatatgaaacagggtaaagccgctggtttcacagaggatgaacacggaaccctatggaacggaaatcgggtatgcgttccagataacagaggacttaaacagctgatacttcaggaagctcacgaaagtccttattccatccaccctggcagtacgaagatgtacttagacttgaaggagaaatactggtgggttagtatgaagcgagaaattgcagagttcgtggccctttgtgttgtgtgccagcgtgtcaaggcagagcaccaacgaccggccggactcctccaacctctccaagtaccagaatggaaatgggatgaaattgggatggatttcatcaccggacttccaaaaacccaaggtggatatgattctatatgggtagttgtggatcgcttaaccaaggtagctcgatttattcctgtgaagaccacctatggagggaacaaactagccgagctctacttcgctaggatcgtgaatctccatggcgttcccaagaaaatcgtatctgataggggaagccaattcacctctcacttttggaagaagctccaagaagagctgggtacccgattaaatttcagcaccgcgtatcacccgcagacagatggacagaccgagcgtctaaatcagatcctagaagatatgcttcgcgcatgtgtcctagatttcgggaagacctgggataagagtctcccctatgccgagttctcctataataacagctatcaagccagcatacaaatggcaccttatgaagcgttgtatgggcgcaaatgccggacaccgctcttgtgggaccaagttggggaaagccaagtgttcgggactgatatcctgagagaagctgaagcaaaggtcagaaccattcgggataatctaaaggtggcacagtcccggcagaaaagttatgtagataaccgtcgccgtgacctggaattcgcagtggatgactttgtgtatcttcgggtcacgccattgcgaggtgtacacaggtttcagacaaaagggaagctcgcacctcggtttgtgggtcctttccgtatcattgctcggcgcggagaagtcgcttaccagttggagctgcccgcctccttgggcaacgtgcatgatgtgttccatgtgtcgcaactcaagaaatgtcttcgagtgccatccgagcaggccgactcagagcaaattgaagttcgcgaagacttgacctacgtggaaaggccagtgaaaatcctggacaccatggagcgcaggaccaggaactgggtaatccgtttttgcaaggtccagtggagcaaccacgccgaggaagaagctacttgggagcgtgaagacgagctgaaggcagcccatcctgatctcttcgccagttcctccgaatctcggggtcgagattccgtttaaggggggtaggtttgtcgcgtcccaaaacgactctaaaatacatcctcgaaattatgcctagaataattaaaatccatgtgaaagcctccaacaattaaaatgtgcaaagttaaaagtcaaataaggcttggagtatttttgtatatttcctaaaagcctaaaatgcgtaaataaattttagtggaattttcagagcacaaataataattaagaagaaataaacaaagttaaaatg

SEQ ID NO: 27374 - DNA, 7070 bp, Oryza sativa
atcaactctctgttgggccaattcagtctaacatagattggctggaggcccgcaaaattgatctcatagcgcaacttcaagagtgcaacgccgagctggatttggaaaaacaaaaattagccaatctcccaaatgctgtcgaagaacagaagtctagactgaaatcggctatcaagaatgtggctgatatgaccaagtccatcaaggtcattcctggaaccgatgcccaagacatccaagctattgaagaagtagatcaaattagagaatgggctgtgtcggctatctagcgttacttatctgaatgattatatttgtaataggacttagaaaatttttgtgattggctaagaaacgttggtactccttttgattgtcactgatcctttgtgtcgattaatataacttctcaatttgcttgaaatttctttacgcaaaaaattctcgacttttgtatatatgtgcccccctaattttgcaatgctgaaggcattgataaaattataatttagactaagggcgatatattaaatatcgtccatcatacatcggcagaacacaactgattagataataaaacaactaagggcaatataactatatcggccatcatacatcggcaaaacacaaccgattatgaataagaaaacaactaagggtgatataactatatcggctatctcaaggcgatgcaaacacatcggctatcatgtatcggcaacactcagccgatcatgcattaacccaaacacttggataatatttctttaagtacttgccattgagcgatgtccataaacttctccatcaagtccttgcaacatataagctcctttggacacaaccttatggatttgaaatggtccttcccaattcggtgaccacttgccgaatttgttatctcgagttcctatcggcaagatcagcttccaaacaaactctccttcagaaaaagacttagggactaccatcttgttataatgcttagcaatcctttcaatctggattggaccaaatcttccctttcatcggccatgagattgtaatattcatcggctgtcaattcgttttgtaattctgttcttcttaagccgattctaacttcccatggtaaaactgcctcatgtccataaagaagcttataaggaggaacttgaattgatccatgacaagccatccgataagactacaatgcttcggccaacctagtatgccattgccgaggataatcagaaatcttcctcttaatgagcttgatcaaactcttgttagatgcctcggcttgcccattagcttgtgcataatatggcgaagaattcaataatttgatacccatgctatcggcaaattgaacaaactcatcggtacatgaagatcgagccctgatcggttgtaatggtctgaggaataccaaactggtaaataatatgctcttgaacgaattgtatagcatcccctgaatcaactttcttcaaagaaatcgtttctacccacttggtaaagtaatcggttgccaccaatataaacttatgtcccttgcttgaaggtggattaatcataccgatcatatcaattccccaacctctgaatggccatggcttgataatagaattcatagccgacgccggtgctcgctgaattgctccaaacttctgacaatcttgacatcctttgtaatatctgaagcaatcttccaacattgtcggccaaaaatatcctgcctgccgaagcaaccacttcatcttatgagccgattgatgagttccacaaattccttcatgtacctcgcctatcgcaaccttggcttgatcagcactcaaacatttaagcaacaccccatcaatcatccgataacataactcatcatccaacaaggtgtatttcaaagctttatagagcaacttccgagaagctgattgagatggattctgcaaatattgaaaaatatcatatctccaatcatcggctgatatagtagcgatttccaccttgatatccttcgtcatcggcttgtaccccgatgctccctgagccaaatcattagcttcaatattttgctctcgagacacatgtttcaaagttactagccgaaatccatccatcaattctcggcacttttcattgtaaaccatcaacgtatcatttttgcattcatactgtcttgccaattgactgatcaccaacaaagaatcacccataatttcaacagcatcagcttcaacttccttgagcaactgcaatcctttgagaaccgcttcatattcagcctgattgttagttgcataaggcttaatagtataggcaaactcgaaacttgcaccccgaggagaaattataactaagccgataccacaaccgtgagtgcacacggatccattgaaaaacaaagtccaaggcacaatatcgaccgagccaattgagtcatcacgatgatctacaataaaatggctatagcttgtcccttgatcactttcggagactcataccgcagatcaaactccgttaaagcaaatatccactttccaacaattcctttcaaaattggagccggtaacatgtatttaaccacatcggctttgcatatcacagtgcattcattggacaatggataatgccttaacttcgtgcaagagaaatataaacacaaacacaacttctccacaggagaataccttgtttctgcatccaaaagcctgcggcttaaataaaatacggctctctctttcccctaaagctcctgaatcaaaactgagccgatcgacttctcaccggccgatagatataatctgaaaggtatccccttctgtggagggattaaaactggaggagaactaagatactctttaatgttatccaaagccttctgttgctctgccccccaggtgaattcttgatcggctttcaatctcaacaacagcataaaaggttctaacctgctagacaaattagaattaaacctcctaacaaaatttaccttgccgatcaactcctgcaacttcttcttgtcctctggaggttgaatcttcttgattgcattaatgctcctttgagtcacctcgatccccctctcatgaacaagaaaacccaaaaactggcgagccgatacgccaaaagcacattttgtcggattcatcttcaggccatattttctagttctctcaaaaaccttcctcaaattggctatgtgattctctatttcctttgatttaacaaccacatcatcaacataaacttcaaccaaccagccgatcaaatcatggaatatgtaattcatggccctctgatatgtagctccagcgctcttcagaccaaaagtcattacaacccactcgaacaaaccgattgcaccagggcacctgaaagctgtcttatgaatatcctcttctaccataaagatttgattatatcctgcattgccatccataaaatttaatatcttatgccccgaagcagcatcaaccaactgatcggctactggcattgggtactcgtccttcagggtagctttgtttagatcacgaaagtcaatgcacaccctgactttgccatttttcttgataactggaattatattggaaacccactcagcatatcggcatggacgaataaaatcagcatcatataaacgtgcaacctcagccttgacagcctcaagcatatcggctttgcacctcctcggtggttgctggtatggtctaaccccggttttgataggaagccgatgttcgacaatcgatcggctgagtcctggcatctcataatactcccaagcaaagcaatctctatattcttttaaaagctctatcaacttggttctaaattctagagataaattcttactgataaatgtcggtcttggtctatcacctggacctatatcaatttcttccaaatcatcagccgacatgaaaccttgtccttgcttgtcatcgagatcatctactgtgtccttggtgtagacgtttgaaccctccacgacgccctcaaaataataatttgggctctccatcttcaattggttgtatatcacaatcggacactcttagaaaatctccatcccaaactttcccagacaggcaatcaataccatccatctcccaaagagctaaatcggcactggcaacgttaactgacctatcggccggcacgatctcaatcttgtcgccttgccattgaatcaaggactgatgcatggtcgaaggaatacaacaattggcattaatccaatcccttcctagcaacaggctataggaacccttcctatcgatgacaaaaaaatgttgtaggaacagtcttgctgtcgactgtcagctctacattcaaaactcccttattctccgatggattgtcaccaaaatctttgagaaccatatttgtcttgatgagatcctctgaatttccgcccaactttctaaatatagaatatggcatcaaattcacagcagccccaccatcgaccatcatcttagacatcggcttcccattgacataaccgttaatgtacaatgacttgagatgccgattctctgttccctccggtttctcaaaagatcgccgcgcgaatcacaaagtgtgtttttgccacgaacgcacccaataccctccaatatgtccaaaaatcatgttttggcgttttttgaactttttgattccagtacaaaacatcgcaccctcgtgtgccaatattggcattaattgacaaaagttcgccgcgcgaatcacgaagtgagtttttgccacgaacacacccaatacattctgatatgtccaaaaatcatgctttggtgctttttgaacattttcattctgttcaaaaacatcgcacccgtgtgggccaatatatgccaatattgacattatttgacaaaagttagccacgcgaatcacgaaatgtgtttttgccacgaacacaccccatacgcaccaatatgtacaaaaataatgttttggctcgttttgaactttttgattccagtagaaaacatcgcaccctcgtgtgccaatattcgcattaattgacaaaagttcgccgcgcgaatcacgaagtgactttttgccatgaatgcacccagtacactccaatatttccaaaaatcatgttttggcgtttttgaactttttcattctggtcaaaaacatcgcacccgtgtgggctaatatatgccaatattgacattatttgagaaaagttagccacgcgaatcacgaaatgtgtttttgccacgaacacacccgatacactccaatatgtccaaaaatcatgttttggcgttttttgaactttttgattccagtagaaaacatcgcaccctcgtgtgccaatattggcattaattgacaaaagatcgccgcgcgaatcacgaagtgtgtttttgccacgaacgcacccaataccctccaatatgtccaaaaatcatgttttggcgttttttgaactttttgattccagtagaaaacatcgcaccctcgtgtgccaatattggcattaattgacaaaagttcgccgcgcgaatcatgaattgagtatttgccacgaacgcacccaatacactccaataagtccaaaaatcatgctttggtgctttttgaacattttcattctggtcaaaaacatcgcacctgtgtgggctaatatatgccaatattgacattatttgacaaaagtaagccacgcgaatcacgaaatgtgtttttgccacgaacacacccgatacacaccaataagtccaaaaatcatgttttggctctttttgaactttttgattccagtagaaaacatcgcaccctcgtgtgccaatattggcattaattgacaatagatcgccgcgcgaatcacgaagtgagtttttgccacgaatgcacccaatacactccaatatgtccaaaaatcatgttttggctctttttgaactttttgattccagtagaaaacatcgcacactcgtgtgccaatattggcattaattgacaaaagttcgccgcgcgaatcacgaagtgagtttttgccacgaacgcacccagtacactccaatatgtccaaaaatcatgttttggctctttttgaactttttgattccagtagaaaacatcgcaccctcgtgtgccaatattggcattaattgacaaaagttcgccgcgcgaatcacgaagtgagtttttgccacgaacgcacccaatacactccaatatgtccaaaaatcatgctttggtgctttttgaacattttcattccggtcaaaaacatcgcacccgtgtgggccaatatatgccaatattgacattatttgacaaaagttagccacgcgaatcacgaaatgtgtttttgccacgaacacacccgatacacaccaatatgtacaaaaatcatgttttggctctttttgaactttttgattccagtagaaaacatcgcaccctcgtgtgccaatattggcattaattgacaaaagttcgccgcgcgaatcacgaagtgagtttttgccacgaacgcacccaatacactccaatatgtccaaaaatcatgttttggctctttttgaactttttgattccagtacaaaacatcgcaccctcgtatgccaatattggcattaattgacaaaagttcgccgcgcgaatcacgaagtgagtttttgccacgaacgcacccaatacactccaatatgtccaaaaatcatgctttggtgctttttgaacattttcattccggtcaaaaacatcgcacccgtgtgggccaatatataccaatattgacattatttcacaaaagttcgccacgcgaatcacgaaatgtgtttttgccacgaacccacccgatacactccaatttgtccaaaaatcatgtttgggctctttttgaactttttgattccagtagaaagcatcgcaccctcctatgccaatattggcattaattgacaaaagatcgccgcgcgaatcacgaagtgactttttgccatgaatgcacccagtacactccaatatttccaaaaatcatgttttggcgtttttgaactttttcattctggtcaaaaacatcgcacccgtgtgggctaatattgccaatattg

SEQ ID NO: 27375 - DNA, 3096 bp, Oryza sativa
ctctttttgaactttttgattgcagtacaaaacatcgcaccctcgtgtgccaatattggcattaattgacaaaagttcgccgcgcgaatcacgaagtgagtttttgccacgaacgcacccaatacactccaatatgtccaaaaatcatgttttggctctttttgaactttttgattccagtacaaaacatcgcaccctcgtgtgccaatattggcattaattgacaaaagttcgccgcgcgaatcacgaagtgagtttttgccacgaacgcacccaatacactccaatatgtccaaaaatcatgctttagtgctttttgaacattttcattccggtcaaaaacatcgcacccgtgtgggccaatatatgctaatattgacattatttgacaaaagttagccacgcgaatcacgaaatgtgtttttgccacgaacacacccgatacactccaatatgtccaaaaatcatgttttcgctctttttgaactttttgattccagtacaaaacatcgcaccatcgtgtgccaatattggcattaattgacaaaagttcgccgcgcgaatcacgttgtgagttttatccacgaacgcacccaatacactccaatatgtccaaaaatcatgttttggctctttttcaactttttgattccagtagaaaacatcgcaccctggtgtgcctatattggcattaattgacaaaagttcgccgcgcgaatcacgaagtgagtttttgccacgaacacacccaatacactctgatatgtccaaaaatcatgctttggtgctttttgaacattttcattccgttcaaaaacatcgcacccgtgtgggccaatatatgccaatattgacattatttgacaaaagtttgccacgcgaatcacgaaatgtgtttttgccacgaacacacccgatacactccaatatgtccaaaaatcatgttttggctctttttgaactttttgattgcagtacaaaacatcgcaccctcgtgtgccaatattggcattaattgacaaaagttcgccgcgcgaatcacgaagtgagtttttgccacgaacgcacccaatacactccaatatgtccaaaaatcatgttttggctctttttgaacattttgattccagtacaaaacatcgcaccctcgtgtgccaatattggcattaattgacaaaagttcgccgcgcgaatcacgaagtgaatttttgccacgaacgcacccaatacactccaatatgtccaaaaatcatgttttggctctttttgagctttttgattccagtacaaaacatcgcaccctcgtatgccaatattggcaataattgacaaaagttcaccgcgcgaatcacgaagtgagtttttgccacgaacgcacccagtacactccaatatgtccaaaaatcatgctttggtgctttttgaacattttcattccggtcaaaaacatcgcacccgtgtgggccaatatatgccaatattgacattatttgacaaaagtttgccacgcgaatcacgaaatgtgtttttgccacgaacacacccgatacactccaatatgtccaaaaatcatgttttggctctttttgaactttttgattgcagtacaaaacatcgcaccctcgtgtgccaatattggcattaattgacaaaagttcgccgcgcgaatcacgtagtgagtttttgccacgaacgcacccaatacactccgatatgtccaaaaatcatgttttggctctttttgaactttttgattccagtagaaaacatcgcaccctcgtgtgccaatattggcattaattgacaatagatcgccgcgcgaatcacgaagtgagtttttgccacgaatgcacccaatgcactccaatatgtccaaaaatcatgttttggctctttttgaactttttgattccagtagaaaacatcgcaccctcgtgtgccaatattggcattaattgacaaaagttcgccgcgcgaatcacgaagtgagtttttgccacgaacgcacccaatacactccaatatgtccaaaaatcatgttttggctctttttgaactttttgattccagtacaaaacatcgcaccctcgtgtgccaatattggcattaattgacaaaagttcgccgcgcgaatcacgtagtgagtttttgccacgaacgcacccaatacactccaatatgtccaaaaatcatattttggctctttttgaacattttcattccgttcaaaaacatcgcacccgtgtgggccaatatatgccaatattgacattatttgacaaaagttagccacgcgaatcacgaaatgtgtttttgccacgaaaacacccgatacactccaatatgtccaaaaatcatgttttggtgttttttgaactttttgattccagtagaaaacatcgcaccctggtgtgccaatattggcattaattgacaaaagatcgccgcgcgaatcacgaattgagtatttgccacgaacgcacccaatacactccaataagtccaaaaatcatgctttggtgctttttgaacattttcattctggtcaaaaacatcgcacccgtgtgggctaatatatgccaatattgacattatttgacaaaagttagccacgcgaatcacgaaatgtgtttttgccacgaacacacccgatacacaccaataagtccaaaaatcatgttttggctctttttgaactttttgcttccagtacaaaacatcgcaccctcgtgtgccaatattggcattaattgacaaaagttcgccgcgcgaatcacgaagtgagtttttgccatgaattgatgaggacatcaacaccatcgatacatccacgtccccccatgtatagcatgatggtcctattacccgcgctcgtgcacgtcaactaaattatcaggtgagttctttcttgagttcatattcctcgtctttataccccggagacgcgtgcactcgtgttttactcaggaacgatggagaggatccaaagggaagaggattcgcgcggggtggattaggactgcagggcagcaccaacttctgacggccgccacgacttcatgcgaactccgatttgggcgtgcaagtacttcacgg

SEQ ID NO: 27376 - DNA, 32044 bp, Oryza sativa
tatagaatactcaagctgctcctgcgaatgataacaacatgcagtcctatcacatcatggcagaaccactcaaggatgcagtcactagaacaatgccagctatatctctccagaatcaaaatgagcagccatgtttgtggttttcagttcgctacttatcattgtgtaatcgaaagtttgcagcaatcatgtaatacataaatatattcatgtctataaacagtgagcttgctatgcttatggatgattcatgttgaggatacaatgtaccgatgttaagcaccttccctttttgtttaaggcagtgcctcgtattcatgtaatatgggagaaatgtgtaataaaaacaagttctatgaggactctttcagaagatgctgatatgggattatgtgtataattgtttactgtcaaaggagacctagggtctcatttcagaggaactatgttctaacctcgagttaataaccaacctgatgatggaaaagaaaatcaagcgattaaccaaagagacatttgtttggactaagagtttcagatgtgtcttttttggatcaaaggcaatggcagtcagtatagcttttggcgaaacacttcaaggattcactgaaaggcagtagaccaaaggacctcatcgccaccagaagtgtccgcaacccacattaaagagtaccacctgttagagataggccgaaagatgattgataaaagatattggcaaagaggttctctagcaggaaagatgtaggccgaaaggtgattgataaaggataatcaaaaacatgctctgcatcactcaaggaagacccctgatagtaatcgccctgcaacagtcaccttgtcattgagagaaaaaaaaagtcgtgagtaagcaagatgacctaggtaaaagtgtttctatgaaggcaaggagtgaaatcttcaactcagtatcagatgctacacggagtgaaaactgcaagcaccggttaccaggcaatgccatgtcttgggagatgatccaatgggaaggaactcatcaaggtcaaaggagtaaaggaatacgttgaatgctaaataatgacaacctgaagataatagtgggaagtaaactgaatgtaaagaaccaagtgatatgttcgaagatagtctacagaggtcagattaaaatcacatctaacaacgaagcttcaaatttggcaggataacgatcaaacaataagaagttcagcagtaaagtcatttgggaagacgtcaaagcatgtcaagtgggataatttggttcccttgggaaacataattcaaaggcaaagttatcgaccctcacaatgaatagaggaaatatctagcaccggagaccaggaaagctaatatgagacaatcagtggcaagttgtcaatcatggtattcttagtaagcaggatatcatagtctaaagcatatggtggtaagttagaagtaaatgacaagcatggtattctcatgatgacaagcatggtatcctagtaatgacaagctgatatcggcgcaaaacgtgaagtgggtaacttgtatgaggttgacgccaaagatatgaattatgagaagttctggaactgaagccccatcttccaatgccgcagcctagtcgaagtcagctagaggtgcaaccagggaaaagtcatgtgaagagaagattccatctataacaggagatcgagccaagcagtccagagtggagaggttttgctaggcaagtttgttatagaagacgcgacggaagaagtcagataagaagagaagcccgcccaacctatcttcttgctagcctcctcgaatctcggggacgagattcttgtaaagggggtggatttgtcacgtcctgataaattcatcccgaattaaaaatcattccctaaaaggaataatagaattaattaaaattcgaaaagaaattgacaaacactaaaatacgtgccagaaaaattcgaatgtggcccggagaatttttgttaaattctccttggtctaaaaggagccctcaaattttacttgaattttcagagcactggaaataattattaagcaacaaaaacaattatcaatgtttattaaaaagaaaacctaaaaataaatcctcttcctcctttgggccaagcccagcccaaagtcctctctcccccccccctctctttctccccctcctccctttgggccccaaagcctccctccattcctctcagcccggccgaaagtctgttttacctcccccgtgctacagtgctccttcttccagctcaggcagagcccgagctctccagccgtgccgtgcacagtgccaccgcctcctccttccaaatctcgcctccccgttgctcctttttccaaattagttgcgggaatggaatcctctcaatctcctcttcctttcccccaactttccccctttaatcccgcccccaatcaccgggatttaatccctcttctttgaccaccattgatgccgccggccacctcctccggcgccattttcggcctctcccgtgaccggcactccgtccttgccctataaaacgaagccctcctccttcctttggtccattttgctctctcccgagcccctagccacctccccatcaccttcccctctctcctgtgccgacggccatctccggccgcccctgccgcggcgcctgtgtgccggccggccgtgccgtcgccatccgcgacgtcgcagctgcctcctcttcctcggcttcgcctccgtttcgcggggaaatcaccggagacgcgtcttcgccggcaaaacagtggcgttgccgccactgtaccgccttcagtcgccccggtcgccgcgtcagagcgtcggccgatgtcgccgtctccttcgtcgacgtcgcggcgtcgccctccaccccggcctgccctcggtttcgccggaacgccgtcgcccgcgccgcctctccctcggtcttgtcggcacccactccggcagccccttccgccgtgccagtgcgccggccgacgtcgccgtctccacctctggcatcgcagcggcaaggtcgtcctcggcatcgtttcccctccatccaaacccctccgcggtccatcgtcgtcgcctccgttcgttctcgtcgtcgacgtcccgtcggtcgcccggctcgtcgtctcgcggcgtcgcctccgtcgtcggattcgcagcggcgcgttccacgtcgtccccgtctccgtgcagctgttgccggctgccctcgtcgcttcctcgccggccccggtcgtcgtcgtcgtcgtcctctcgtcgttcccggtcgtcgtggcgttcgtccctccgtcgagccgttctcgtccgtcgtccgcgttcgtcaagcgagccgctgcagccccgtcgtcgtcttcgtcctcggctccgcgtcgtcaagcattgcgccggccgcgtctcaccttcgtccaaggatcgccgctgaagtcgtcccctcgccatttgtctccgtcgttcccggccgcctccgccgcgcccgttcgtcgttgtcgttcccacgcctcgtcgcgtggtggtaaggatctctcctctcgctgccccgtcctcgtcctttcggtgtcgcccgtgcccgttgtgcggttgtcagccccggtatccatgtatcggtatcggtagtcgttcgcttgtccgtgtagtgtccgtgttagtgtgcccgcttggtagccgcgttgtttcctcgtgtgcaacccgtgtggtgtctagtggagtccgtttgtcggccactcgcctcggttgacacacggggtccgcttccgtcgacccgtggaccgtctctgtgtacctggtctaccgcggtcctttaggttgacatgtggggttcgcatgtcaacagcgcagccttcctgtcttttccaggctagcgcttacacatgttttatagtcgcaaagcctaattataataatccgcaaatctccatataacagcattaaacttcggatgatcatatcttggtcatacgagctccgaatcgacccgttcaagtctcttaatgtttgttataacctaaagaactgtgtgctttctttttatgtgttgttattgcttctttataggcttgtagctttgcttgtgtgcttcgcgtagcttctgtcgttccggaggttcccgaagcgtggttcgtggtcgtcgccgaaggttcggaaggccgttctctctgagcaaggcaagtcacatcatccttgagcatattgaatcccagtttataaaattattttgatttaaattaatgcattatcgctttatttaaattcctgcgttatcactgttttatttagccatgcctatttacctttgttatgaccttattattattgctattgttattattaccttgttcaccctagaataaacaaaaccccaactagtggacactctattcatggttccactagtatgaatttaggtagatgcttcgctgtttaattaggcaacattaggtggttttataactttagacttggggaattctcatatcacttggatactatggaatggttggcttattgtggaattggacatacccctctcttcctctttcaaagcccctaaaacctgtttttcggtggggtttgggtgcatgctagttgtgggaagttgcaccccggccactataaggattaagctcaggcctctgttgcaaagcactaccgtacttccacatgtctagtgggtaaggcttagtttgtggctcagtctggttataaacaaaagtacacggatggagatggacgaagtcgggggtcgatggacatctctaggacaaatgaaggctacacgagctgcggcccggtagtcgagatgtcatggcacagggccggtgtcctgctgctagggggctcaatcctgcctgcctgtcccgggggttccggccgtaggtggggttgggtcggtactcttgtctatggctaggatgggttggaaactatgtcacgtcttccgtccgtataccgtggtggtatgtggcacgtggttacacgtgaggaagatgtgtcttgtgggtaaagatgtacacctctgatcagagtataatctattcgaatagccgcgccctcggttatgggcaagccgagcaatgtacccaagttagtgttttaattcttaaaatttgctcaacaactaaaatgtggaatggttggcctgggatggctagggacgagctgggacccagggtcgggttgccagttcggtctgaatcatcgtaggccttgggttaaggcaggttcgtgcgggttcacgaccttgattaataatactgtgtagctttaggatcgtctttttaaaatggctttgggcaactaagtgacttttaaatgctgttttctgcaaaacttaacccctatatcattatcccttgtacccccttgcattaatcgtgcatccgccggtgtggcttgctgagtactgtggttgtactcattcttgctctatctttctccccccttcagtaagagaagctttggagaagaagtcttaggtggagtcttggcttataccccagttgagcgcctgtgaagatggagccgtaggcccgctagtccgctgctgtttattgttgattgtcaggccttaagtgcctttgtaataatgtaaatattatcgatataataaagatgtgtcttttatatcatgtttgtatggtgtaccccggcttttcctgggacggggattaatacactagcgttcgggaaaatgcaattttctcggtcgcgacagaaactacaatttagttgtactctctggagctcaaaagttgtgtgttgaagtgtgttaggtctcctactttcatagctgccaatgatggttggaatggcggttaacccctcagaaccatcattgggactccactggagccatccacgtgtaaggtggagatgaggtgggccaggatggattctctagcagcttataggtgggcccctatggcggtttggtcccaatgtaagtcagtttcgactgacttgtggtccgtccaatccttgtactcgcacatgattggtcagaggttcatttttgtcgcatggcagatatattttctccttaaatgacctgcatacatatatttaccaaaattagttgaagtggttagtagtaaactcctaccactatgttttgagagtatatttgatatcttttatgtaggtgttaacggttaaagtttgcacttaacgaccttcaatgacaccccaacacttatcttcaactcgtccctgagtaaagctcatgaacctactagagtaatgactttttgcttcatgacatgacataccaaatattccaagacatacttgaggctgtaaacattgatgtgtttaccatgccatctttaggcgattgaagaacgtaacagtcctcgaaccaagtcccctctactacttctgatgaattaccataggattttctttgatgtttataaaaacataacttttactgtacttctcaattgactccctcaaatcactcaaagtgtttattcctcaccaaggtattgatgttgcattttctcatcctacctttctaattaggcttatatggatctcagggtagggaataagaaatgacatacttgcatcagatatatagtaaagtcaaacagaggatacaacaagataactaatcatataaccatgaccaagcttgtgcacctatgtttatgggtagaaatgaaaagggtgaaaaatctacaataaaaaatgggatggtgactctttttatctctacctttttttcatcgtgctcgagtttgatcattttcttttgagcagagttttttattttagctcatctctcatttggcatggatcatgggaggagagaccacaaaatttttagagtctttattctgtggatacattgcttaaaacatagaagtttagcatatagatatggatggattagttttctttttggctaatcctccagtgtagagaaaaagcaatatttttggtgtctaagtgcacaagactttgctcatgagaatatgaaaagaatctaagatggtcacaaccatttggcaaaactcaaaatgatagcaagcaattgagtaccaactttccgataatgtacaaggtttcatcattaagatcgatatatggctttggtaggaagggaacatcaatgaagagtacgcaaagatatttattttctttttataaaatcccaaggattcattattaagagcaaggttcatatctgttgacggtcgttagcgatcagtttcgcacgtcaatattaccaaaataaagtagaactaagttttgcttgcaaagcatattatgtcaaaataagatatattccactagcactaggctttctaacctcttgcagagaataaacataaaatggaggcgattcgacagtaaaatggacgatcaatcaatcggacgctgtcgaggatcagacttagaggaagatgggccaagaattcagaaagaacacaaccaatgggacaaaactcgcaagtctgcagaaaccaacagaagaggaggccgccagccgaaattggactaattttggcccagcccatggttcggccgaacccccttgagctccgttggatgcaggggttggtttggacggtgtggattagctccgaatgatagttggagggtatttccgaccattccaacagtcacaaccgtcattggagagctatataaggccttcacctcctcacctcttccacacatctcaagcaagaagcttcatacattctctcaagtttaatatagtttctagagtatagtggaatagaaatagaatataatcttcagtccgcagagtttttggaagagttcgggtaagactctagtagcttttccttcttttgtaagacttgtactatttatagaatattcttctcaatatattctcatttttgggggttatatgctgcggatacgtcgaggagggctactgatggagacagctcagtatgggtattcctctgcgcgtgtatataatcctaagttatttttttagggagggtactcctccgtatttagccccagttggatgggcttgacgggttgttgtaagaaactcggcaaccaagggtggtctctcgaaacaccaggagggcatcataagggggtattggctatacggttatatagtagataatattgactaaagtgtatgtatgtatattagaagtataggaaatgatccttttcttattctttccacttagcatagaattagtaagtatgagaatagtgaatgcttcagctttgtgtcaccctaccctttgaattgaactaaccccttcttagactttgattattacaagtaacatataagtattagcttggttctctctattataattttcccacgggattaaaaaaatacgatacccttggaatactctcgggtgaaatgctacaattatccatgtgcttgcggatgaaatctgtaaccataatataccacgagtggttttgcaccattgctgggaattatatttctagtaatatcgttaagaaataccaacaagcatttctagcgccgttgccggggaagatttataaaagagattactaatattttatatttatctctgtataatcactgtccttttgcaggctaaccttggttattttcgcttttgctgtgaaaatagggcagtgtatgactagtttcaacttgccggaaaatttcaaagaaaatcaaaaagttttcttctggagtgttaagccgcgcatcgttcctccgcagaaatctctctcggcaaagaaatcagcgtcaccgagcttcaagtctatggccgagaagacccttcaagagttcgctgctccctcagctgagaacgtgcccgttaggccacaaattaacttaggagacacaaacttcgatctgaagtcgagcctcatcatgatggcgcaggctagcccgttctgcggcaagcctaaccaatatgccagcgcacacctgcagcaattccaggagatatgtagctcgtacactatgaagggtgtcagtccagacgcgtcaggatccagctgcttcgtttctccctcctggggaaggtgaagcagtggttctatgccaactgtgctacaatcaacacctgggacagatgctctacggcatttttgttgaagttcttcccgatgggtaagaccaacgcccttcgtggaaggatttctggattctagcatacgagggatgagtcaatccccgaagcatgggcacgacttcaggagtatgtggccgcctgtccttatcatgggatggatgagtggctgatactccagagcttctacaacgggctcactcccacgtctcgtgaccacctagacgcggaagctggaggagctttcttctctaagacagtcagaggagccgtcgacttcatagagaagatggtctccaccatggactggagcaaagaacgactccagacccgtaagtgaggaatgcacaccataaaggagaccaagatgctcgctgcaaaactggacctcctcatgaaacatttggacgaccacgagaagaagccccagggcactgttaaggcattggactcacatgtaacgtgcgaggtctgcggcagcatgggtcattgtggaaatgactatccggaaacacgtgaagaagcgatgtacatggataacaacacaacgggttccgtccacagggaggtcaggggtgaaaccaaccccacccatatttccaaggagccaacaataacggtaacctttctaaccaaccttccttgaaggatctcgtctttgcacaagccaaaacaacttacgcacttagcaaaaagctagctgctaatgacaagatactagagaatataaacgtcaagctagatggctttggttctgcatttcagaacaagcttagttttaaaagatgattgaaacccagctggcgtagcttgctgcattaattcccgctaatgaataagggagggttccggagcaaccggaaccttatgttgaaaatgctaaggcgattacaacgaggggaggtaagtccactcgcaatctgccatatcctaaccctgcagggaccggcaacaacagcaacagggaagcaccatctagtgacacaactgaagaagaggttcagtcaaagaagaccgtgctgcaggagtattgtgacacgagaccgctgccactcccccagagatacaagaagccgtcggtggacgagtagttcgctcgttttgttgaggtgatccaaaagattcacattcacgtgccgctgctagacgtcatgcaagtgcccacttatgcacgatacctcaaggatatcctcaacaaaggccactaccgacgactaaagtggtcaaactaatggaggaatgcagcaatgccatactccacaagctcccggaaaagaagaagggtccagggtatctcatgatcacctgctcgatcgagacacagaaattcaaccaggccctctacgaccttggagcaagcgtgagcatcatgcccaaggatgtcttcgacaaactcaactttacagtgttggcaccaacaccaatgcgtctgcagctgggcgattcattggtccattacccaactggcatagtggaatacgtaccggtcaagatacgggatttcttcatcccggttgacttcgtggtgttggatatggaatctgacaaggagacgccaatcatcttggggcgtccgttcgttagtaccgcagatactaacattgatgtgggaacgggaagcatccgtttttgtatcaatgggaaggaagaaaagtttgagttccagccaaggaccgagcaatgctccatggtgaggataaagtatgggccaaacccgcaaaatattcatgtggtcgaagtggagccacccaagacagacagcctagtaaaattcatgcagaatttcctggagaagggaatgccggtaaccaggtcccttgagaagaagacgctggtaaaatctagtacaccggctaagaaacaagagaagacggctcaaaagaagccgccacctgttgacggtcgttagcgaccagtttcacccgtcaatactacccaaataaaggagaactagttatgcttgcaatgcatatttatgtcaaataatataggcaaaatttgctacaggacaccgaaaaattgcggtctttgctgcgagacacccgaagatcgtgtatttgctcgtggacactgtaaaaaagtggtaattagctgctggacactcctcccattattttattatctccggtcaaaatagagagagaaagagttgtgtaattaccaaaatgcccctgtacagtgttctttctctcacttcttttcttttccccttcttcttctttgcagtggagtagagggtgacggcggccggcccgagccgggacggctcggccacggcagggcggcggcggcggcgcatcgcccatggcaccgccggtgatgccctccgcatcggcggcggcgagctcgacttcttcacgtcgcgctcccgcgccgcccgccttgccgacctgatcaccttgccgtggcccgcctgcgtcgtcgtgtccaagcacgctgcccgaacagcacgtcatctgcttcatcgaggaagccgcgcaccgcgtctgtgaggcactagcaacgtcgtcgaggctgtccgccacgtgcgctccatcatgggcgaaatccgcacgctccgcgacatggacgacgacgaggtcttcgcctacgccaagcgcatcgccgcgccctacgacctcgtcatgcagaccaagcagctgggccgcctccccgtcgtgctgttcgcggccggcggcgtcgccacccccgccgacgccgccctcatgatgcagctcggttgcgacggcatcttcgtcggctcgagcatcttcaagagtggtgaccacgcgcgccacgcccgcaccatcgtgcaggcgatcacccactgcaggtcgttgcgtccaagcacgctgccgcctcgtcgtcctcgctggcacaccttcgccgtggagctctgcccggtgtgccgtgacagagaaagagaggaagagatgaacggagagaaagagaggaagaagaagaacggagaaagagagattgacaagtgggcaaatttgtctttaaccaaagtttctctctccattttgaccggaaataataaaataatgggaggagcatccaatagctaattaccacttttttacggtgtccacgagcaaatacacgattttcgggtgtctcacagcaaagacctgtagcaaattttgccaataatatatattccactagcactaggattactaacctcttgtagagaatgaacacaaaatggaggagaatcaacagtaacacaaacgatcgatcaatcgaacgctgtcgaggatcggacttatcaatgaatgggccaagaatgcagaaatgacatgaccaattgggccagaattcataagtctgcagaagagatctagagaagaggccaccagccaaaacttgggctggttgggccggcccatggttcggccaaaaccatcgtgcaaccgtccgatgcatggtttgcgctggattgtccggattgctccgctatggcggttggagggtattaccgaccattccagctgccataaccgtcgttaccaagatataaaaggagctctcatcctccattacaagacacacctcaagcaaaaacttcatttcatcgctcaagtttagtagtcttctagaagtataagtggaaataggaaatagagtaggaattatcagtcccacggagttcttcggacagaattcgggtggtggctcttagtagctttttccttccttatgtaaaaacttgtacctttagaatatttcttcttttatactaattctggtatctgtattttatttccgaagtatattaaatcccacctttccttatattgtccaagtttatatgttataataatgttagctatctggaagatgcaatggtgtaggtataatgatcgtgtatacgatgactctatgtcatgatgataatattagagtagtatttggtaatttaagcatggtgtttgttgacggtcgttatcgatcagtttcgaccttcaatattaccaaaatagaggagaactagagatgcttgcaatgcataaacatgttagaataataatattccactagtattaggtatactaacattttgcagagaatgacactaaagtggaggagaatcgacatcaacacagacgataatcaatcggacgatgtcgagaaccagacttatgtgtgaatggccaagaactcagaattgacacgacaaactgggccaaaattcacaagtctgcggagaagaacaacagaggaggccaccaggcaaaccatgggctggttgggccggccccaagttcagccgaaccagggggttcggccgaacctccctcatcgccgctggatgcagggtttcttctggacggtgtggattagctcccaatgacggttggagggtatttccatgatgaggacataactagctcggatatgaccatgactaatttatatattcatcaaccaaaggtgcatatgttctatgttagatttacttattatatatttgaacaaatgttgctacacagtgagtttcgtgtgttttcgtttgcagaggtacttgcttgggagaaggaaaagaaatcgagcataaggaatacttggatgatcaaagaagttgattggggaccaaaccaagaccttctccaagtctatttctacctcaccatgtcacttttggtccatagaagacaagagatgaagttctacacgtttttgattcggattcgggcctcctgacagcatcagtctactttcagatggttttggtcccacgtcaaaattcctatcgagctgccggggatcttcaaaaaaaggagagggctacacgtcggacgtccgatgctttagggaaaaatcggatgctgacgtcagcatgacgtcagcgcccgatttacgtgcaaaactacttttaaactaatttttctcttaaattacttatccaaatcatgatccgattacaccattaaattcgttgcaattaaatcttcaatacaagaccacacatggatatattccgataaaaagaaattttagcttattattgaattatctttaaatttttagcttattccaccagttatatcgaaattgtttcactaagtagatcgaaaatgtttcacttgtttaaatctggtgttgtttcaccttatataaaaacaatgtttcagcaaatagcgaaagaatggttcggttcactgcaacattagatctatacatagtgaaacattataagtacactaggtgaaacatttttcggtgaaacaaaaaatgaaacgaattcccttaacaggaggtttccaaaatatgtgggttttttgttgcaatgaaatatttcagttcactgcaacattagatctatagatagtggaacattgtgagtgcactaggtgaaacattttttgtggaacaaaaaataaaccaaattcccttaatttagagtttccaaaatatatgggtgatttattgcaacggcgtgttccactgcaacatttgatctgtacacagtgaaacatcatgagtacactagctgaaacattgtaaaactactggttaaaacatcaaaagagaccacatgcaacattaaaaaaatcaataaaaaattaaaatattttgttgtcaaaatataattatgtgtggtcttgttgtaaagatttaattgtaacgaatttagtggtgcaatcagatcgtagattagataaatagtttacgataaaaattcttttcaagaaataagaaaagaaaagattctttgcatgctgcagtggcaggaaaaaacaacgtctaatttttctccaacccgccggtggttcgggtgtgagcattttcacgaagaatgggttaaatcaatagtgggccccacctaacttttcgtccgatattttgtttcgctccggacgctcgatacgaagcgttttcgtcaaaacaagccacatatctcatccagtcccaatctgatttgggttttgggcctcgtaattgtgtcgtgggcttagcccaaggtggtgtgcaccctagggcaacactaggacgtccctaatcacatttattcagtagccgtcatcgtttagagttgggttttgcttagattattatgtgaagaatagtttcgccgctagttcggtttgtggaaccccaaattctagtgcttaatcattcatatgcaattgtgttgcaatctatcttgttcttgcttgtgttcttcgattcgcatgaagggattagccttctcggcaaggtcaactgggtttcggcacggttgataaccagaggagacatggtgctgcgattgcggggctcaagagcgtgcacgttcaacaagccggatcaatttgtgtcgtgactccacccaaatcgttgtttatcagaacctttcagaagatcgggaaccctagtgcacatcaagtggtatcagatttagttgaaggcatctgagaacaaccaaggtaatgaggaggaagagaagaaagacgaagagcaaaaagatctatccatagctccatgcatgcttgaggaatgtttaattgaccaagcgcttacaatttctgaagatgagaaaaaaggtagtgacaatggtgctacaactgctcaaggtatgcatacttatgatgtgccaaatatgtccactacttgtgctacattagagcaaagcatagtggaaacaattgttgaaatacctttgtcacaaaacaatttgcttgatgtttcttgtgataaagaagagttgtgcgatgcttcacttatatccatgccacaactagtgaatgaacatgttagttctatagtacagccactgtgtgttgagtttaaacatattattcacattgctagtgagaacgaagagattaaattgctatcttctttaaatacttggggttaaattcaatttgatgatctttgtccactcaactgctaagagaagaaattatttgctagatttgaattgccatgcccatctgatgtgatttttcatattattggcaattacgataataaagaagaatataatgtgcatcgagtatatatatgttcgaatttgactatacctccttttcataatgaaatgcattgtctagaggacctcatgcgtataagtaattctctatctatttcctctagttgttcaaatgagttacaggttggtttgcaagaaggggagtgttgtggtgtttcgactacaaagattttaggatccaaccatatgtccatcaagaaatggtcctcaccagatgttgtgatagataaatataagtacaatacgctccatgataaggtgaaaccgaggacggtttccaatcaagaaggggaggatggtaaggacataactagcttggatatgaccatgactactttatatattcatcaaccaaaggttcatatgttctatgttagatttacttattatatatttgaacaaacgttgctacacaatgagtttcgtgtgttttcgtttgcagaggtccttgcttgggtgaaggaaaagaaatcgagcgtaaggaatacttggacgatcaaagaagttgattggggaccaaaccaagaccttttccaagtctacttctacctcaccacgtcacttttggtccatagaagataagagatgaagttctacacgttctggattcggattcgggcctcctgacagcatcaatttcgaacggtcctagccgctgatctagaaggaatttcggggcccatgagtacttgttggaaagcttatggagtctactttcagatggttgtggtcccacatcaaaattcctatcgagctaccgggaatcttcaaaacaagccacgtatctcatccagtccgaatttgatttgggttttgggccttgtaattgtgtcttgggcttagcccaagggggtgtgtgccctaggacaaccctaggacgtccctaatcacatttattcagtagccgtcatcgtttagagttgggttttgcttagattattctgtcgagaacagtttcgccgctagatcggtttgtaagaccccaacttgtgagcttaatcattcatctgcaattttggttgttttctatctcgttcttgtttgtgttcttcgattggcaaacagggattagccttctcggcgaggtcatccgcgtttcgacacgggtgataaccaaaggagacatggtgctgcaattgcggggctcaagagcgtgcgcattcaagaagccagatctatttgtgtcgcgactccgcccaaatcgttgtttatcagaacctttcggaaggtcgggaaccctagtgcacatcattccgaccattccaaccatcacaaccatcattgggaggctatataaacccctcgccttctcacttcactcacagacctcaagcaatagctctctcatttctctcaagtttagtttagtagtatctagctggtggaatagaaatagtgttgaaatcaggtgtccggaagccttcggaagagttcgggtatggctctagtagcttttctcttctcttttgtaagctttgtacttttattagaatactcttctaaatatgagtacctactttatactatgttcatgttatactgaatatatggctagcttatctgggagatgctttggtgcgggtataatgtttgcttatgcaattactctatgtcatgacgacgatattagagtagtatctggtactttagacgtggtgtctagactacgggatatcgttatttagggttatatattgcggatgagaggtgggccgctaatggtgacagctcagtacgggtattcctccgtgccggtatataatcctaagttaattaatttcctggggaaggtattcctccgtattgagccccggttgtatggtcatgacgggctgtcgtaaggaactcggcagtcaggggtggcttctcgaagtaccaggagggcatcggatagagggtattagctagtatatcggttaactagaatatatgtatactatgtatattagaagtataggagtagattttctttctcttttctttccatttagcttagatgaattattatgagaatgagtagttaatgcttgtgtgtcactctacccttggattatcttaacccctgcttagaatatgattatcataagtaatatataaattattagttgagttctctctacatgatcttcctatgagataaaataaatacgatacccttggaatactctcgggtgaaatgctataatggtatatccgtacgcttgcggatgaactctgtaaccataatataccagaaatatttctgcgtcattgctgggaattatatttctagcaatgtcgttaagaaataccaacagtgtttagattattggatatcattatttagggttatatgctgtggaagcgaggtgggctactgatgctaacagctcagtacggttattcctccgcacgtgtatatagtcctaagttaatttcctggagagggtactccttagtatttatcctcggttggatggtcatgacggattgtcgtaaggaactcggcaatcagggtggcttctccaaccacaaggagggcatcggaaagaggatattagctataatgatatgactaggatgtatgtataatatgtatgtatactattgtcacgccctgaagtttcccccttcttctttctttaaaaatttgttaaataaatcgtccaaagagatggttcaaattaacctagagctaattccctaattaataaatgcaattaataattggaaatggcattgtgggatttttcttgggttccacatgtcgcaattgattaacaagatttttagtggaattttcagagccttggaaataattttaaccaattaaaaatgagcaagtgcaatatttaatcccaggaaaaatcctttcttctttttcttttttcttttccttctttttctcttatgggccgccggcccatctcctcccgcgccctccccctcctaccgggctggccggttccctcttcccctcccgaagtccacccggcctccccctcactctcaggtgctgacaggtggggtccacctatcagcccttcccctacctccagccggttggagccaagctccaaccgccggcgcccccacctccccacgccgcccgccttcttcggtccacctggtgcccccactccacacacgcgccgggtcaccgccctctgccgccccactctcgtccacgcgcgcgcttgcaaggggcgggattcaatttgaatccccctctctctcttcctccccactctcccacgtcgccagcaaaatagggaggtttcccgtccacgtctgccccctcccgcacctataaatcgctcctccgagccccctcaacctttttccgctctggccgcgctcgcccgtgcactccgccgctgtccccacgccacacccgagcttcgccgccgccgctgccgcccatctccggccgcatgccgccgccgctagagccgccgccgtgctaagccgccgctaccattagcttcaccgccacaaatctttcccggccgctgccttgcgttgccggaatcccaccgaggccctattttcctcgcgtcgccggtgagtcctctctcccctccgactccggccgacattggtggccgccgtggggtttttgctccgccctaattcctctcctcccctcctctaggtgtcgccgccgcccatccacccctccactcgccgggtcctcgttgtcgccttcgccttccgcaccggtcgccgccgcccctccggtgaggaacctgccccctccctccttcccactccccgtacgcgccacttcccgcgccgccggtcaccgccggtgaccagcacgccgccgccgctcgccatggccggctggccgtctttgtgccgagccgagccgtgccaagccgccccccgcgccgtccgatcggcctcccgtccgatcggcctcccggccgatctggaccgtcggtcccgtggaccgccgcggtggaccacccatgtggtcccaatccacggtgtaccggcgccctttcagccgctgacaagcggggcccgcttgtcgacacagcccccccggatgacgtcagccctgggcaatatcgcgcaataaataattaaggactttttctttactagtaaaaacacagattatcttctaaaaatcatatctaattcatccgagctccgtttaagtccattcaagtcttagtaaattcataaaaatccctagaatccattaaaaatggttttgtttcctgtttcagtagtcttatagcatgttttgcttgtgtgctttgtttgtcgagtagatttcggccgttttgtcgatccgcggtttctcgaagacgttgctgagatctcatcagtgcgagagcaaggcaaatcatgcattacaattgatcatattgtacccaatttacaaatatcctgcatttctattaaatgttgcattcttttacaatgtcatgtgggatggttcctattactcatccatttattgtttaccctatgccattgataacttgggtatcaaaatgactagatgttggtttaggaaatgcttagctatgcttagctcaactagtacacaaatggggatcatattactatatagactttgactattagcatagctttggattagtgccaccacaatggtgttagttaattaaaatacactgaatggtgggttgtgggtgcatggttttgctggtcgcacccatggcaattaaggaccggttcacgggaaaccctgggagacttaccgtgcttaccacaagcgggagtgggtaaatgcttgatttgaagtacagctcgaccctttcctaggcaccggtggcgagggtgggcatgatggagttgggtcggcgggggtgtccggttgtccagctgccggattcaccgcggcgcaagacgggaccgcccactgccttttgaggggtgggggtgaaaccttagcgtggtgtggatggttaggggagggttatgcagagggtcttgtcacgattaccccctttgcagtatcatggtgatacttcgggcatggcgacatgtgtggaatcgtgtcttgtgggtacagttgtacacgtctggccagagtaaaactattcgaatagccgtgcccgcggttatgggcgaccaaccagattcaccgtgattagtctcacccctagtttagcttaatgaactggtgtagtttaagtggttggttgggcctgttgcagcgtggtgtagcgttggacaatgattggttaatattaattaattactacaattgttttactgctttcaactactgcttttaaatgcctgctttatgcaaatgaacccttagcctcctttggatatatcctgcatcatacctcctcttctggtatgacttgctgagtacagtggatagtactcagccttgctctcttttcccccacaccagagctgaagatcttcctagttggagctgtcttattgaggttggtttcgtcgctgccgtcaaggattgcctgtggagtggagtcgccccgctgctgaagtcaagcttccaagtctagctcgttttaccttttccgctgcatttgtaatcttttatatttttgtaagatgtggatctgtgtgtcaacaattatcgtttgtgtaccctggctagtcctagacaggggtttaatgcacattcagcttagaaatcctggttcgtgaatttctgggcgtgacaactataattataggaatatgatctttctatattctttccacttagcttagataatcatgaattagagtataaatgcttctgcttagtgtcactctacccttggaattatgttaacccctgcttagactttggttattacaagtaatatataaattattagtacggttctctctattataatcttcccacgggattaatcaaatacgatacccttggaatactctcaggtgaaatgctacaatggtatatccgtgcgcttgcagatgaaatatgtaaccataataaaccacgagcgtttctgcgccattgctgggaattatatttctagtaatgtcgttaacaaataccaacagtcacctgtgagctcgtccatggcggctagaattcttttgaactaggtgattccccgcgctttactgcaggaactaattaacaattttcactatattttttcgacaattgagctaggagttagaagaataatgaaacatcaataattatcagaacttatgataaaaaaaaataatacccgcactttaatgagtgaaacatattgataagtatatagtaaatattgttaaaatgatagacttgttaaaatattacgaaaatcatgtgagggtgtgataattgaatatgcttgtatgctgatttgtagaattaaatagattgtagatgatattgcttgattgcatgagattaaatatgtaattattgctagtgggtgatgatgtggcatggttgcatgttgagtatagattgagggacacgcttgggagggttgcatggatgaatttattttgtctgttcttccatttgatgcagtggtgatttagacgatttcatttgaatttcatatttgatatgtggaaatggaatgatttgattttaatttcgtgtttgatacatgaaaatgggccgttgcatgcatgtggttttttttgtctatggccactctaaatgtgtcctttttagattattgggtggctaataactaacaaacagctaatattctaataactaacaaacagctaatattctagagaaacaaacagctaacaacttattttatgtcgacttattataactagctcaataatcaaaattacaattatattaagcttaaacaaacaggcttatgctggcggttatcttaactagttgcctacaaaaattagacttttgcacacggtcagcttaatgtagccgcgagagaaaaacattttcactgtcggctgggctaggtcgcccggcagtgtaaatgcctttttgtttgcggctggtggctgctagtgaaaatgatgtcttctcattggccattagtcactggtggaagtgctggtcactgtagaaaacccaaattgaccgcaacaaatccattttgtagtagtgttttcacagttttggtttttgcgtgcttcaatcattcaggctttgttctcgctgtgtggtcctacattgttgttatcatgccatgtaccgcttctttgaattttgtctaaattaatgtgcatttgaaaaagttaattacgtcggtaatacttcaatgtgtggcggaggccgggacggcgagcggcggcttcaccggcgtgacgacgagacgaggacggattgaagaagggcggctcccgtgcgcgcagccagggtaccggtccggccagaccccagtggcgcgggagtggaggaacggcgtcggcgtcggcttggtgtcggtggaggtggtggaggagcggttgatggtggcggcagcgactccatctccaagggaagatctcatggctcgccgggcagtgtcaccactgcagtccaaccgtggtaggcgcagtactgcaccccctgcacaaggatccggcgaggttcttcggcaaccggaggcggaggaggaggcgcaacagggacgggcgggggaaccacaaccggagttgcggtcacacggcggcgagggtagtagcagcggccaccaaccctagccctgcctctgcgggatccccgcgcgtactcctcatcggtcggcgaagaagatgacggagccggcgtacatgctgatggcaagggaggccgagaacggcatccatgatccaatgaaaggtaggcatcgtaccttctctgatgattcttctgttcgcttttctgttagatcaaaagcgatgttttttccttctttcacttcgcgatctccttcgcgagagcgaaagtgctgataacgtattgtgaatagaattgattgagcaagagagattgagtgagagagaattacacacaagaatgtagggaatgaagtgagcgattctttattgataacaatggttacaatatataggggggagagaggcggtaatagaagacgcgatggtttgggaaccatcgcgtccgttactagaatcgccgtgaggcgagaagagatgtggggcacgaccaaccgtcgtgtcccagagttggttgctgctctatccatatagttggatgagatcacctaaatatttcataacaaggatgactagactagcttaatttgttggtctggtcattataccacatggtctactacagttatcgtttctttcgtacggcatggtgtccagcggcgcctgtgttcagtgggtatgtcaagagagtaggtcacttggtgctcttgagattgtcatcataaaataacagtagcgcggtggctgctaaagcttgttatttaattgactattccaaattaacttaattcgttaagcacgtgtactgtcagagaaagcgaagtgttgggagatgttttagcaaaacattgatccatattaactactgtagctgagctgaaataaaaacttaagcacgaatcaatgcatagaaagatcaatatagatttgtattgatcgtggaaccagaattaattttaggtatttccttgatggaaaggtctattttaggtccagctgattttgttgatgatcaggaaattaaaaccttttactcgttgtatcttggcagttaattaaagctagcgccaagtagacatatattttgtttagggctatatgcacatattgcgttaacatcttttccttgtaatttcgggcggtggtagtatttactggctgtatcgaaactaaaaaggctaaactagctagctaacgagatatacttcaggatatccatccacgatcgggcgcgacgggcacgggtagttcctacccatacccgtgcccgtaagattatttgtgcccgtgagtatacctattactacatgacgggtaacgatggttgcccatgcccattgcccgtgggcgccttatgcccgcgggcgtgcctgtttacccgccacaacaaaagcagtagtggaacaaaaaatctacaagcttctaagttcgaatcgaacttaaaatatcaaatattctccgcctcggtgtcgtatctcttctctggcggcgatacagtaaggggagagaaataataaggaaaataaaagggaaaccgtaaaaaacaaagaacgtggcttatgtattctagtggattttgctcctagcctacatgtaagttagatttcgcgggtaaacgggcaaagcgggcatgcgtagtgattacccatacccatgcccatttacccatcgggcatagcttttgacccaataagatacccatgggtataaaatggagaacaaacccaaccctaatagggattttacccacgggtaaatgggcaaacgggcacaattgccatccctactaacgagatatacttcagaatatccatccacgttgtcccggcggctaaactagctagctatatatataacgagcttgattaggtgtatctggctgatgtgtcactaccgaacgataaataagctataataaggtgttgtcgcagctttggtttatgtctaatcatgcattatttaaatgcatatccatgatttcaaatctttaagagattgtactgcgttcccaagtcagctagcatgattaatttgagctttgcattttgtccagtatatatatatattgtaggtggtttgaggaatatttggcatgtttctgcgtaaaatcgagggatcgagggaaacggtaacaaaaggagatcgtgctttatgtagaagctgattttgaatttctaaaaataagataatttgaagtaacataattttgaaattcaatcgatgggtactcgaaaataatgttacttcaaatttacactagtagaaaaactatttttccacatgccaccttttttcacaagcggcccttaaagaaaagcatatgcgtagatacttaaggccgcctcaggtcgatgaccacctacgaaaacctatttttaatttacgaatgaatctctaagaaatttgctcgtgaaacatgtctatttatacgggcaggtccctatgaaattagcctataaacactaattgagatatggttttacataagaaatcaatcttgtaactccattacctaaagcggtaaactttatataaaaattataactctctacgagatttattaccactttgttgcttaaagtgtttctatttgagatgctttaagggttaaaatattcatgttttgtgtaaaaaaaaaccactctaatatgaagtccacctataaaaataagaggccagaagatgaagcgagaaggagaagaaagggacaaaaagacaaaaggagaagaaaaagaaaagaaaagaggaaacacaggaaaaaagaaaatttcgaagtaggtcccacttgtcagttggacctaaccctcgttgaaaccaccaatgaactaccgtggtatttcacgatggcgcatgcagcaggttaagacctatttgaaatatttgaactagtgatcgatggtgccctggacgaattcgggatctgtaaaatgcattttcaaaggcttataatgcatcagctgttgatgtgcatatataccaagaaattatttattattaagatcattacatgctttattgttcacggacgtcgatcccagagtcacaaacatcgatgaaatgtactgcggcagcgacatagcatgcagttcaacacgactgtgtacgagtgagtggtcgtctacttggccgcggcgtcgagggtgaggaacgggcgctcgccgttgaagttgcccggggggtcgtagttgcaggtgatgaacacgccgcggttcgccgcgcacacgacgcgggcgcagccgatgcgcaccgacttgcgccacaccacctgggtgtagtggccgcacaccttgcccgggtcgcacgtgttggtgtcgtagtggtagttcttcttctcgcccacccacgacgccaccgcgtcggcggcgctccaggcgcgccccgccgagccccagaagatgttctcgccgtacggcccgccggagtgctgcagccggcagtcgccggcgcgcttggccgcgtagctctgcgcgaagctggcgaccttggggtcccagctcaccgggccgacgccgtccgcgcgccgcgcgctgttgtgcaggttgacgtagtcctgcggcgtgttctgcgccgaggtggtggtggtggccgccatggccagcgagatggccacggcgagcacggcggcgaggctgaccttggaaggtgccattttctgtctcgtgttgtttcgtgggatgaacggagttggaaatatggtgcttatttataatctgtttgtgtggaaaaggagtcggttaggtgtgatggcggcaaagaaaaaatgcgaaaatttgcgagtggcttgctacaattgggtgcgtaattgcctgcattttcttgtccatgcatgactccatgtgtataattttgaatatgcagattgcattatccaagttccacaaatttaattagtatatatatattggtcatgttgagtgaagttgtaagcaattgacttgaatttttacactatggctgtggatcgtcgtggcttgattggatggcatagttgaaatttgaatacccatccacttccacagggaaggaagcaactacctacccagagaataactaatagctccactatacggggatatagttataccctgcttgaaagattaatttacactagtctcttaattatgggcttccgttgataataacttccaagggtaattatgtcagtgttaacgataaggggtacccaatactcttagagttagacccgacggagcccactatataccaattcttaatacagaatcatgcctcatatacgaaaggtatttcagacaaagaagttgaagaagagttctactcggacattacaaggattactcggatcgtatccatacttgtcttcctagttcttggagcaccccgagagtttaaaaacaagactccataagagaagaggggacatgccaagtgagaagaaagatctagacagatatatacaagccaacatacaccaggataagtctagacaaacttaatttagagccacaaacaccaatatgaaggatccagagcttgtggtctaaacccaatcagatgtagtcgatggctagtgtggtcttcttccttgaatattaacttccaatctccctgagttcatatttgcggaagaaggctacactagccgttgatcatatctgagacctccatgctgctataccactcaaggtcaaagcacactgacgtgcgtaatcatttgattcgtgatgtgttaagttctcggaaaatgcggcttgagaaagtctgcaccgatgataatggggctgacttgttgaccaaggtgatgacaatggagaatctcaaggtttgttgccagctcattggtatgactaccggaaggcagccaggtgctccatgatgtcgggaggtggagtttgttaggctaaactccatccacatagagcctttgctctcagcccattctagtccaaaagtcttacaaatatgagctattgatacatgtcttcatcaatgatgaagattgcctcatatttttgtggtgcaaacgaaaacctagcctccattgagagagagagagcagcagccattggagagaggagaagcaactagcaaattaaacacaagagagggggaggagagtggagaagaagagttgcagattgttcagcttagtggttgttacccgatctttatcaaatcagtgattggaggctcaaccgtggttggattggcaccaaacttagtgaggtttttcctcacttagagcacttcaatcttatcagttcgtgtgaggattggttgagtagagcactggatttgagtcgggttgggcagagtaagaccaaaccgaagaaccgaaccgaaaagaccaagaccgaaaaaaccgagactgagaaattcggtctcgaccagtgaaagacttaaatctgttcggtcaattcagtcagagccctcggttaaccgaaatgaccgaattgggcccaataagcccactaatttgctagaaaccctagaggcagagaggtgccctccggctctcgcatccatccaaaccattcccatcctcctcagttcacaccgtcttctcatctccttcgtgcttgcctgactacatcggcgtgcgccgcctcccgcctccgcctccacctccatcgccttgcaccgcctctaactagcccacctccgcctccattgtcatgtgccgcttcaagctagcacgcctccgcctccatcgtcgtgcgctgtcatgcccggaaattcacaagtaatttccgaacttatttgtgcataaaatcctcgtccaggaatcagccgaggtacacaaactgacaattcaatatacaaatccatcacaacaataacgttgcatacttacaaaagaaaagaaaaacagcagcggaaaataaaatctagcgaagctccggctccactcccacaggcagctcaactgggctataagccaaacgtcttctccttctggatcctttctcttcaactgaggtttgattgattattgcaaggtgagtacatggaatactccgcaagccacacaacaaatatgcaagtgcacaaggataccaaaggatggcaataatataggctcatttgcaaaagcagtatttagcaaatatttaagagtagtaaaacagtagagtaattaatcatcaattttaatcaacattgcacagcaccccaatgctgcacaggcccaaccatcctgaacaaccatacccggttgtatagatctaactccaaaccaggagctaagcaatattattaccagttatagcatcaataattattgtgagaggtgtgagacaaatcacgaaaagcattgctcaacccgcccatgactgcaggcacggctattcgaatagttttactctggccagaggtgtaccactgtatccacaagacacagcctcaacatcatgtctaccatgcgtcgcgatactggaaagtacccaaatagaggctgtgacaataccctctgcacaacacaactcatcacagtgcaccgttcctgtatcataatcaccccctcaacaaccagaggcatagactccccagcgacccccacggacttctcgccacttctcagtctggcgccccgcaatgaaccatgctagacagaagataaagccgttgctcacgctggcttgtggttggcacggttaatgtctcacaacagtagctcgcgaaccggtccttaattgtcatgagcacgaccttcaaaaccatgtgctcacaacccaccattgtcaatttttaattatcaattaattatcgtaccacgattaactatcgtgagctaccattaaatataaccataaataataatgtagtatgattcatcccattaatgagctaatgtttctaagcatggctaaacaattatatatatagcatttacctgaaccaaaccaatatataaggttcaagctaatcaatttattacccaaggtatcaaggaatagggtattcaatgcaaattggccataacaaagaaataggttcacaccacccggtgaaattcgaaaataaatgcacagttgaaataaatagagaatttaaatataggatcaacatgttcaaaggattgtgtttaggatatgtgtgacttgccttacaataatcggtcttcaattaatcttctgaatcacttccaacgcactcccgaaccttcgcaacgatggaaacgacaagctaacatgcaaaacgaagaaaaagactaataaaaaccaaataaacagtacataaaaagtaaacaagcatgtagatcatgattttagataaatttagagacttgaacggcctcattccgacttcatatgaattagttatgaattctacaagattaaactgattttagccttgaacagaaaaggatttacgatttaatttagggaaggaaaacgggctttatgacattattgatgacgtcatcgccggcaaggcattgaaccgcaaggccacaggtgctaggaaactcggccggactatctgagagcaacaccgcggagaggacgacgagatgaactcaccaaggggtgggacgaccacggatggtgacgggagacgaccgacgacgagctccgaagggcggcgaggttctggttgacgacgacagtggtgctccggcgatcttcagcggagggaaaccagcggacgggcttcgccttggctctatgatgccgaggaaagcaacgacgacgtctagcatccacggagttgacggcgaggctcggacgaattgaaggaggagtagatcggcttcacgtcgacgaggggcttccagcgggttacggagaaaaggaaccagtggccgggcttcttctcctccttgcgaatccaacgacggcgacggcgactgaaggtgacgttggacggcgacggacggagaggatggagatcaaaacacagtggcaatccactggttcacggcaacgggcaacctccggtggaactcggcacaaaagaacgggcggccggggcggagatcttcactgcagtcccggtggtggcgacggcgaccagaggcggcggctactcggcggtgcggctcggatggaacgacggccgacgcttggagagagaaggcagctgcggggagagacggctagggcacgggagctcgagctaggggttggaaacgagaaaggaggtcttgcgggttctatttatatccggaagagggagagatcggctcagacccgagaggatttggtggcggattgattaaggttcaccggtttggagataaggtttatctgactgatttgatctcgaatcaaagggataaaatcttattccttagagatgaaacagaagagaaagataggaggaatatttcccctcaactaattcaagaaacggccgagagaagcgggcaaatcgggcagaggaattggcagcgtcacacacggctcggcggctgcactgggaggaggggtggggggg

SEQ ID NO: 27377 - DNA, 18869 bp, Oryza sativa
  unsure (1)..(18869): unsure at all n locations
atatgcgtatagaaagtttgtatacgtgtatataaactttatatatgtgtatacaaactttgtatatgcgtatagaaagtttgtatacgcgtatagaaaatttgtatgtgcgtatacaaacattctatatgtacgaatacaaacttggtatacatacgaatacaaacttggtatttatacatcttgaaaaaaaaggaaaaaaagccgaacagaagagaaaccggaaaaataacaaactgaacagaaaaaaaggaggaaaaaaaccaaatagaaacgaaaaaaccggtgaaaaaaaccaacctaacagaaacgaaaaaaagggaaaaaaacaaaaaaaaaacgaaaaactcgcttctccctccggcacgtcgccgccacctctccgcgcgcgacacgtgtccagtcgcgcggagagggagtcactcgactgatcgcccaatagcaatcttggctgcaggggctctgtccaagcttgaagacgacactgtagcaaaggggaggagtattagactttttgctgggctaaaaagaaattagagggttaagaaatagacttctctgggaaagaaggagacgggaagcagagacaggcaaagaggaaggacaggctgaggatgatagatagacttttccagtttaagcccgaaaaggaaaaggggatttttaattacttttccaattaaattaatcactgaaatgatctttgaattgttaaaaatacttccaatgctcaaataatttcaagaaaaatcatgaaactaattggacactcaaagtactcaacaagattataatcagaccatttaaagactaatttaatatttagataatttctgaaatgctctttgtattattaaaattaggagttgagctatgaaaaatccgagaaaattccagagagtataattaatcatggagaatttaatgaaaattaaatccagccatgctttatatttaggaaattttatttcccacaattaacttcacttgtaaattaatgaacatttaatataaattctaaaaataatttattaaataatttataaatcctgaaacgaaaatcaggatgtgacatgcgctgcctccaactggccggccacaccccagaggctatatattcaaaccatgctttaatgaaaattaaatccagccatgctttatattcaaacttttgttacggttagttcggtctatgaccgagaccgaaaaaaactaaccgaagacaattgcttggtcttgagctttgttggagaccgatcggtctgaagattctgaagaccgaattttcaaaaagacggagaaaccgaaccgaatttctcggttagaccgaatgcccacccctagatttgagttgtggattgtcagcttgattgactgcagtttcagcttgtgcaacatttggaaaaaaatgttagtttgagaggtcaatggtgtctgataaagctatttttgacagcttggaagggactcacagaaccatcatttttgccaagtttcatgcaatttgcttcttggtttgggagatttttgttgagaatcaaaggggacagaatatattatttctctacatgttagttgctatagttgatgttgatggcaccaagtatttaacttgatgatatagttgctgttgtgatatgccctaagatgttctagagaagactccatttgtaccaattattgcttatagtggaagcttggagtgaaccgttggtcccatggttttttatttctcacaccgaggaggtttttccacgtaaatcaccgtgtcttgtgtgcatgtgtttatttctgttccactattgatttgctagttgaaaccatcctcaaagctcatggcaagataagtggttgattgtgtgatatatgtttgccagttggtaaattggagtttgcacattgaagtgatttggttcagccccaacaacaagcagaaataatatgcaactaatgacggttatagttatattggagaagaacacatgagtggtggacatagcttaccaactagcaaacatgaccgatttgtttaaacacagaaaaatcattgtgtccgggtgcaacaattatacttttaaaaaaagtataaaaatagaatcatgcttagaacacgtgttaacattatcattagaagctacagatattcgaggtggttatgacttacgattgtcatcgaatactttgcaaagtcaagaaagtcaaaattgttctatccagattagtgaaagaggagtataacataaaaaaaggatgggatgagaatatcctcgaacatattataatgtattattgaattgtatttaaacccaaaatttggtagccttatttttaattcttgagttaatttcagatctggcaaaattgatccaactcaaagaattaagaagataagggataaacgtgcacaccaacgctcatatgtgagtgtgaagatgtgcagctgcgtgtccaatggttgattcatcttgtctcatgaatgtgcaagcgtcgcggtgtagcacagacatgggtgaccttgtatatgactgtgtcgtgtgagctcaagatcacctccacacttgtttttgtacctagggtgcttcgaagatacatggacaaaataaaagtgaaagcaaatgggactcacctggtgaagcccggtgagtcaatttattttattaatctcgttgatatgcgcaattacatgaaggaatgaaataaacaaaaagaaataaagaaaatgattaaagtaagtcctaggggtgggcattcggtcccccgccaacctcttaatgggaggtggagagagatggcacctgattggcagggagatatgagaagcctacaccttcaacttctcgcagggggacagggatggaatgagcaccttcccatgtccaacgggtgtgctcgcttccacgaagcaaagtggtcgcttcggcagagggcaaagtggtcgctttggtggagggctatctagcaagtaggacgatgtgtccatactcggacaggggttgttctcatttccattgggcgctgccacaggggtcacaacaccaccgttagcatgggatggcctgagtgcattgttaacttggaacaacgggacacaaattatcatccatggtatgtcaaaaagagggaagatgacctcatggaacatcttgcaggcatgcttggcatcggcggcatggcatgacattgcttccaccatggcaggacgtactctcgcaatcttgaactttgggaaaggttccatgtagtcaatactccatacatcaaaaagttccacttgaaggttctatgttaggggcatcacatcacgagcggtgatacctccatgcttctggtatcttgcacatctccgaatgaactcatttgtgtcttcatacattgtaggccaaaagaatccactctgtcagatctttgcctgggtgaggaatgcaccatagtggcctccttagggtgccgcatggcatttttcaatgatttgggtgccttcagctgttggtacacacctcctgagtagtccattggaacactcggtaaatgcccgactcatcccataagtgccttcggctctcatatatgagtcatcttttattcttcccccgtggcacatactccacaaccatgaagttgacgatgtttgcataccacatgttcgagtccatcaaactttaagcgcatgtcgtcccgtagaaaatcatttatcggtagttcttgcatgttagtgacatgcatacgcgacaaatgatttgctagagagttttctactccccttttatctttaatttcaagatcaaattcttggagtacaagaatccacctaattaactgaggttttgcatatttctgagtgagcaggtatttaagagcagcatgatcaatatagactattaccctggctccaactaagtaagatatgaaattattaacaattgcaataactacggccaggagttcatttttagttgtggcatatcttaataggtgaaaacagcaagctttttttgaggagaatgaaccctttctgctgcactaacaaggaccattggatagaaatggtagaaaaaatgtataccgttagatcatcaagctcatcaatgaccgtgaaaaccattggaccaatcaagacttcaggaggcttctagaacaaaggtgcccaatctttttagcactatatatatgtttgcttaactaatcttccgatgaaatagaataaatgaagctttagccataaatttgcattgaatttatctgcaggtttatatctataatgtacgagagcttacactgttatactcttttgcttggtatatattggagcacacatcagctaagcagcgtccactctataccaattttattttaaaacatagtcgctcgccctacgaacgcatacaggtacaccctacacctaagaaatatatctacctttaacatttaaaatttattagaaaataaagctacttctgcgtgtaatttattcgcttattttttatgtcaatcaattacaactttcatccatttaattttacaccgctagctacttcctcattcccaaaataagtatttctaggactcaaatttctacacagttatgagcatttctatgacattaatttcaacgcatggaaatccaagcaattttagccaatcaagtatttacaaagatccaactgaagcttttcaaaatttaacagtaagtgcctaaaagtgatcatttctctctaatgtaaatctttactaaataaactataaatgcctatatataaaaacgaatggagtatatttgagaacggagaaaataatgtactttgggaaacgtcccttcaatgtcatgagatcaatggcctacttataaaggtaggttatgcaaagcgcgactaagtggctagttcactagggcttacaataacaattttattcatctaattgttgtattgttgctaaaaattgcataaatacgatcattagagtcctcttttaatactgcaaaattctctgtatcacactgacgaaatttaaaaagaaaaatagcagcgatggaggaaaacatgtatctttccttgtttaccaatctcaagcaaaatttgcaagttcaaaatctccctccaattgtagttatgctttggagagagaaaacttcgggttggaatagaaggagctcaagcaaaagtacagtacataggtcgatcatcacaaacgggcctcttaacagcttgcctacgataatgcagttaagaggcccgcctgcaatataccgtacattatcggagccagccttcttaacggcccacctgcgataatgcatgtttgtaggcaggcattgaccttctctaagctgacattatcgtaggcgaatggtggtacagaccacctgaagactggagggggactcatctataaaaaagtagtagcgactgccacattggcattctgcatgggcatttgctcataaaggtgatatcaagccagtgcaaaacagttttgcacatatgtttacatatttaagcaagcgtatattattggagacaagagctcttaagatttaagatgaatgcttcttctttcgcatctatgtgagcattgtgtattgtatatgtcgtgataattaattttgattggggtgtgagcgacatctagggccatatatgtaaatgtatgttaggaaaccgaccggcccatgaaggcctagcccaggttacacactaatgggccatcactaaatatggaaggtgagagagggagatggctataaatagatgagtagagaggagaattgtacacttgagcaatgaaaggataaatgagaacatggccacaccctcatatcttgtgtctccaattcttatagaattatacaatctctcttggactacctcggtagcaggaggggttgcataatacgttatcagcacaacgttctaccggagaccgaggaagaagaaggataagaaactctagaatccgctttgcatgttgtagattgaattgcaaaatcggattccttgcatcctcctcgttccattttttgtggttttcgatggattccgtcatcgccgacttggagtcgccggcgaacgccgattgacggagttccaccactggcaaccggctgcaccatgcacggcgccggctgcgcaccgcaccaagcgcgcagcgccctgcatagccgctgcacaacgccggccaagccgagcccacgagcttgcccatgcacgacagccgaagcgcatggccgctgctcgatcatgccattcatgggagaaaagaaaggaaaaatgaaggagaaaaatggtaaccgcgccgacatcttgttgttgagggtcgttatcgatcagtttcgaccgtcaatattaccaaaatagaggagaactagtaatgcttgcaatgcataaatatgttagaataataatattccactagtagtaggtatactaatcttttgcagaggatgacactaaagtggaggagaatcgacatcaacatagaagataaatcaatcggacgatgtcgagaatcagacttatgaatgaatgggccaagaacgcagaattgacacgatgaattaggctaaaattcacaagtctacgaagtgaagcagcggaggaggccaccagccaaaatgtgggctggttgggccaggccgaaccgaacctatgccagcgccgatggatgcagggttttgagggaacggtggagattcactccctatggcggttggagggtattatcgacctttccaaccgctataaccgtcattacctgcctatttaaggagttcactctcttcacttcaacacacacctcaagcaatagctctctcatttctctcaagtttagtttagtagtatctagctggtggaataggaatagagtagaaatcaggagtccggaagccttcggaagagttcgggtatggctctagtagcttttctcttctcttttgtaagctttgtacttttattagaatactcttctaaatatatttatggtattgaaatactttccgagtatatgaatacctactttacattatgttcatgttatactgaatatacggctagcttatctgggagatgctttggtgcgggtataatgtttgcttatgcaattactctaagtcatgacgatgatattagagtagtatctggtagtttaggcgtggtgtctagattacaggatatcattatttggggttatatattgcagatgagaggtgggccgctgatggtgtcaactcagtacgggtattcctccacgccggtatataatcctaagttaattccctagggagggtattcctccgtatttagccccggttgtatggtcatgacgggctgtcgtaaggaactcgacagtcaggggtggcttctcgaagtaccaggagggcatcggatagagggtattagctagtataccagttaacttgaatgtatgtatgtatattagaagtgtaggaatagattctctttctattttctttccacttagcttagatattttagtatgagaatgagtagctccttgcttgtgtgtcactctaccctttaatttatcttaacccctgcttagactatgattattacaagtaatatataaattattagtacagttctctctactatgatcttccgacgggattaaataaatatgatacccttggaatactctcgggtgaaatgctacaatggtatatccgtgcgcttgcggataaactctgtaaccataatatgccaggagtatttctgcgccattgctaggaattatatttctagtaatatcgttaaaaaataccaacaataagcattgaagaaagaatcaatgaatgcattttaggagcttagatcggacacttgcataatattacatgaagaagtacttggtcccgaaccaacatagaaagaatagaataaatcaggaaagaattgaagaaacaaactcgttcattttgaatttgagtttgatttgaaatattaggcagaatccaaatcgtgctaacgcttgcagctaaaggcatgtgacagatggaagtttagtacatcagttcaaccgcacttagaaatgttcatagtgcatggctttggaatagtcgattaccgccaaataggacggaactcccaaacacaagtgtgtcataacagcagacgaatacctggctaattgaactaaaccgaactaagcatcgctgaactattcagtgcctcggcatggtttttagagatggttacccgcgacagcaatcgcaatttaaaaactgtcacaacccccccccccaccatttatgaaatttgagcaacatatgtcgcacatatgcaaatgagttacgtgagaagcaaactcactaagcacatgagccccaatctcttctacgtatatgaattgcatagaagcaacgaactaagtcatgtgtaagtcttgcaaatttatccactaaattattatttacatcttctcttgtattggtgtgtccgagaaatcggaataatgagacttagagaaatgcaaaattcagggggagaattttactaactcattaccaaatcttgatatagaaaatcaagtacccaaaaatcaatctagaaaaattgaacgaagaattgggtttttccttggataagttttcccagcagtttcttatcaaggtttttaatgaggcaattcgtgcgacattgcaagcgtatgctatgtactaaatttttcccactgggtttttatggagttttgattaagcataggcatcacgcagtgaaggcccaaggggaagtgttaggaaaccagccagcccatgaatgcccaacctaggttacacactaatggaccatcactaaatatggaaggtgagagagggagatggctataaatctatactaatataaaaaagaggagttagcctcctccaatcctacctgccaaatcacccggatcaatccctagcgtccatctgcatatctacttatccgtaccgtccatccgagtatcacctattcatccgatcccatccatcacaatgccgtcacctgctctagcgctatcctcgccccgatgcccgccgccgcgctatccccgcgtgcgccctcgcgcgatgacaccccgcgagtccctacggcagccgctgcgctttcctacaccccctcgcatgcccccgccgcgacggagtgtggatcctcccccgtgcagtgaaggtgccctactaggtcgctgtcgtccagtctgccgaccatatcccaacccatcgatgtaagtattgcaagctccccttcattttggtgaatttaatttgtagtgtatggtgcaaatccgagggttagggattggatcatagtgcaaatctgacggttaggaattggattcgtatggatgaatccgagtactgtaaccccaaccatttgtttgtagatttgcagaaaaagttaaaatcaaactggtaaatattgtagatttgacgatgttcttgcatttaatctcctcccctggttgtgttatggtacagatctgaagctattgtaggttcccttgtgtcctcaaggaaaatacgtgtactccgtaagagcggaaaattcaggcttgcttagccacccaagacgctgccccctgcctactccatctccaaggaagcgcctgggccactggtctggttggctagcgaggtgtatttcaagcatctacttgtgacgttaacaactttcaaacctgtgctgattgtggcagtcagggaattcctgcatcatacagcgaatgtgcctttatggctgctacactagctagctacacttccatcttatagttttaaaattcgttaaattaaattgtgccaaagtagtgtgatattacttggattgatgccatttatcatggatagaaatcaaatatatcatgttccagttcatgaaacttttgcaggatggagagcacagaggagtgacatgattcccatcctcattctttggagagtttgataggtatgtcacactccatgtgctctatggctttgtatgtcacagatctgatcaatctgctctttgatatcctaggagcatatattaaattaatctagactgcatatatattagattgcataattcctgaaacataatttcagctgctcatatgattgtttggctttcccctaggataaaactttgtactttaattagctggaatctggccatacccttgaagaggacaagggagctacacacaaaaaaaatgtattggcaagagatgctttgcactggacaaagcattgatcttctgttttcttaaggtaaatactgtatgagagtcctacggtgaatatatttatataatatataactcacagaattacatatgtagtatgaagatttagctatttgtgcctgaatgtaattatctaaccattggagtaaatcgattaatcaatcctttttgttgctaacaaattgattttgggtgctggtatgatttgattttagcaacattattgtttgctttacggataacattagcatctatatcaggaaattgcctacaaaatgcttatacaaatgtgttaatcattctgcatctcttgacatgaatgctaatttttatttttacgcaatccaaacattttttttaatcgagggaccttgattaattgcttcagcttgttgtgaaggaaacactatctggatattgaatttgattggagatcaaatgaaggcagtgatcatgatccaacactttgactgtcaaggacaatgtgttgccatgtgtgcaagtaacaattacttcatattatattagaagtagttcctgctactgtttaactaattagtgttaacctaatcatatttcttttgtatgttattttgcatgcttctatagatcaggagttccgtcatgattcatgaggtgcagggaataactcagaggtttttctatacataaatcttagtctttactctttgcccctattgttgcttgtagaattttgcaaggttctgttttagcaccaatgttttttaattaatactgtcaaacaactcccaaatatgtcatgtagaaaatcttctctcaatcaagttttatttgtagaagaacatgcaatagttttgacaaaaatagaagaccatgtgaatcctgaaatttcagagaaatcttcaaagattcaaatttggaaaatttgcaaacaaatataatggtcaatccctggtttcggacagtggagctggagagtacatttatcaccaaagttgtataagtgtttgtttcaatatctggattttttttcctaattgtcagcaccatatatctaaaccttttatcgtagaaggctcaaccacttattctattttatgcaccacaggatatttttctcttgtttacccctgcagctaatttttgtgtctattctaatcatgtgaaagaattagattttttttcttaaactagagaggttagcctctcccatttctattaaataagtgaatattttacaggaaaacaagggcatccaggttgacaacaagaaaaataaaagactggttttatttcttcacaaacaggtccaggaattctatcttactataaagttatcccccactaactccttaagtttaacatgcaaacgtgccacatcatcctccactaacaatcatcacatttaaacatcatgcaaacatgctatatctttatagtttttataatttaagagcttttcaaatacaaacatattaaattatcatccaacataattcacataatgtttcaatgtatatctttattatgttttatgatatcctatatatttatatagttcatcctcacttagttagtgcttaaatgattaatctatggtccaaattatctttctcctttttttctctaattaagtcatatcacatcaattgtttttaagcctttagatgattaatctacggtccaaactatctctctacttttcttcttccataaagtcacataccatcttactttttacgtttgaatcatcattctacatactatttaaatttaaattatcataaaccacattaatttacttaatctgatattatctagctatcttacacgttattttttttatcgttatcatactaaattcccgcagcaatgcgcggggtttcacctagttagatagaaagaaaagacacattaagatagctagaaaagagttttaaatttgcatatcggtccatctaacagtttcttgtattattgaatgtcaactatccctgtcaatctttctcatcgtttcttgttatcaaatgctaatccattaatttaatttcagttctttaactcatttccaatagcccacctgctgataactaggattactgggtgcaaataatactatctggaccacctttaatgatttcatttactttttagttcaaatttggcaatatatttcttccctgatgggaatcatgtgccttttttaaagcttacaccaaggttcttaaactggactgttcatttcacttctgcagtttattggttttattttctgccatcatattttacatttacatgtaggaatgaagtaatggctaccacttttttacttgtttctatatgtatgcagccatggctttctttactaacctagctgtggtatagatccaggtagctttatactcacatattgctgtcttccataaacctttccatttgccagccaatgtaatgcgatcctttttctctatcatgttttctatctgaagttttattgtgctccgtatttttccaatattgttattccttcaacaaaatcaactgatccacacattacttccaacacatacttcagttttttttccagaaacaggatgtggctttttttacagtatttctgttgaagtcagatttcataaatcaatttaaaccagcattacgatgggtcaccctcggatggctgggaagttagctagaagccgagattgagcagtattttttggcagtaactgctaggatgatggacatgtgcagtgtgaaatcccttccagtgcccaactgctaggatgatggacatgctcatgggataccccgtaagtccataccagaaatgcatagttgtcatttcaatttttaagatgtttccagcatgttcacacatgacatctccttttttgcacttcagttaagacaacgacgtcgagcactattccgataacaattgactggagtactattatgagacaatgtctaagagtaactgagatataaacctctatggtttgcataccatataaacttctactggtcacacgatagaagatatgcacttgctgttgattatgtaaatgttatatactgaagtactattttgagcacttgctgttgatcaggtaaatgttatactgaagtactattttgagatattttttatagagtaaagtgcacgggcgatccttaaacttgtaggggtgtgtcatctaggcccctaaactctcaaatgcatatccaagtcccataaattgttatagtatgtcatctaggtcctaaatctccaccacccctttaggatcttatgtggcgttgatgtggcatgccacgcaaacatgacgtggcattattgtgactaacaaatgggacccatttaatttttttttccttttcttctccttctctttttttccttctcctttatctcggacccgagcagaagaaaggacataaagaagatgagaagaaaacggaaaagaaaatgaaaaagaagaagaagaagaagaagaagaagaagaagaagaaaagaaagaaaataaagaanaggacacatcacgtccatgtagcaagacacatcatcgccacataggatcctagagaggctatgtcgatttgggacctaaatgatacactttgacaagttatgggacctggatctacattttgagagtttagggacctagatgacacaaccctacaagttgcactttactctttttatactttcagtactttgtatgtgcggtgtgatatgcatattgttggaaaatcaatgcattaaactttgaggacgttcatgtattgtgggaaacgtgcattgcacgtgcacgattacttgtagatgagtaaatagatgagcagagaggagtgaatgacaacatggctacaccatcatatcttgtgtctccgattcttatagaattatatgcaatccctcttgaactaccttggtagcaggaggtattgcataataatgtataccggccgcctgtgaaaatccttagtctgaaaaattgaatgtacacgggccctgtacatatatgggtttcattactttccgcgttcgtggatctggaaaatccaaaaatttacaaactgtggagagttcatctccatagctaggtagcgtagcgtgctattccccttctgtcatgtttacgttagtctctatcgcattgtccaagttaactatagcaacggtgttttgcacgtacaggtcaatactccatccgtttcacgatataagtcgttctaacattttctatattcatattgatgttaatgaatctagacatacatataaatttatctaaattcattaacatcaacataaatataaaaaatgacttacctcatctgtttcacaatgtaagactttctatcattgttcacatacatatagatgttaatgaatataaacacatatatatgtctagattcattaacatctaaatgaatatggacaatgctacaaagcactggtggagaaaccatctttcgtcggtcggccgaattccacaatagtcccggatgcaataaaaaccgggactaaagatgatctttagtcccggttcaaaagggtaacgggtaacaccaaccgggactaaagattcaaatgttgtcagggcatgtcaggccccccccccccgggatctttagtcagatctcggggatctttagccaaccgggactaaagtcccacccctatatatatatcttcttcctcctccagctgcccgagcaagcttcaaattttcttcaaaaaagaggggaggtcatgccaaaatttctagtgaatttattttggtgattacatacaaatcggaggtgcctaaaaggtttgcaacttcatcctccaatgttttttttgtcatattacatttgcagctatgttttgcacacttttttgtctccaaaatttagttgtaagttgatgagagagaaaaattgtgtggggaagaaagaatatatagaaatttagttgatttgttaaagaaggttttataaaatagttgagaaggaaaactctagtgaaagttaatcttaaataatagaaaacaaactaaaatgaaaattaaaagaagtaaaacacattaaaattagtttaaaactttagaaatagtaaataagaattatttggtgtaatattttatgatttttgtatgaataaagatatggcattattgtatgactgtcattattgtaagaataattatttgtgtacggtttttttcgactcatgtagatggatcggcaatggatgtacgctgaccggcggtccaaagagtttattgacggcatgcactattttttgagagtggccgaagctaacaggcaaaggggttttatttgttgtccatgcaataagtgtaagaatcagaaggagtattctgcatccaggactattcatttccacttgtttgagtcggggttcatgccaagctataattgttggacatcccacggagagcaaggtgttgaaatggaagaagatgaagtggaagacgacaatattccggactttgctcagtacgttggatttgaaggaaatcaaacgggcgaggaggaaatagctgctgatggtaacgacgttgcggatgatcttggtcagatgttgcaggacgccaaggaggactacgaaagtgaaaaggaggcccataaattggacaagatgttggaggaccacagaacttcgttgtacccaggttgcgagcaggggcacaaaaagttggataccactctggagttcttgcaatggaaggcaaaaaatggggttagtgacaaggcatttggcaatttattgaaactcgtcaagaacattcttccggagggaaacaaattgcccgagacaacgtacgaggctaagaagatagtctgcccgctaggactggaagttcagaagattcacgcatgtccgaatgattgtatcctatatcgcggtgaggagtatgagaacctagaagcatgccctgtttgtaaagcactacgatacaagattagacgagacgatccaggagaagttgacgggcagctaacaaagaagagaattcctgctaaggtgatgtggtatttccctataataccacgggtaaggcgtttgttcaggaacaaggggaatgctagaatgatgcgatggcacgctgaagagcgtcaacaggacgggatgctgagacaccccgccgatagttcgcagtggcgaaacatcgacagaaaatttaaagaatttggaaaggacgcacgaaacatacggtttggtttgagtacggatggcatgaatccttttggagagatgagcagcggccatagcacttggcccgttacgatatgtatctacaacctcccccctggctatgcaagaagaggaagtacataatgatgccgattattatttaaggccccaagcaacctgataacgacatcgatgtgtacctaagaccactggtcgaagatcttaaactgttgtggaagaatgaaggtgtccccgtgtgggacgaggacaaacaggaggagtttaacctacgagcgctaccgttcgtaaccatcaacgattggcctgcacttagcaacctatccggacagtccaacaaggggtacaaggcttgcactcactgtatggatgaaacagaaagtacgtatcttaagcactataggaaggttgtatacatgggtcatcgtcgattccttgcagcaaaccactcggtacggaagaaaggcaagcactttgaacataaggccgaccaccgtacgaagcctaaacatcgcagcgggaaaacagtgtttgctatggttaaagatcttaaagtagtgttcggaaaggggcctgaaagctagcctatagagagcgaagatggtcacgcggcgatgtggaaaaagaactctatattttgggagttaccatattgggaattcttggacgtacgccacgcaatcgacgtgatgcacttcactaagaacctttgcgtaaaccttcttggctttctaggtgtatacggaaagttgaaagatacactggaagcacgtaatgatctgaagcatatggaacaacgcggcgaccttcacccggaaccaaaggagaaaggaagccattacttgagtccagccagctacactcttagcaaggcagagaaggaaagtatgtttgaatgcttggagagcataaaggtaccgtctggatactccatgaatatcaagcgaataataagcacgaaggagaagaagttcacaaacctaaagtctcatgactgtcacgtgttgatgacacaactgctactagttgtaataaggggtatccttccagacaatgtccgggcaacaataacaaagctatgtgcattcatgaacgcaatttcgcagaaggtcatcgatccggaaagattagaagcccttcagaatgaagtagtgcaatgtctcgtcagttttgagttgatatttccaccttcatttttcaatataatgacgcatctgctttgtcaccttgtgaaagagatcagtattctcgggcctgtgtacctacacaacatgtttcctttcgagaggtacatgggcgttctgaagaagtatgttcgtaaccgtgctcgtccagaggcaagcatcgccaagtgttatggaacagaggaggtcatcgaattttgcgtagaatttatcgaagaccttcgcccaatcgggatacctgaatcacgccatgaagggagactacggggaaagggaactctcggaaggaaagcaataatgatggtagacaacaatttattccgtaaagcccatttcactgttctgcaacactcttcattggtagctccttacatcgaggagcacttggctctagttcgcgctaggaacatcggtaagtccgatgcatggattacacggcatcacattgatactttccccgcgtggctacgacaacatctcatgggtaacgagtcgatcaaccaacaacttgccttcctggcaaggggaccgtctgggtcgatcgcgacattccagggatatgagatcaatgagtacacattctacacgagagcccaagacatgaagagcacgaaccaaaacagcgttgttcatgtcgatgccatgggacacgatggaacaactgccacgtattacggtgccatcgaggacatatgggaacttgactatggtcctctcaaggttcctctgttccggtgccaataggttaggttgactagtggaggcgtaatgattgatgacagtgggatgacaacagttgaccttaacaaggttggatactcggacgaaccttttgtccttgccaatgatgtaacgcaagtctttttcatgaaggacatgtctagcaaaggaaagaagggcagagggcctgacgagcctaagcgtcacgtggttctcccaggcaaaagaaaaatcgtcggagttgaggacaagactgacgaggattacgatcagttggatgggcaaccccctttcacggtgacgattgaccctagcatcctcctatcaaatgaagacaccccttactcacgtagcgatcacaaggagggaacaatagtgaggagaaagtacgtgcggtcaaccgtcaccgccgatgtattgctgtaattattattgtttacacccaaatttgacacctatggacgaaatagaggaaaattgctaaagtttggaaagtgtcgggttttttcgcagggccg

SEQ ID NO: 27378 - DNA, 6323 bp, Oryza sativa
tcattgtaaaaccctagaatataatctacttgaatcgttcttttactatgttttctattttaccctagtttagtccatctttgtcggtttgcgccgtaaaccgtccgccgccgcagcgagagtgcgacacctctttgtaggtttgtcctgaaaaccttccgttttgcccacaagacgggtagttatcctcatattgatctaaatcggcctagaggctgattttgatctctaaattggctccgctagccggtttagctgtttttctacaaaacccatcttgatttggccctttggcgagatcgaggtggttgacgactctaggatcaccgcaaggcgtttaggtgctgcgatcgtgcttgtcgacttgtcacaaaaagttgccaacacgatttttggtgactccactggagaacgatctaatcagccatatcacggccgaatttcgtttaatctagtaattgtttcgtcaaaattaagaatttcggctaaacagccgaaatcaatctacactgtcatcgtttcatcgagttgaggcaactttcggccgtctggccgaaattgattgcaatagtactgatctgcagcagcccgccgccttcgacgccatctgcttgtcggctacagctgcgatctgcatcgacgtgtctcatctgccgcttagtgcttagggtcatcaagtcgtagcaacgtagtatacaggggcatgcgcgtgtacctgaccgaggagaagcagtagcagggccggcagagttttgcggtgcacggccagaaattttgagtatcaaatctgttcggtttgctgtgtaaaaaaagagaaaaaaggatcaggctatcacagccgatctactactgctcacgtaccggaaaaaaaaaatagcagccgatctaatttaagatcggttgatctttggtatattttgctacagtaccgaagttactgttacgtccagaaaaatcaacaaaggctagttttaattaaattggctaaacacagtaacatatcaagaccgtatattaatctattcggtcaaatatttcggctatgagctatatggtcggatttaatcaaggaatttattcatcaactatgacgagcgggaacgggttcaacaatattactgcacaatacattagaaccgatcaaggcgtcgtgagaggaaatgttctgctaccacaagttgtaatttcaccaaaggtaaccttcgattcgcccaacccgtcctttgctattcaaaacgttaataatcattgtgtagatgcatatgccacttctagttttgctcctatacaatatgcttataatgctaggggggttaatgggtgattatacagccgattacacaggaatcggctatatgcaaaaccgagctgacggtatgaccggtcgtgacaccggtctaaccgcatccatggccggtcagaccgtgcccaccatggccggacagaccgtgtactacgccggtcagactgtgcctaccatagccggtcagaccgtgccctatcatggccagatcgcgcctcctgtggccggtctgaccgcaccactgaccaccggtcagaccgggccatgggccggtcagaccggttcctgggagtttctccaggttttcataccacgactagcaatattgattttaattattattcatcacctgttaatactgttagtcatgctacttcacatatccctgatgcctataatgatgttgctagagggtatcctcccgatactagacaaggccaatataatcatattgcgctgcaacaaccaccccttaggccaccgaatacaccaccagatccacataggcctaaaaatatggaggagttgcttagtgacattatcagggctacatttggggttgaagcgaaggatcgtgctagggagaaccaaaagccatatcctgatttttatgacgctgtcccatatcctcctaattataaaattcctgaatttaccaagtttagtggtgaggataataggaccacatatgagcatgtagatcaattcttagcgcaatgtggtagggctagtagtatggatacatgtaaattgcgcttgttttctttatctttgtccggtactgctttgatatggtttacttctttaccggcatattctattggtacttgggctcaattagaacaaaaatttcatgattattttcacactaatgaaactgagcttaagttgtctgatttaacatcggttaggcataaatacaatgaatctgttgctgattatattgaaaggtttagagatattaaaagccgatgttttagttttagaataactgacaaagatttggccaacattgcatatgatggattgcttgattctattaaagagaaattaaatggccaaatatttcttgatgttgatcatgtgttgcatgaaacactggctcaggaaagccgagtggataacaatagtttaaatgctagttagatgaaagtgcaatatcatgtatagccgtaccaagcgatggttcggattgtgttaataatttgtgcaatgatgccagaacaattatagccgaaccaaatgttggttcggattatcttgctagcttagataatgatgcaacaaccattatggccgaaccaagcgacggttcggattgtgttattaatttagataatgatggaatagccgaaccaagtggtggttcggattgtgttgatagcttagagaatagcatcattgaagatatagccgaactagatgatggttcggattgcatcacaagtgaaagtgaaatagcattatcacctaagaccgaatcacaaatcggtcatgtggatgttggaaaagataataacaatgtcttgcgggatagtactgaaataggatccaaagtagctatgcatacatatcaaaggccgtatcctgaacacgtagattcggtcccatacccgcaaggatttgaggtgcccaacttcacaaaattcacaggtgaggatgctagaataacaatggagcatatcggccaatttattgatcaatgtggtaaggccggtagtaatgatttgcttaagttaaaattgtttcccctttctttgtcaaactttgcatctacatggtatagtttacttgctcctaattcaatttctacatggttacaaatggagcatgagtttcatggttatttcaaagatacaagcttgatggaacaaagaccgattgatacttcatcggtcacttgttaaactatttcggttacatctatgcctaagaccggaattgttagcgatcctctccctgttagtcctattgatgtagacaaaaagaaagggaaaagtgttattattggggatcctcagcccaaaaataggataaaaaatgcgaaggccgaagatcataaagttgcaaaggatgagtcatctagtatccaaaggaccaaaaagccgaagctcacttttgagatgcttatggctaaatacaagaaaggattagccggtcaacgatttaataaccaaactagtgattcgaaaagaccaagatcatctcgtaggaagagatttggtcaaacatcaaagcaatcggagccatcaaccataccaactccatgcaaacctccgattgtgatgccatggtatccatatccaatgtcactatatggttatccttttatgtattatatgccatggatgcttcaaccacctatgccgtgtcatcaggaatagaagcaatcacctaggacagtaccaagtcattctaacccaagacaagaccattttccacaaaagaatcggtccggtggatcaaaggtgaaaaaggtgaagaaggtgtgggtgaggaaagaagtcaaagctccggaggtcgttgctatcaatgaggaatctcaagatgttcatgtacctactggagatgcggcgaaaactatacaagcggagaagactaaagccgacgccattgctgtcgacatcggctgtctgaccgagccagcttgccggtctaaccgccagacaacggccggtctgaccgacggcttgcagccggtctgaccgggcctagaggccggtctgaccggggggcattggagaagagtgggaaaattgagagcaaaataggagcttccacttcgactaaaaatatgaagaatcgttacttagctcctagaaaacaaccacagctaaagtggataccttctggcttatctcgctctcaaaagaggaggctacaacgtcttcgggccataggtcaaaaagaaaaggaggccaaagatgtggagaacaaaatatgtaataatttagagcctcgaacgacacctaggcaagtgtggagatccaaagaggtaaaagttaagagaccggtgatttcccatagtagagaaatccaatttgatgagagaagaatcatcggtcattagagataagtctccttcacatgatgctatgagtgttagtgcggtatccatcttgcattcgaaatcgcgcaatctagaaagccaattttgcttggggggcaagacattaatatgctcataagggaaccaagagaagatgaacggcgatggatacaacatcacatctttgagccgccgtttgttggatgctaaggcaaggtatgagtttattgtgtttaacattatattatatgcctatgccatgttagaacattgcttgctatctagtacatgtgtgtttttgcttatcaaattgatattatacatacatgttgcaaatgccagttctaggtagtagaattggtaggttggcataaaatttgtttgaagtatgatttggctcatgactctttgacatttatttaaagccaaatcatatgtgtttttatggattaccatataagatatagatttcatatttattgcaccatgaaagttttgcttactagtaattcggctaatgtcaatggtcaatgtgatgatttgctctagagtggttttctttaggaacattggcattgttaatattttgcatacatgctcaaccgattacttacatttttagtttattgaaatctatgcatgtgacacatatgattttggtgattcattattgatcatacttcaattggctaagtgttgtgatgccatgatgattattgtttcaaaagccaattgaattagtattcatctagacatattagttggatattatgatttttcatatgtctagagagaaggagttttcgttcaataatttgatacaccaagcatctggctattatatgaagaaaaatttatatactaaaagccgatgcttgatttcaaaagtttggacgaaattggcaaagtcatagaccaggggcggtctgaccggtggtagccagcggtctgaccggctctgtatggccggtctgaccgggcagacatggtggtctgaccggcattgcgtggccggtctgaccgatcccagacaggaggctggggggcacgttacaattgattaaaaggccgaattaattgtgaattcggacatttgtacccatgagttagaaatagcttggagaatttctttgattagatatttgaaagatcctacacttaaggttgatcggagattcggcggcaagcgttcaaatattatatcgccgaaaaatagatagagtattacttagataatgatcaatctaaagttgctaggagagtagtacatgaaaggatttatgaaattcatcaatcggcccgtaagataaattggttgcttaggagggtggggtttcattggccgaaaataattgatgattgtttcaaatgctatagagggagtgaagcttgttgacggatcggcaatgttcaattagcgcctaccgctgtgttgaatcctatcattaaactatggccgttccgaggttgggctttggatttcattggtcaaatttatccttcgtcatcaaaagagcattggttcgtgctagttgcaatggattacttcactaagtgggccgaagccgtgccgctcgagaatattacttgtacagaggtaattgactttatttttgaagcatatttttcatagattcggtatttgtcacaccctgaaaattcaaaatatataaattgttgtttaaatggaatttctagaatttattttaaaagtcttgaaaagaaaatctaattctaattaataaattccaatataaaattgggccagaaaaatttcattaaatactttgcttaattctataattcctagatttttctgggatttatttgagctaaggaagtatttttaataaatggaattgcatttaagaaataatttaaattgaaaaaagttttaaaaaagtcttcttttggctttgggcccaaagtcggcccaaaaccggcttttttctcttctcggcccagccggcc

SEQ ID NO: 27379 - DNA, 836 bp, Oryza sativa
atagctcataatgatagatatcttgggttaccggtatttattggtagatccaaagcgaaaacctttgaatacttaaaggagaaaatctggagatgcatccagggatggaaggaaaaatttttatccaaggcaggaaaagaaattttaattaaagcagttgcacaagctattccaacatatgcaatgtcatgtttttatttaacaaaatctctttgtgatgagttaacttctatgattttgcgcttctggtgggctcaacatgataatgacaaaaaaattcattggttgggaaaggataaaatcatgaagccaaagagtcaaggaggtttggggtttagagacctacattccttcaatattgctatgttggctcggcaaggttggcgccttatccaaaatcctgattctctttgctcaaggctgctaaaggccaaatattttcctaactgtaatgttcttgatgcgcagtcaaggaaacaaatgtcatattcctggagaagtattctaaagggaatacaattactaagaaaaggcgtaatatggcgggtcggaaatggagagcatataaacatctggtcagacccatggctgccaagagatatgagattcgtcacaacaagaagaggggcatctttaattacaagggtgtgtgagctcattgatccaacaacaggccagtgggatattgaattaatccagcagattttcaatgagaacgatgcaaaaatcataacaagaataccactaagggaaggtcaggaagattttattgcttggcaaccagatactaaaggaattttctcggtaaaatcagcatacaagctacatgagaagat

SEQ ID NO: 27380 - DNA, 691 bp, Oryza sativa
agaaattttggtccgaactccgaaataaggcttcaatattcagatccagatatgaaaattccttctgaaaaatgtgaagcagaatggtgtgtacctgacagaacacactgaattgcatcgaacaggatggacacagcaagaataggcatcatcttagctatataatctgccacttcctcctcattgctgtacgcatatccccagagattgcgcacaataaccatcacgaggccttctgaagttcctaccaagaacgccaggagcatcacaacacgggtcgccaagcgtgccgcctgcggtcgcccagctccgagctcattcgacacgcgcgtactggtaaatcgaatcaatcaagcgatcaatgttctcgaaactgctggtatttctcatagtctatttgttgtttcagagttcacaggttttgtttctaaagaaatggactctgttttgtttctgaattatgacttcagactctgttcagagttcagagttcagagttcagacactgaccttatggcagcaccaagtccaagtggcaccatgaaggcgaaagagtttgtgttcaagctacaagcaatcgtagtagcagcagcaatgattaattagcggagacaacaaattgcactaaattttagccaaaaaaaataaaatgtaggatttgaatagatcaccatatggacagaacggccgt

SEQ ID NO: 27381 - DNA, 12115 bp, Oryza sativa
taccaccaataaaaatcctaattataaaaaatttcatataagacggacagtcaaacgttggacacggaaacccagggtttgtccttttttttttaaggacggaggtgtgctgtactacttgttcctatgcttagagagatagatcaatagcatgttctagggcatcaatcaaatcaatttattttagtatggatccacattaattgagtaccaaatcatgttctttgacatcaaaataaatgcatgcagtaccaaacctgaatgcaagaagttgaggaaatcagggaaggagtgattgaggattgagcagttgagtactcttgaagaatacctttcttgcctcttgacagagctgagccgtagagatatgagtgaccatgacaaggggtaggtggcaatggtgcactggtacggggcaccagccatgggggatggactggcgataggagaacggcatgctgccacatcgttcatgcagcatggtggaagaggctgcgccgcctcctttgcatctgttgggggtgacagtgtgaagatctgtgggagctgtggatttacggagttagggttggtttatatatggttgcctccagtgacttggactggtaggtttggaatggctacctctagagagatcatacccgtggggtcttgtgggtcactttcagttcagcccttgctactagttgggcctccaaccaccacacccatgggacaaaaagtaaccctgccccctatggggatatcgccatccctactatgtgtgctcattaattagacatattcttctccaactatcaaacttgagcagacgactccaagctggacggttctttctctacatccatgatttagtatcgttgttgggacctgactttgaaaatctgatcatgagtttcattcttccatatgctcacgttgttacctgagctcatgcggattgaccatcttatgttatacaaaatattgtccaaactcaacttcgttcgtcagatataaaaataacatatatttctaactagtaagttgtcctaatgatagttatagattagttatttttatgtgtcggagacaaagtcaggttaagaaaagagtttttacatggttatataacatcatattatctactttttgatcgtttgtttgatgaatttaaacgacttcttgatcagggtttacaccaggttcacctggatattctatttaccaaccatatgatccatagctagttcattgtccagcgaacacttgtgatttagacaccgcctaaatccatgctcatcgattattcataaaaaatggagatatacttacaagtatcaaataataaccattttcgaaataacaaataataatagtgctcaaaggaaacaaattaataaggttccccaggaatagtggacaaccaggcaaaggaccagctatgcaaatcaacatgcatacataagaagggaaaattaacgtattctctccaggaaggaaaaaataatgatcttattacacaggaatggacatagccacaaggaggatgctgaagaagctcgaatataccatccactgggcaccatgaggagcggcactgctgtctgagtttggagctgaaatcattgaagcgagaaaggaaattatttagaaaggaaagttaaaaagtataaaacaacaaaagaaattatcggaaaataaatattaatttaatttttgagaagttaatactacctctgttttttaatagatgacgccgttgactttttttcacatgtttgaccattcgtcttattcaaaaaatttacgtaattataatttattttgttatgagttgttttatcactcatagtactttaagtatggattagtttttattccttttttttaaaattttaaattaaaacaatggatcaaacatgtgagaaaaagtcaacagcgtcatctattaaaaaacagagggagtacgtggaaacatgaaaaagaaaaacacgaagttgcacttacacgctgtgggaggactgctggctggagctgaaaaacaaaaaaagaaaagacagatgtatcagtaatacggtaatcatatttaagtattacgggtttgaaattttcaaattttcgggagtttcggacccccggtacacaaccatttgctccaaaaatttcggattcttttacatttttgaaattttggtcaaaatttatttaaattttaactaatttcgtaccagcactttcccaaatttcagtgacccgaaacttcggtattttacgaaattgtaaaccctgactgattatacaatatcacactaacaagagcctgtttagatcccctgacaaaatttttcacctgtcacattgaatgtttggacacatgcatggagtattaaatataaacgaaaaaaaaactaattacacaatttgcgtgtaaattgcgagacgaatcttttaagcctaattgctccatgatttgacaatatggtgctacagtaaatatttgctaatgatagattaatcaggcttaataaattcgtctcgcagtttacatgcggaatctgtaatttgttttgttattagtctatatttaatacttcaaatatgcgtcattatatccgatgtgacacgccgaaacttttcagccaccgagtctaaacacagcctaagttggcaaatactcttatcaagaaagacgaacattctgtcaacatcatgttattactacgcatatacgtaccaggagcaggcgcatggctgctgcacacgtcggcgggaaccttgacgtcgcagcgcccgaacagatccaaccccttcttcgtgtcgacgccgacggtggcggccatcgccgggttcgtcagcacggagcacaggcatcccagctcgctctcgtacgccttcttcagcggcgcgcagcacgcgcccgtgggcttcgccgtcgcgttccggtagaactcggagcacggcgccagctccgccacgcacggcaggttcgcctctggcgtcggcggcagggaaggaggaacgatggccgggatcggcggcagggcaggaggaacagcaatggcaggcgtcggcggcagagccggtggaacgacgatggccggcagcggcggcggcggcggtagagcaggggggacaatggccggcggcggcgtcagcggcggcagaggaggagaaggggcaacgacggccggcggcggcgtcgttggcagaggaggagcgacgacggtcggcgcgggcggcgtcgtcgtcggcagagaaggaggaacaacggccggcggcatccctggcctctgtgccatggcggcctggacgacgacgacggctgcaaaagcaacgaccaagacaattcgcgccattgctcgaattctctatctctcaaaatctctctacacgtgtgtgctgctcatatcatgtttattctagtctctctctaacatatatatacgcagaactaagcaagggattatgtcgtgatagccactaatttttccgtccatgctgtaaacagcagctacctatactcgcttcactatttattttatactcactctcagtgcatatatattttgttcctatttttctatttataagaatattgccaaattaaataaattttcaatagaaatctactcgtatcttttttatgtgtcgattcttgatgttttttttaacttatattaataactgatgaagatttcaatgtttgacccgtatcgcagggtatccaaaatccatacattttcgggattcgggaacacacatggggtacatatttaatcatatttgaagatttgaacataaaagtagctggttgcatatgcatacgttgcatttaagttggcatgttcttcccccgtttcacaatataaggtacttcctccgtttcacaatataagacttcactggtggagaaattctttttagtcccggttcgtaaccccactttagtcccggtttccaaagatcgatctttaggctgagccatctttagtctcggttggtgagctgactttttttttttttgcatggccctgttgctgcatggtttatatatatgtttcaatacatatatatgcatatataatatatgcatatatatatattatattatatttatatatgtttcaatacatatgtacatgcataatatatatgtatttatacatatatatatatatatatatataaccaaaatatatttacattatagaaaatgtgtacacatgcatatagaaacatatgtagtcatgtataaattacaatccattatatgtcctagctagctacgatttcgacgtagtagtagtcgctagctcagaagctaaggacctatgaattgtgtttccgtcgtagtagaatttacccttgggatcaaggatttgttcgttgatgaatcccatgagttgttcttgaaccgccgcgataaattccttgtgtgtggtcaggttatccctcatgctaataaactatatgaatatatgaaattgattagtaattaaacaagaaatcgatacgtaatgaaattttgaatttatttgtacgtacatcgagctctcttgtggtgatgatttggtctgcaaagcagtggcaatactcgcacacgtagtagccacacaagttagttccttgctttggctttgcgcactacaaataaatgacaaattaacggcgtgagatctaattaatatacacttgtttgtattaatttgaatcggagaaatataaatgtagagcatgtgtactcacaggaaatttgaacctccgcctaagtctctctccgcggaccaaatgacggaaccgataccaagccctacatggagtttaaagatatgattcgtagtagcaattaacataacaagaatttcttaattaacagaggaacttatgacagtacctgtctataagttcgaaaaccttgtcaaacctaggctctttttaatccattgagtcatatacgttgacggtgcaggccgataggtcgaagagtaaaagcacccagtggaatctgcaatgtgcgtgggatgcattacatatgaaacacttagcaagttcgtacgggaatgaaatttgatataggaagacagtaaaattaaactaactctgtgttgtacggcaacagtatgaacgtcttgtaatgctgcgccttcaggagatggacgagattgtcctctgtggcttgcggatattggtcgagcattgcgacgtttactttccgagggtcgatgaatccaatatcgaaaaccccccgccgtcgggccctttgaatctccattctacaacgataaaagggagtattttattttatatagtctacttatatacaaggacctaattaattaaaggagacgtagtaattaagaaatataactgaacgatatacttacaaaatccagcaactcataatagagacgtcgagggcgtccagctggtatacttcgtagattcccttgaaattgatccagagaatgtcatctccttgcaagaagtccgggtccctgatcctcgctccgatcatctctctaccggtggcgctcatctccatgtacagctgatggaacttgtacatttgtgtgggtagggactgcaccagctcaggcttgacaagcggtttaccgagttcgtacatgtatttcacttccgccttttctattggtgcgactcctagcaattgatccgtagttagaccggtgtcagtaataaattcttctatcatcatgtcttcaccggtcaccaacggctcaatctcctggtttggttgctctccaagctgagggactggtttggacttcccagaagatgctttcttctgcgttcgctcatagtccgatagcttgatggcctcttgacaggtgcagacatacccctgaagaagttcttgacactcgggtctataggaatcttcttttccggacttcgaggcttgaattgtctcttgacttctgatgccacgtaagcgtcaagctcctcttgcgtgcaatcgtaccccgggtccttgttcttggcggcgtcaactttcgccttcttcgttgcccttgtgtgggcaggcggtggagctggggtggcccttgactttgaaggtgccggaagaggagcttgcggaggagtcggtgcaggagcctgaggaggagtcggtgctggagcctgaggtggagacggtgctggcggtgcatgaggaggagacggtgcaggatcctgaggaggagatggcggagccggaggagatggtgcacgagacgccgcttgtcgcccaggaaggatgatgtaccgcctgcgccatagaataatggcatggcttgtgtctcgtagatgcgtctcaccgtctcctccagggtaatccagctcgaggtcctcgtacgcgccttcgaccaactcaacttcgaccttggagtatcctgctggaatcggcctgcagtggtaagtacctgaagggtccgttgggatgaccatgcccgacgccgccttcatgtggtgagagattatttattagtaatcaacatatataagcagcaactagcggaatggccaaatctaaaatatataaactacgagcttacctttattgataagttcttgaaaggaatatgcagctcacatggtgtccgctgagtgatgtcatcaacgggacaggtcgattcgtcctgggtttgcatggcgtccatgctctgtgatcctacctgccccattgaggcgcagctgctacggtttcctgacgggctcaccattgcaggaggaatggtcggctggggataatgggaccgatgtgcggccatgcgttcatcaaccttccttgccacctcctcttgcatgctgagctcgtagctcgatacccggaactctagatctgcaatcttcgccttggtatctgtcttgctcctcatccaactcctgtacgtgtggatgtcctccttgaaaccaatcttccaaggaatcacccctttccctcgtgttcgtcctggatgctctggagtctgcagggcgagtgtcaacttcggcatcgcgacgctatagcctcctgaccccaagtggtgatggtacgtcttcttggcggctttttctttgtttctttccatcatcgcctgcccttgttcacctgtcttatatgcagcgaactcgtcccagtgatcccttagctttgggtatgtgtcgaagttcggtgtctgccccttcaggatatacttctggtacagatctcccttgaagctctgaaactgctctgccattttcttcagagtctaccttttcactttgtcctctgtacccgcaggaagggtgaatgtctcgagcattgtggtccacagcatctctttctccgaatctgggacaaagctctcatgatctccgcgtgtccttgttcttcgccagtacaccgtactgacaggcacgttatcccgcacaacccaaccgctgtgacgtacatagttcttggcggcttcggccggggcactaggtcgtccatcttcttccacctccgttatgatgtgccgaccctcaagcttctttgctgcacctcgttgcccgcgtgccctcttctgtccaacggagggttgacttccactagcctcctcctcctgattcccctccacttccctttccacgtgcgcctgctggttcccctccgcatccctctccacgttcccttcctcgttcaagtactggtttggatcctcgttcccctcttcttcattccagtactggctgcttccctccacgattgtatcgtacaatatctgttcctcatcgcgatcagccatctgttgatacaagaaacatctgctaagtcatgagacatttatattttaacaatctaagtcatgtatgctaagtgtaagtgtcgtacattagaaccctacacaaccttacgtgctaagtctaattacaaatctaataatctcatactaaaattcaaatcgtgatatatgctaagtctaggtgacgtatattatacgaccctagctagtcaataatctcatactaaaactcaaatcgtgatataagttaagtcatgagacatttatgttttaacaatctaagtcatgtatgctaagtgtaactgtcgtacattagaaccctacacaaccttacgtgctaagtctaattacaaatctaataatctcatactaattaaaactcaaatcgtgatatatatatgctaagtctaggtgacgtatattatacgaccctagctagtcaataatctcatactaaaactcaaatcgtgatataagctaagtctaggtgacgtatattatacgaccctagctagtcaataattatatactaaaactcaaatcgtgatataagctaagtctaggtgacgtatattatacgaccctagctagtcaataattatatactaagtctaattacaaataaaataatcttatattaaaactcaaataatcttacatgctaagactaaaatagtcatgtatgctaagtgtaactgtcgtatatgctaagtctaattaagactaaaatagtcaattgttaggagtcgcaccaattccgtagttagaccggagtcgcaccaatagtaataaatgactaaaatagtcatgtatgctaagtgtaactgtcgtatatgcaattaagactattattagaacactacacaatcttatatgctaagtctaattacaaatctaataatcttaattgcattacaaatataacaatcatatatattattacgtcacttgcctgagcgaattgcttctagggctagctcttccactccggcttgagggacgactccgacaacacgtcttttctgcaagatacaaaaaaatgtattaggataaacgcgaagtaacatacatatatatattgcatttcacgttcacgttcgttcacgttcattcgctcgttcacgttccctcgttcacgttcgttcgctcgttcacgttccctcgttcgctcgttcacgtttgttcgctcgttctcgttcgttcgctcgttctcgttcgtttgctcattgatcacgttccctccttcacgttcgttccctcgttctcgtttgtcttcgttcgaccgttctcattcacgttcgttccctcgttctggttcacgttcacgttcgttccctcgttctcgttcgctcgttcgcgttcacgttcgttcactcgttcacgttctcgttcacgttcgttctcattcacgttcgttcgctcgttctcgttcacgttcattcgctcgttctcgttctcgttcatgttcgttcgatcgttctcgttctcggtcacgttcgttccctcgttcacgttctcggtcacgttcgttcgctcgttcacgttctcggtcacgttgacgtgttcgttctctttcacgtgttcgttcacggcggtgtggcagcatcgggccggcgcgtggcgcggcggcgtggcgtggcggcggcgtggcgacggcgtggcgccgcggcggcgtggcggtgccgcgacggtggcatgccgcggcggtgtcgtggcttctcgtggcgcggcgtcgtcgtggcgcgacgtcgtggcgggcggcgagatacggagagagagagagatcgagattggagagagagagagatcgagggaggcggcggcggctctcaccccagagatgcggcagcggcggaggaggcggaggcggcggcgacgacgacgagctcgagacgacggcgagatacggcggcgtcggcgcggggatgccctaggcagtggcggcgaaggtctggccgagagagatcgatcggccgaaaacgtctaagtgttggtggagaagacgatggcgcaccgggaatatatataccccccggatctttagtcccggttgttctcatcaaccgggactaaagatcttatcccgctattttcaaattctttttaaacccggttagggttaagaaccgggactactgattatagcactgaatattattttcccttacatatgtgtttctaaaatagaagataatgcattacaattatttaaagtacaaagattaatgacaattacttcgaaaaattattgttgtctgtaataaattaagtggataaatcataataagcaaatatatgacttaaaattaataaaaattccaataatcatatatacttagcatatgaatgctattattaaattggtaaaaactctaattaacatatgtatgtacatatggcatgatttaaaattaataaaaattgtaatcatcatatatacttagcataggaattatattaaattaaatgttaaaaactctaattaacatatgtaaatgccacatgcatgatttaaaacttttaaaaattcgaatagtcatatataattagcatatgaatgatagtaatataaattgtgaaaaactctaattaacatatgtaaatgccacatgcatgatttaaaacttttaaaaattctctagtcaattataattagcatatgaatgatagtaaattaaatgttaaaaactctaattaacatatgaaattgccacctgcgtgatttaaaacttttaaaaattgtaagtatcacatataactagcatatacatgatttaaacttgttaaaacctgtaataatcgtgcgtaattaacatatgccatacatcaattgatttacatggataatcaatacatccaaaatagtttacatagtgtacacaattgttggcaactttttgtgacaagtcgacaagcacgatcgcagcacctaaatgccttgcggtgatcctagagtcgccgaccacctcgatctcgccaaagggccaaatcaagatgggttttgtagaaaaacagctaaaccggctagcggagccaatttagagatcaaaatcagcctctaggccgatttagatcaatatgaggataactacccgtctcgtgggcaaaacggaaggttttcagaacaaacctacaaagaggtgtcgcactctcgcagcggcggcggacggtttacggcgcaaaccgacaaagatggactaaactagggtaaaatagaaaacatagtaaaagaacgattcaagtagattgtattcgggggttttacaatgaaccggccttgtcccttaaataggggttggtcttgccccctacaggcccttctccgcgtccaactcgggatagaaaccaaaggaaacacgaaacatgccttcccgagcaaggaaacccgagacccgacgaaaacatactcggacttggaccctgctggtctgaccgcccatatacctgcggtcagaccggccctactagccggtcagaccgcccatatacctgaggtctgaccggccctaagaaagaaacccggcactttccaaactttggcaattttcctctatttcgtccataggtgtcaaatttgggtgtaaacacatgcccccctgcctttttgatgaacactgtgaatctaaaagcatggaacatgttgtcttagggcgataatccaattaccggccataggacttcctaagcaccttgccaaatgctcgggaagtatttcttcaagtattttccattaattgctctccgaaaacaccgtcttgaagtgtcttcatctccttcaaagtcttcaaacgcttgtcgatgacatcttcaaaattgcttcccatcaaggtcttgtaatcttcaaccgacaagtcatcttgcttgaaataccgaagaaagccaagatttacctcaactggcaaaacgccaatttcaacaatgttttattactcgactcggcttatccattagcccgagcgtagtagagagaagaactcaacaacttaatatcataaaattcggcaaaacttctcacctccttagacataaaagaagctcctcgatcaaagtttaaggaatactgtcacgcccggaatttctatccaaaattccaaacgcttacatgtgtgtgaaccctcgtccaggaatcagccgaggcacacaataacaaattgataatagagtacaaatattactctaattaataagcgaatagaatgtcattacagaggtagatagttcctctcaatcaataaagttctaagcagcggaaaataaataaacggcgcagacggctccactccacaggcagcttgaccaaggctacacctaatcctccacaccatcagcctcattgtagaactcttcctctgatgaatgattgcaaggtgagtatatgacatact

SEQ ID NO: 27382 - DNA, 28080 bp, Oryza sativa
tgcttgctgcttacagtaaactctgcaataatctggctgacccccttattctcgaccaaacatagaattaacagcctgaaatggggggaaataatgacacaccaagctcaaaacatagttatcgggtgagaaaaaaggaagataccagataggaacagacccatgaattttcagatgaagtgtgcatgctagattgtttgatttcctaatgactcgagcataaaatagacttaagaatacaaagcagacgattggacaaatacatgatattagtacagacccatgtagtcgaagtgttgaaacttgaaattttgtcctacaaggtttgggtgtaatatttgaagttttgaactcacagggaattgtcaaaaagaaggatgtgctatagacttatagtaaaagcaaacaaagttggaccaataaaagattcaggtgtaaacttaatagaattgatagattgttcatgaataacctttcaatatttgaacacataatgttatgatcttccttagagcctcctttgtgagacaaagcaggaacaagagcttgaatgacttcagttggaggtcctttgacaaaaaacgaatcatatatttccttccttgcagaggcacggatctgacgtaaccacttcaaggcaacatctggacaaccaaagtgtgagaatgggattataactgaaggaactttgcaactgacctaactgtgatgaacaatcaagaagttttgagtgtatagtaatcaaattgtagagatcgataaacaatacaaatgaagtatgacttgtatgactggcagataacattataagcaaacaggagagttgtacatgtaaagaatatcaatggtacaaagtatatatgcagtgatagattcaagagtaaacttacggccaagcaaaatcttagatatagtaggaaatgctggaccatggtaaaaagcatgcctccaagatccccgttcatcattgctgaggcttacgccattaattatctgaaagtacagaaaataattctccctgttacatcatggcctaaaaggatggaactccaattggctatttggctgaatcatattgaaggaagcatgtgtctttgaatatccatactaatttatctctcaagcatgaaacatgatcttctgtattctgaatgcattatcaaatgacacaggttttacaaaatgtgtgctgctacagctcacctagcaaggtcctgcaattcgattacccattgtgtgaccaaagttataggtttatcaactggaaaattctgtggatgcttatcaatccagtttcagagtaattccttccagagatcaatttcctcaaatatatgcaccacaattatgacattacagcggctgaaacattgtccacataaccaatagttcactatgatatcttaatgctccatttctattttttgtggcagaattactgctccatttcggcatacagtcctttgtgattgcaggtcaaaacaaaaactcaagacttccccattttttttatcacagaccccttccatgattattagaaatcacacatcattgtttatgccagaaccaaaaatagcaaatgataaaactactagtaatttttctcagatggacgaaataaaaggcctaaaattagcacagagcttcacctggctcctgaagggttcgtccacggtacctacaagagaggccatcagacaccccaagtgacggcgaatgagataaatgggaatagggagcatgtcggattaggattcggagcctcaccggctacggcagcggagtcgacggggaagacgagggcggcgacggcgtggatcgcgcggacgacctcgccggcgctcgacgcggcggcgaccgcgtcggccgcctccgccaccttgtccagtgctaggtcttcgaggcgcgcgccaccatggccgccgccctgggagcccgcagccctcgccgcggagctgcttgggttgctcgccatgggagggtgaagggaaacacacgacgaacctaagagagagcgcttgagaaggggaggttttggagcaagagtaattagggggttttgtttggaggagaaataacagttttacccggcttgactgccgttggctaagataaaattttggggtatgtttgagaatatcaaaatttgcaaatgaacttttgttagagaagatgtgtttgagataccaaaaaaataattgaaggaattaagaatgtcgaatgtcaattgtacttttattcatgataccagtagtatattactcctattatttctaagtttttttataaggatagaattggagctgctaagagcaagtttaatagtatagccaactactagctctaaatcatctatagtcaatctactccttccttcccaaattgattttatacaccaaaaccaaggataatttaaatcacatcaatcaatacaacatacacacattctcccaccatgcatcgattaaaacctcatgccacttacaccatagcatgcacacattcttccatgctgtattaactgtattctgctgaaatccgtgtccatgcagttatatgatgatcaatttaagaatttttagattcttttacatgatgatcaatttgggaaggattgagtaatagtaattcatacaatagttaactagaaacatataccacactattaatatctggtcccacatgtcatactcacattgcctcttggagtccgtactacagctgactataaatctgtagcccactgcacttctctatcctcttttatctttttaaaatatgtctatagctggcttagagcaggtacaatagcataccattagttagctataaacatatttttatgagataaaaaatgaaaaagaatagcagcgggctacagatctgtagccagctgcagcacggactccaaaacacagtgtgtgtatgactggggccatatattaatagtatagtaagcaactattgtatgaatgagctattagattggctatggatgaattggagctagtagtggactatactattaaacttactcttatagtatgctattgtacctgctataaaactaacttgcttcttttcctcgatacagcaattaactaacttttctcagtagtcgaattatgcatcaaaagcggaaggagcgagtataaccaactgccaaatacgaagcatgagtgcatgattctctataagattcgaaaacaagctcgaactttcgaacgctttcattacaaccaagaaacatttcgatttcatattattgacatcatgtgacggagcgtggggctcctcaccgggagaccgcgcaggtccccctttgccggttcggccgggggccctgggtgaggttctaagctcctagtctgtggaatgttcgcgaaagtggaaacacacaagacacgggtgatgtatacaggttcgggccgctgagaagcgtaataccctactcctgtgttctggtagatctgtgtacgaagaagctacaaagagctggagaaccagagagctcaaactctagaaacccctttcctcctttttgcctctcgtgggatcttctcctggatcctccgggagtctccaatctctcctcccctggtcctctggtccggatcccctccctaagtgggcaaggtcctccttttatatctcaaggggataccacatgcaccacttctacctatttctctttttggtggggacccatcctcttttcactaaaacttggctcgcctttccttcataaatgggcggagatttgtaatggttgccgtccgaatgaccttctgatgggacggcccatacctacctccactttcgccggaagcaggtgcgacgtgggaacatggctgtctgccgacgacatgaccagtgtcagaccggtcacaaatcggtcattcttgtccaccacgcgtcagtttatcaatctgcatgttcacccttcttcatacaatgtcttgcttgtaacggttgggatgaagcctagcatatatctgaccgggaccaacgtgtcatctccaggagctagcacgctggctccggctagggacaagtgcctggaggctcttatcctgacgggatggggcgaggcgtgtgtcagaccgcctgttgccacctaacccacgatctgaccggtctgtgaccggtcacagaccggataaacgagcgcgctgcactgcgttacatgcggcgtgacgcgctcgttcaaaccgcaataaatgcggttaggtgagccccgccgtgctcacctaacctatacacgcggcgcaaaacccacaaggggtcggggcgcctcggccctcggggccgaaacgggagcggtccgatccctcggggagacaaagagaggggcggcctcatcaccttcgggcccgacccccccgagggggtcaggccacgtgggtgattgctcctgcccaaacctctagtcatgatactcccggtcccatgtcaccgacagtagcccccggcgttatgccagggcgatcaccctcctcgagggaagcggtcgggcgtgacgccacttacttaggcctggtgacaagtggggctggtctctacagttgggcagaaacccaacggtcgcaaatcacgcacatcggcaatggtaactcgactgtcaataatgagcggcctcttcaagactgccacattactcgagtagcacacgaatcgggacgagccggttcgttttgcctggagatatggtgatggcacttcggtcggcgagtgcaattaacgcgcgcacgatatgttccatctcgactgccacagccgcatattcacctcatgcgccgcaagcgggcgaatgggattagtggaagcgtgggcgcgagaaacgagggagcgagatagtgggcgcgagaagcgaggagccgggcacagcgttggcaagggtataaagacaccgaggaagagatttgcttccttcctctcgccattattccccttgtcttcgccgcttgtgccctaactccttgtttcctgtgccctaccctcgccacacgcgctcgctctcaaacatctcttcttccggcgtcatggcacggggctctgctccactcgatggtagcgtgctgccgctttcccgcatcgtgagcgagaggcaggccgggctgccgcgccgcttcctgccggaatctgccaccggccaggagatagttacgctgggcgagggacgcccggcgccacgctacccggggcggaccgttttcttcctccctttcgcaatggcagggctggttccgctattttcttctttcttcatggatgttctggagttttacgatctccagatggcgcacctcacccccaacgcggtaatgacattggccatcttcgcgcacttgtgcgagatgttcatcggggtgcgcccatcccttcggttgttccggtggttcttcaccgtacagccggtgtcgccgccgtcggtggttggtggctgctacttccagccgcgggggccggtgctgaaccgctagattccctgcgtcctccgcaagaagtgggatgactggaagagcgactggttctacacccccctcgccgacgaagcgcgcctccgacttccgaaccagcccccggcgcaggcctccagctggcgggcgccggtagatctgggagatggctacgacgccgtcctcgaccgcctggcgggcctgcgatcccaggggctcacaggggccatggtgtacggcgactaccttcgtcgccggatcgcaccactccagcggcgcgcccggggtgcctgggagtacaccgggtccgaggactgtatgaggacccaccggggggtcaaatgggactgggtccctgaagacttcaaggtaatgatccaacgggtgctgaatctcagctccgcggaggcatcgctcatcccccaaggagtcctccccctctgcagcgatccagatcgcgccaccatcctgaccatcatgaaggcggtcggggcctcagaggagcaggctcctcgaggccatgatggcgcgggcgggagctgcaggggagaacaatctaccccaggagggggtcgtgcttccgggctccgtgacgggggctcggggggctgccgccctgccgacgcccgagggaagaggaagcaagagggttcctcctccccatctcctccccgagggggcggggcggcgcgtgtcagcagcaggcgcccggagggggccgcgccgacgccgcagcccgagggggagcggaagaagatacggcttcgcaagatgggggggacagaaccatcccggggaaaccttatttcccctccaaggtagtcgtttaaccgaccccctcgcaggttcgtcccacgcccattgtggctgtattcattctcccaacgcgagttttcactcacccatcttgtttgtcttctggtctttcttctgtttcagcgagatctcgtcgcgtccctcccgccattccaagtccggccagtctgaggccgaggatacggcgaccgcggaggcccggaggcgagaatctgaccggcgagaagccacggatcgcctacgggaagccgaggaggccgcccgggaggccgtccgggctcgccaggctgaagaagccgctcgggaggaagccagacttcgccaagccgaggcggcgacaacttccgaggcagctcgcgacgaggccgcgggcacatcgcttgggcccactccctcgggcaacactcaggacaagccaggtccgggggacgtccccgagcccggcacgtccatcggcgggccgggccgcgcggcatcctcaccgaggcggctctcccccacgccttccgttgccccactgagcgcagagccccttttgcaggccttggccgtcgcaaacaccacggtgttggacgggttaagtgcccagatggaggccctgcaagcagagcgggcggagctcgacgccgcatgggcgcgcgtcgaagaggggcgacactcggtggaggccatggtggaggtgagccgcaaggcacaccgccggcatgcctcagagctcgaagcccgtcggaaggtgctggaggagatcgccagggaggtggaggaggagcggggggctgccctcatcgccactaccgtgatgaacgaggcgcaggacgacctccgccttcaatacgggagctgggaggcggagctagggaagaagctcgacgccgcccagggggtccttgacgctgccgctgcccgagaacggcgggcggcggagaccgaggtggcatcccggcggcgcgaagaagcccttgaggcccgtgccatggcgctggaagagcgtgcctgcgtcgtggagagggacctggcggaccgcgaggccgccgttgccattcgggaggtcacactggcggcgcacgaagccgcctgtgccgaagaagagtccgcactccgcctccgcgaggatgcgctcaccgagcgggagcgagccctcgaggaggccgaggccgcagcgcaaaggctggcggagagcgcgtccctccgcgaagctgcgcaagaggaacaagcgcgtcgcaatctggaaggtgcccgcgccgagagggccgcactgaaccaacgggccgctgaactcgaggcgcaggcaagggagctggatgcaagggcgcgtagcggtggggcggccacgggcgacagcgacttagccgcccgcctcgcagctgccgaacacaccatcgcggatctgcagggcgcgctgaattcgtccaccggggaggtcgaggcccttcgtctggcaggcgagatagggcccagcatgcttcgcgacgccgtgtcccgtttagaccgcgccgggcggcaggcgggtctctggggcgggcggactgcgaagtacgccgccaaccaggggggcctcgctcagcgcctctcggagatggccgggactctccaacggctccccgaggagctcgagaggacgattaagtcatcctcgagggacctcgcccgaggagcggtggagctcgtactggcgagttaccaggccagggaccccgacttctccccatggatggcgctggacgagttccctcccgggactgaggacggcgcgcgcgcgcgggtccaggacgccgccaaccatatcgttcacagcttcgagggttcggcccctcggctcgcgttcgccctcagctccgacgaggagggcgatgacggcggtgtgggcgacagtggcgacgaggctggcgactcgggtgcatcggagtgagcctccaggtccccgccaatctttaaatagttttttcttcttttctttcttccgaagccttcgggcctcctttttgtatagattaacttactctgcaatcaaaataaagaaatttctgtgtcaatttcattttactgtgtgtatgagaacgaggatgatctgtgccatggttcttttgtgtcttagctcgaacaagggctcgtgcccaggtcccagtcctcaaatggctcgggtcggggctagtgcctggggagatccacgtgtcgagactggccaggccgggagcgtggtgaccgagggttatgggtgacccggttgtgggtttttgccgattcccccccggagttaaccacgccccggggcacggctcggttctgggccccttttggcgattttagccgactcgagcccccgagggcaggatcgagcacgagtgacctatttcaagtcaagattcttcaaaaggaaacaacagcacagacacagcctttaggaaatcgaaaatgcttttattgaaatacagatagaagagaaataagaatatgcatgtgtggtagcccccggccaaccctgcacgcccgaggggggtacggggttggcccgagcccgaaacctgacacccgaaccctattaggggtagaagcgacgaaggtgttcgatgttccacgggttaggcagctctgtgccgtcgcccgcggctagccgaacggagcccggccgggggacgctgatcactcgatacggaccctcccacattggtgagagcttgctcaatccagcacgcgtttggacgcggcgtaggacgaggtcgttgacgcagagtgatcgggcccggatgcggcgctgatggtagcgccgtaggctctgctggtagcgcgcggctcggagggccgcgcgccgccttcgctcctccaagtagtcgaggtcatctctgcgaagctgatcttgatcagcctcgcagtacatggtggcccgaggggacctcagggtgagctcggatgggagaaccgcttccgcgccgtagacgaggaagaaaggcgtttccccggttgctcggcttggtgtggttcggttcgcccagagcaccgctggcaactcctcgatccacgaatcgccgtgcttcttgaggatgttgaaggtcttggttttaaggcctctgaggatttccgcattggcgcgctccacttggccattgcttctggggtgggcgggggaggcgaagcagagcttgatgcccatgtcttcgcagtgatcgccgaaaagttcactagtgaattgggtgccattatccgtaataatacggttaggcaccccaaaccgggctgtaatgcccttaatgaacttaagtgcggagtgcttatcgatcttgacgaccggataagcctcgggccacttagtgaacttgtcgatcgcgacatacagatactcaaacccgcccggggcctgcctaaacggtcccaggatatcgagcccccagacagcaaatggccatgaaagtggtatgatctgcagggcctgggccggctgatggatttgcttggcgtggaattgacacgctctgcatcgccggaccaggtcgaccgcatcattgagagctgtcggccaatagaaaccttgacgaaaggctttgccaaccaaggtgcgcgaggcggagtgggctccgcattcgccttcatggatatcggcaagaagctcgacgccttgttcccgaggaatgcacttcaggaggattccgttagccgcgcgccgatagagggtcccttctaccagcacgtagcgtttggagatgcgctggacgcgttcactcccttcgcggtcctcgggtagagtcttatctgtgaggtatgcttggatctcagcgatccaagcaatcaatctaagggagctgggagcactcccctcgggtcccgaggcctggactccgacgggcctcgggggccggtcaggcgcgtccgtctcccctaaggggtcgggtcgcgccgacggctgggcaagcctttcttcaaaggcgcccggtggggtctgggctcgcgaggaagcgagccgtgagagttcgtcggcaatcgtgttatcccgtctgggcacgtgccgaagctctatcccgtcgaaatggcgctccatacgccgtacttggcgtacgtaagcatccatctgcgggtcagagcaccggtactccatacagacctggttaacaccaggaggcggcggatccccagtccagctgccaccctaagtcccgcaaggagtccctcgtactctgccatattattggtcgcccgaaaatcgaggcgaaccaggtatctgaggatttctccgctcggcgaggtcaacgtgacccccgcaccggcgccctgaagagacagggagccgtcgaactgcatcacccagcgggcggtgtgaggcagctgcgaggggcccgagctggcctcggggagtgagacgggttcgggagccggggtccactctgccacaaaatcggcgagagcttggctcttgatagcgtgacgtggttcaaagtgcaaatcgaactcagaaagttcaattgcccatttcaccacccgtcctataccctctcgattatgcaagatttggccgagggggtaagacgtaaccaccgtgacccgatgcgcctggaaataatggcgcagtttcctcgaagccatcagaatagcataaagcatcttctgggcctgagggtatcgggtcttggcgtcccggagggcctcactaacaaagtagacgggccgctgcacctttcggtggggccgatcctcttcgccaggggccgcatccctggggcgctcttcgtccaagcggcctcgcggggcgcactcgtcttctgtgccgacgacctcggggtcggaggacgacaggcgcggccttcccacagtggcctcggggccgtcctgggggtcgggggctcctggcatcgtcggacaagcgggcaaagggccaactctggtcgtcgggggccttaggccaccgttcggctcgggggcctcttctccctgctctctcccgggtcgagtcggcacagggttaacctcggggtcagagggcgataggtgcggccttcccgcagtggcccccgggccatcctgggggtcgggggcacctggcaccgtctgacaagcgggcagagggccagctccggtcgtcgggggccttgggccaccgttcggctcgggggcctctcctccctgctctctcccgggccaagccagcacagggtggggatgcgcggaatgaggattgtcctcatcgcgctccacaaccaacgccgcactaactacttgcggggtcgccgctaagtagagtagcaagggttcatctggctccggggcgatcaaaactgggggagagctgagatacgccttcaactgagtgagggcacgttcagcttcctccgtccaagtgaacggcccggagcgtttgaggagcttaaataagggtagcgccttctctcccagcctcgatatgaaccgacttagggcggccatgcaaccggtgacgcattgcacatccctaagcttgctgggggcgcatccgctctatagctcgtatcttctcggggttggcctcgatgcctcgggcagagaccaagaacccgagaagcttgcccgcaggtacaccgtacacgcacttatcggggttcagctttatgcgggcggagcggagactctcgaaagtttccgccagatctgaaagtaaagtttcttggtcgcgcgtcttcacaaccaagtcatcgacataagcctcaacattacgtcctatttggctacccaaagaaattcgagtagtacgttgaaaagtaggacctgcattctttaacccgaagggcattgtcgtataacaataagttcctatgggggtaatgaatgtagttttttcctcatcctccctagccatgcgaatctgatggtaaccagagtatgcatctagaaaacacaaaaggtcgcaccccgctgtggagtcgacaatctgatctatgcgaggcagggggtaagggtccttaggacatgccttgttaaggtcggtgtagtcgatgcacatccgaagtttgccattcgccttgggaacgaccaccgggttcgccagccactccggatggatgacctcgcggatgaatccggcctccagaagtcgcgccacctcctcgcggatgaaggcttgacgttccggggcctgccgccgcactttctgccggatcggccttgcgcccggccgtacggcgagacggtgctcaatcacctccctggggaccccgggcatatccgccggtctccatgcgaagacgtcagcgtttgcccgcaggaaggagacgagcgcgtcttcctatttgccatccagaagaccaccgattcgtgtagtcttggacgggccgtcacccagggcaacctccttgaccgggacctcgtcgcatgtgatcatccgctgcctcggggcggcgggaacggaggtgccaagcctctcgtcgccaccctcgggcttggacgcagcggcgaggtgatccgcgcgctgctccatacaagcaagcgcgactttgaggtcgccatggacagagatggggccaccggggcccggcatcttcatctgaaggtaagcgtaatggaccgccgccatgaacttcaccaacgcgggcctccctaggaccgcgttgtagggcagacttaggtccgccacatcgaagtttacccgctccgtgcggaagttgacggatccaccgaaggtgaccggtaggtcgatatgacctaacggccatgtgtgccccggcgtcacaccgataatcggctgggacggccagagcaccatccccggggccttgatggcgtcaaaggccgcgggggaaaggatgttgagggctgccccccccccccccccccgtctatgaggacacgccccaacttcacgttgcaaacggtgggggaaaccaccatcgcgatctgtcctccccgggcaacacacggtgggtggtcggtctggtcgaaggtgagggcaacctccgaccaccgcgcccgacgcgtcgcctcatgagtgggggccgcggccagaagctctcgcttcatggccttaaggctccggcgagaaacgtgagcacacgctcccccatcgacagtggcaatggtggccccaggctcctgaaagcctaggtcatcatcgccgccatcgatgtcctcgacgggggccttctgcttggcctcacttcgccgattgccggagggtaccgccggggacttaccctctcggcgctcctgcctcctctcctcctcccactttctcgtccgctcagccaaacttttgactgcgcggcagtccgcgaggtcgtggagggaggtgttgtggacgatgcaccacttgccggttgggcgctccctgctgggagcgccggcctccttctttttgtcgctcgcaggcctcccctttcgggtggcccgcgaagcgccctcgacagtgaggacatgaccctcgtcgtcggaatgggctgacctcttcttcctcctcctgtcacgtcgccctgtctgagcagcggacccgggggcggccgaagttgccacaccggaaccggaggggttccaggtccaggcctcctccttacgagccactcggtccgcgagctgaaaaagctccgcggtagtctggggctccttggaggcgatcttttcgagcatgcggttgtgccgcacacccccctgaacgcgtagatcaccgcgtgtgcagggatgcatggtatggtgttgcggacttgacagaaccgctgaatgtatgagcgaagtgactcatcatcccttcgctgtactgcgtgtaagtccgcttcttcacctgggcgcggatatgtgccttgaaagttcatggtaaactgttggcacaaatcctcccaagagtggaccgacgcgggtggcaagttcattagccaaccccgcgcctgtctcttcagggccatgggaaagaaattcgccatgaccctgtcatcacccccggcggcctcgatcccggtcgtgtagacctggagaaactcggcggggttgacgctcccgtcatatttttcggcgatggtgggccggaaccttgggggccaacggacgttccgaaggctcgctacaaaggctctacagccgacaccaccaaccgggggcacggagggctgatccccgcgtccgtgttgaggtgacactccggacgaggaggcaccctccgttgcgtgggtagcacgtcgaccattacgccggcgctcgataccgatgcgggcatctggccctccacgctgatcttcccgggtcagaggtgctgacgagggagtggcagccgaacggcgagcaacagccgccgctcgccgcgccctccgccttgacgacacggagccggtggtagcagcgccagaggtcttggtggctgtcacgaccggaaataacccaacgggcattccttacgtgcgtgcatgaatccttgtcccaggaggcaaggtacaccaaaagttgatacaaatcagagtttaacaagcggaagcgtaaatagttaacttattacatgggcagcgaaggcccagcacacacagagacaaacgagaaacagcggaagactagggcgacgaccacaggcgcttgacggcaggcacgagctagacaccaaagccttcatcttcaaggagctcctcttctgggcttgggaaaaattgagcaagactgagtacaaccaccgtactcaacaagacacacccacaaatgcagaataaatgcaagggagtacaagggaattataatataaagggttagggttgcagtaaacagcatttaaagacatttagttgctcagggctattttgtaaacacgatcttagaactatacaatattattaatcaaggccgtgaacccacacgaacctgccttaacccaaggcctatgatgattcagaccgaactggcaacccgaccctgggtcccagctcgtcccaagtcaacccaggccaaccattccatattttagttgttaagcaagttttaagaattaaaacactaacttgggtacattgctcggcttgcccataaccgagggctcggctattcgaatagattatactctgatcagaggtgtacatctttacccacaagacacatcttcctcacgtgtaaccacgtgccacataccaccacggtatacggacggaagacgtgacatagtttccaacccatcctagccttagacaagagtaccgacccaatcccgcctacggccggaacccccgggacaggcaggcaggactgagcccctagcagcagggcaccaaccctctgccatatgacatctcgactaccgggccgcagctcgtgtagccttcatttgccctggagaatgtccatcgacccccgacttcatccatctccaatccgtgtacttttgtttatgactagactgagccacaaactaagccttacccactagacatgtggaagtacggtagtgctttgcaacagaggcccgaagaccggtccttatatggccgaggtgctaccatcaaaaccatgcaccccgagcccagcctaaaaccattttaggggattttgaatagagggggcggtgtgaagccaattccacaataatccaacaattccatagtgtccaggtgatatgaatatttcccaagtctaaagttataaaaccacctaatgttacctaattaaattgcgaagcatctacctaaatttaaactagggataccacgagtagagtgtccactagttgaggttttgtttactctagggtgaacaaggtaataataataacaataacaataataatatggtcataacaaaggtaaataggcatggctaaataaaacagtgataacgcgggaatttaaataaagcgataatgcaataatttaaatcaacataattttacaaactgggattcaatatgttcaaagatgatatgacttgccttgctcgctttcccaaccgatggcttcgacttccacgaagagcggatcttccgaagctgcagcgtctacacgaccaacggaaaagaaaaggcttttacactactaaactccacataacagcagaaacaaagcacaaaaatgggttcttgacttcttaaggaaaaattagagacttgaacggtccaattccgagttcaaatggccaagatatggccatttgaagtttatatgctctttaaatggatatttacgaatttcttcatttaaattttaattaaaaatctcatttattgcgtcagccgagggagagggcgcgcggaccgggtccacgggagtggggcccacgcgtcagcctctcggtccacggtggaccgggagcacgcggctggcggcggtcggcgccgtgggtcccacgcgtcagccgcacccgcgggctcgggcggctgacggccgggtcccacctggcagccgcgagggcgcgcccgaaggcggcctcgccggcacggccgaaggtagggggacgcgcccgcgccccgatggtcaccgccggcgaccaccggcgcggcggagcggcacccgagagagaggagggaagggggaagcgaatggagcggtcttcggctcaccccggtcgacggcgacgacgggaacggcggccgaagcggaagaaggcggcggcgcggttcgggacgacgaggacgacggtgctccggcggtcggcgagcgaaacggaggcgcggacgaggtcgacgggaacgcggcgaagccgatggaggtgacgccgagtggggaggaagtccggagcgacggcggcggcgaaccggagcacggcggcgacggcggagagaaagtgcgacggtgcgggctcgattccgacggggagagtgagcggcgagtggcggaaacggaggagcggagctcggggattgattttatagcgacgggagagagagagggcggccggagagaaaggaaaccggccgcggagttctcgggctccattgaagacgccggcgacgattgcgggattcaaatcggacgaatccgagggagagagagagggaaaagagggggaatcgggagagggaatcacggggagtaattcgcccctctttatggcgcgcggggaaggcgggatgcggcggaatcggcggcggcggcggcgctagggcacgggcggcggcgggcgcggcgcggggttggggatgacaggtgggccccacccgtcagcgagggtggcgggcgggcctgcctgtcagcggcgcgcgctcggggaggagccgatgggccggaggggaggagagagagagagggagggagagaagtgggccgagccggcccaagaaggaaaaggggggggaaagaagacttttagggatttttctttttataaaccttttcaactttgtttatttcttttcaattattatttgtgctctgaaaattccactaaaatttatttacgcattttaggcttttaggaaatatacaaaaatcctccaagcctcatttgacttttatctttgcacattttaattgttggaggctttcacatgaattttaattattctttgcacaatttcgaggatgtattttagagtcgatttgggacgtgacagtggcggaggaccgcccaccaacacctaggtgctgccgtgccgtcatgaccaagttggctacgtcgtccagccaacgttgggctggagactccgggtcagggacgacgggcgggtgacgtaggagcgcgcccgcagcttggagcgcgccctggggcgtgctaccgtcgccgtagacgaggaggcgacgctccccatctcggcgcccttctccatcacccgtggatgtcgaagtcgcggatccttcgaccctctcgagcgcctcctcccgcctaggactttggcgtggagggggcggtggagtacgagctcgacggcgtgggttcggctccccgtcgtcaccgctaacactcggagagagcttgtgcgcttttgcttgtttagccattgggctgaacaggaaaagcttggcgcacacgaaagagtatgagagcttagaaaaacacacgcagaaccccctacctggcgcgtcagatgacggagcgtggggctcctcaccgggagaccgcgcaggtccccctttgccggttcggccgagggccctgggtgaggttctaagctcctagtctgtggaatgttcgcgaaagtggaaacacacaagacacgggcaatgtatacaggttcgggccgctgagaagcgtaataccctactcctgtgttctggtagatctgtgtacgaagaagctacaaagagctggagaaccagagagctcaaactctagaaacccctttcctcctttttgcctctcgtgggatcttctcctggatcctccgggagtctccaatctctcctcccctggtcctctggtccggatcccctccctaagtgggcaaggtcctccttttatatctcaaggggataccacatgcaccacttctacctatttctctttttggtggggacccatcctcttttcactaaaacttggctcgcctttccttcataaatgggcggagatttgtaatggttgccgtccgaatgaccttctgatgggacggcccatacctacctccactttcgccggaagcaggtgcgacgtgggaacatggctgtctgccgacgacatgaccagtgtcagaccggtcacaaatcggtcattcttgtccaccacgcgtcagtttatcaatctgcatgttcacccttcttcatacaatgtcttgcttgtaacggttgggatgaagcctagcatatatctgaccgggaccaacgtgtcatctccaggagctagcacgctggctccggctagggacaagtgcctggaggctcttatcctgacgggatggggcgaggcgtgtgtcagaccgcctgttgccacctaacccacgatctgaccggtctgtgaccggtcacagaccggataaacgagcgcgctgcactgcgttacatgcggcgtgacgcgctcgttcaaaccgcaataaatgcggttaggtgagccccgccgtgctcacctaacctatacacgcggcgcaaaacccacaaggggtcggggcgcctcggccctcggggccgaaacgggagcggtccgatccctcggggagacaaagagaggggcggcctcatcaccttcgggcccgacccccccgagggggtcaggccacgtgggtgattgctcctgcccaaacctctagtcatgatactcccggtcccatgtcaccgacatcatgcttcccgaagaaaccatgatgaatttatcatggttacaacagaaacatccacatctacataatggtagtactagtattgttctattctgcacgtattacattctgtgtgcggaactcaacacgtactgctcgagtacaatttctgagcagaggacagggaaatgaaaagaatgcctaccaggtatagttaagttaagggtgtgtttagttcacgtcaaaattggaagtttggttgaaattgaaacgatatgacggaaaagttgtaagtttgtgtgtgtaggaacgttttgatgtgatgaaaaagttgaaagtttgaagaaaaagtttagaactaaacaagggttaagaagaaataaaataaaactatgaatatatctgctagtattgtacagttatgctacgagatgttgaattcaaatctcacatactattatttttttttacttagtatgcatctttactacatgttgtttcaattggtactaattaaacatcaaaaagtttagtctcgattactagtctcgaacaggtattaaagatcgtttctcgtgcatgagcaataaaaactgatataacaagaggaagctccacgagaaaagcaaagaagacggaaagagaatctcatatcacctgtgccatggattgatgtcacaaaatcgccgttgttcgctctgaatcgcccgttgacaacctgatttatcgatcagggctgtcgagagggatttatatgcgagctcaacattgtttcgattttccgattaccgcggacggaaatttgtccaccgcgtgtggatccggtaacgggcttcatcggggcttgcttcgatggacggtcaataggagcgggagtatgtactccctaggagtacccattttcatatatatactgtactcgaaaaattggctttgagttgaacctgactcttattttgttcttctggattttaatattttgtaaactattttctcaaagataatttaccaagttgagctatcattcatagcaagatctctcgctgcaacacccagggtccttttagagaaaattgcaatattgggacaacaaacattagggcttcgctgtcttgacactccgagtggatgacaaatgggtccatatgtgtctatgaaatatgtgtccagtatcattatagcaaaggtcaatgtttgcagtgtcattattgcaaatctcccgtcatttttaccccgtttcatagaaaaatattatatcttatgaaattaaatcttataaaattaatagacgagatatagctacattggtgtacatctttaatgcatgccatccaattttagattaccatattactttcgaacgaatggagtaagaaatgctcatctggttggcatcaatattttaggcgactggtgatatggaagatgttctccggggttgattacagccgtagttcctcgttccatgtcgtagacacacagcgctttcccattgaaccccgagtagtagatacagttccctctcaagcctgttgtccgtgcatcaagtgacgctccaaaacagcctatctgaacgaagaacactctgccacctagcgaatccaccttcacccacgctgatctttgctcctgcgtcgtcgccatgctcagcctgtaaacgccaacaccagcgacaatccgatcacatccaatcgggtgagagaagagaatggagtgcagctccccgttcgattccacaaagatgctggtacgtttcatgtacaccgccggcctcctgtcgtcgtcgtctacggcggtcacggtgaacgccggctccagtgagaactcgaggacggcgacatggtcgatgagatcggtgtagaactcgccgtccatcgccgtgagctggcgtaacgccaggatgacgatgccgcggtgctcgtggtgaggcggcccaggctggaggtactggtgctgatgcctcttcacccagtggttgtcgccggggcggcaataccagagcaccgtgtcggcgtggtcgatgacgagcacgacgcagctggccgggtccatgggaccgcagcacgagaggaggcacctccggcgatggctgctgccttcggcggcgaggacggtgccgtcgtggtcggggggcagcccgacacggcggccggtgaaagggtcccacaggaaagtgcacggcgagccgcggcgcgccatgagcagccagccctgcgccgtggtccaccaccggtggcctctcatcatgtcgtcgacgccgccgtcgcccaccctccttggcagcagtgctctcgccggcacgctgtacagggacgtggcgtcgccgtggccgaacagaagcagaggagcaagcttgggatccagtactgctgcagatgcatcgcctgcctcctccatgattttgatggccgactgtcccacaggtaggatacggccggtcaattgaaaacgaacgaatttggcggtgctttataaacgaggagaggctttgagcagtgcaattactggcatataggaaagagaagcgaagaaatctgcacgcctacgacctacgattactagtaccaattaggacatgaattcctacacgacatcaaaattcaaacaaattatagtactagtactttgggccggtaaatcagtaaaaggaaacagtaatctgggccggggataaagagggatcaccacatatgcatctatggagattggatagcaaccaacaaaaaccaaccgtgccgggtatacaaactacaagcagaagcggaagccgacctatatatgagtccggaggaaacacgtcaagaaagcagagctccgtagcagcacaaaacgcagcgcgccaagcaggccattgcggtgcacgaaccctcgagattcgccaagcagatagatggaggccactgcgacggcggcgcagggactacgggactggtcgtctctcccgttggacatgctcgtgctcgtcctggatcggctcgggtggtcgacccacccgagcttcgcattgacgtgccggcactggcgctccgccgtgtcgcccttctacccggcgtggatcacgcctctcctcctgagcgccgccgacatcggcgtcacgaacgtcaggtactacagcccctactaccacaggtgtttcgagatcgccgacacgctcctcaaggtgcccaaaattgcggctaggatctgctgctccagtggacaacacctcacgctgtgtctacctagattgatcctccaagccgatctcgtagccggcaccatgtatgagctgccagagatgcctttctattcattcgagtttattgtctacgatgagcacgcgcggaggatgtattgcgtcaacacgacgtacgcgctacagctcgcccgtgcgacccaacaagacgacggcgagtgggggccctgggaattaacggactttgacgtggaaggaccgcaacttctggcggcgccgatcagcaacccggtgctccatggtggtttgttgtatgttcttggtgaagacgggaagatggcggtgtatgatccatgcaaccacgacaataattttacagttcccgataaacctaagggctttggaatcaaacaccaagttgatagccacctgtttgagtccgaccaaggcgcgctcatggctgtcctcgtcggctacagtggtgcgcctatccatgtcgtcaagctcaacgaagagacgatggagtgggagaagatgcggtcattggaaggacatgcgttgttcaccgggacatacacgacaatgttgaggaagactaagcttagattgatgcaaaacaaggtgttcctcccgaggctgtatgactggcctgagactatccatgtcgacattgttacacgtgatggcgaaacagcatttgtaccaaagtcatccagttcgtctaacaccaaggagatcacctcggacataaatatttggttctacgagtttgggcagcaagacgcaagagagttttggggatcggagagagtagattatagtatttgggttgattttagtactaattgacacaaattgacgttgttagctcttatattttcatatagtgaatcatctcacaatgaagttactcttctttcaggccaaaatcaaaatcgacgcaaatgaaatttgatataatatttctttgttggttgaaacatggcgctattaatattatgcactcagccaatgcaatttttgcatgaattgatattgatatttgtgcacagtaatttatgaggatttaagggaataataaaattataggcttggatgattttctcggaaaatttgaatttttttgggagggaaggatttagggtttgggtgattcacaaggatttaggcaagttttgaatttcaaaattcgaaccttgggatttgtaatggaactttgggatgaagtttttgggatatcaaggagagacccaccgagatcttttggcacacttaagtccttgaggatacagaaagatctaaaatttttgcaattaggatttcgttttatacaaaataagttagaaaaataattcattcgactgtgagttgctgaagatatggtggtgttatcggaagacttgaccgaatagccatcactgctaaatggtggcatggatctacttaatccacaaatagactttcccattaaaccaaccatatgactgattactcccttcatttcaccaacatccattatccaatgcatgaatcgatttaaaaccaaaacgtatcacatagagctagaagaatgaggaaaacttcaccaaaagcaaagtagttaacgtacaggtgcaagtagttaacgtacagtatcaatgatactggttggtgacgttggctttcatcatatacttggttatcttcttcttcgccttcttgtcttccgactcacacgtcttagcgtgagccagaagtgggtttctcgccctggccgaagaaggttcaagaagaatcttcttgtagccttttccgcagatccaacacttctttgggtcgaattcctcctgctgacgcacggccacctgatggcccgttgcagtggcatcgagggcgacctcgtcggactcgatgactgcgccgagagaaggtttgggagcgccgtcgtcagcgtcggcattggcgctggagttgggatcgaccttgtcgtcggctgcgacagtgccagtgggatcgacctcatccgtgacggtgttgttggcgctgggagtggggacgagctcgccgctctcagccctggcactgccgctggtgtcagccgtggcgctggagtcggccatgacgccctcgtcgcttgtgtcgctggcaccagccggcgcagcactggtgctggcaatgttagagacggcagtgccaaatccagcgggatccaccagctggtactggaaggcgccgggcttgaactgaaccaggatgacggtagtgttctcgcccgatgccaagccgaactcaacaacctcctcacagatgacacgcagctctgcaccctcctgcatagcaatattaattggtcacagcattattggtaacagcagttttaacagcgaaagaatcgaagtcaaagcagatggcagtttgtcagccaggcatgcatattcagtgctaaactaacaaatggttttgtgaggtttagggcttacacagtttttttttaaaagaaaagagaaaatcaggatatttacattgcttgattgaagtcatttcctagaacagatagcatgattaacaccactaagatatcttgtcctgccaagaagacaaactgagggaaagaaaagactcaccaccgataaacggtcatgtatgtaagaaaccacgtccgcactgtccacgcaagacctgcagggggaaaatatacagtagtcaatgcaattagtatggaactatgagtgaaactatatatgaaccaaataggaggaaaaaaaaaaaagagaatgccaatgagtactggtgacataaaaatgatccaatagttattgacaggtattttttgctgaagagttaccacttaccagagaccttgacttgcaataacaagaaactccatgtcatcagttatgtcatcctgacattgaaagggcaattttccatcagatcccaacccggcaaaactgaacttcatattctaccaaacggacctatttacacttagttacacttacagcgaggatgtccggatcacataccagcatttgtttttcacgatctaaatctttgttcttcttgaaagcaaagtcacctgaaatgtaagtaggtaaaacgccaatcacagtgtaatgtgcttctttttgtgctattacatgcaatcaatgaaaaacagatccagacaagactataccaattgatcttgagattgttacacctcccccaaaatcaccgaggacccattgttccttgactacataattccccattacttgttcacacctaagtccaagagatctccctcctgcattttgaactctctctctttcagactcagttcttgtgcatggtttgtgatcgaaggataaatcaatagcctattgacaaaatggaaacaagcacaaatgttaggcaccacaatgaacgagcttgcaaattaggtattaaccagaaattcaatagggaaacaatcactataccaggccaccctgtcttgagagtacgcaacgagaatcaccaacatgtccaacaatcatttggttacctctgatgacaaccacacatgctgtgctcccttcatacgctggcccagtatatgtcgcctgggaaaacaacaaccaaactgaagtatataacacagaatcacaacattgttagaaggaaaaggctaccaaaaaatagctcaagaaagccaacaggtatagaaaaacatttctgaaaaccaaaccaatgtatgaaagaaataaccatcgaagggatatcgcaaacaatacctcaatttggatagcatagtatgataagaaccaaggtgcaatgagaacttaagaacctgttggcctccaactcagtaaaccagccaattgatatgtaactaattgaaccttttttaataggagcaattagtcgagattagggttaaacatatctcctccaactccaaagtacatcacaagaaagaacaacagtctcgatatcaaacacattcttccatttcctttttcatagatacaatatgcacactgtccaacaaatacaattttgagtaacttcttcacgatatgaatatttgaggatgctaggggttaaaagattactacctgtgggaaaggcttagcacagacaccagccttgagaaaatacatacatccattatcatgaggaataactaactctctccaagcatcggactgttgcaggttctcatccatgctgcagcaatcacacgaacaatgatatcccacatttccaagtgcagctataaacaaaattatgtaaagtaggccaaaataaccttaaaaacacattgtccagtgcattaatcagatcgttgtgatagtcttcatgattgcatagctcaatgtgaaattgttttgcgcaatacaatgctacttcagctcctgagatagaaaaaaacaattcagtatggcgtctcgctcaatacgatggatcaagattacttctattgcatagaagcttataaatcaaaacactgttgtgaacattagtagcagaacaacacttgaataggcatcattaaaaaaaaactaacctgttaatctgtaattatcctctaaattatcatcaccatttatattactagtaactcatattcatgcagtgttttatctctcatgaattaaaatttctttttatgtagttcatgttatccttgcaagcatgccacacgaatgtgattactgattagctaacttgttcattatccataactgtagcatcatatttatttgaaaattgacaggtaaatgtttcaacatataccacaaagttttcaaaacatgcgcagagataaacaaagtgatacacacagacaaacatagcatgacataacagttacgccaacaatttggagggtttgaaattaaaaaaaaaatgagaatgaaagcaaacctccatggccatcataaacaccaaagaaagacgtggacgtggcatcatcaagatttagaatagctgcatgctagagaatatagagggcatatgtcaatcacagtattttacacaattacttaaagatcagtaagaaaattttgcagaactgtccctttttttgtcatacaaaaggctgcaagtttactcacagcatcttccattttctcaccccatccttgcatagacgacacaacatacttaattctgtcattctcttcttcaaaagtgaacttcgattctacaggaaggctgttacccatagcggaacttgctttgctgaaaatttaacatgaatacaaatataaaataacattattaacaaaaacggggaaagacacttaaacaataatacagatcaattaaatgccagaaagctaggttacatatgaaataaagtgaagtagaatcatcaaacttgatatggcactacttatctagctcaaagcacagggtgtaattggtgctttcattcagggcccttaaatgcttaaatgcatttttgagatatataacatggaagtatcaatcttcagttgcagtgctgcattattttacacctaaatcttattttattactgcgaacaaaatacacacaaggttttctacaaacgcgatat

SEQ ID NO: 27383 - DNA, 1193 bp, Oryza sativa
aacggagaccaaccatgaagcttcggtgctcgtcgacctcctcatccaactccgagaaaaccacgcctcaaatgcatcaagcaacaacatcacgggtacgggaagcgaagaacacgaaaaaagaggaccagaccgcggtaaacaggaaccaaccaagacgcagggtgctgctcgattcagcgaagacaagaacgagagaaaccgcgacaccaaacactccaagcaaacaaacaccaccaccaatggagcaagatcgaagaagagtagggagaagaatctcacggcgctttcggagaagaagtagggtttagggatggaggcggcggatgaaaccacagaggagaggaggatgaagtgggagagagatctcacctctcacctttgccgctgctcttgagacgcgagagagagagagatgcggaaaagtggttgtgctgcgaagcgcaaaaagttgtgcttaaatacctggaccggacgaatctcctccgtcggatcgtccctcgcggctgatccaacgctcgaggagtggccccatcctgtggctggtggtccccacggatacctcgcccctgcatgactcgtccaattctcttttactcatcatcatcaactattagtcagttcatcaatctgggtacaattttcatcaattctctttaatctggatcaggacaacttccatacaatctccacacgaatcgacaaaaattctagcattttcaaatcccagattaaaaaaccctgtaatatgacaatatcaagcctaatcagaattagctgacctggaatttctaatattacatggcaagataatatatgcttatttacaacttaatctagtacatcgatcacatcatgttggcaaatggtatgatgatgttatcaagcttagaaggtagcgacctgctgctgctgctgctggccttgctgtgatccgccgattccagtgctcgtgatgtctgaagggccatctcagaatgaagccgcaggcaggtcatagccatcttgaagacaaacatgccaatgggaggagttagatgacagtgtgaaaagttactgagtttccagcttatactgaattggtttctcttttaagtaaaaactggtttccagcttataagtaaaaatatgtcctgtttttcgttacaaattgctgaaaagagctgggtcactgaatttgtatacgggctgca

SEQ ID NO: 27384 - DNA, 1560 bp, Oryza sativa
tcttttcaattattatttgtgctctgaaaattccactaaatttatttacgcattttaggcttttaggaaatatacaaaattcctccaagcctcatttgacttttatctttgcacattttaattgttggaggctttcacatgaattttaattattctttgcacaatttcgaggatgtattttagagtcgatttgggacgtgacaaacctaccccccttaaacggaatctcgaccccgagattcggaagaactggcgaagagatcgggatgggctgccttcagctcgtcttcacgctcccaagtagctttttcttcggcgtgattgctccactggaccttgcaaaaacggattacccggttcctggtcctgcgctccatggtgtccaggattttcactggcctctccacgtaggtcaaatcttcgcgaacttcaatttgctctgagtcggcctgctcggatggcactcgaaggcatttcttgagttgcgacacatggaacacatcatgcacgttgcccaaggaggcgggcagctccaactggtaagcgacttctccgcgtcgagcaatgatacggaaaggacccacataccgaggtgcaagcttccctttcgtctgaaacctgtgtacacctcgcaatggcgtgactcgaagatacacaaaatcatccactgcgaattccaggtcacggcgacggttatctgcataacttttctgccgtgactgtgccacctttagattatcccgaatgattctgactttagcttcagcttctctcaggatatcagtcccgaacacttggctttccccaacttggtcccacaggagcggtgttcggcatttgcgcccgtacaacgcttcatatggtgccatttgtatgctggcttgatagctgttattgtaggagaactcggcataggggagactcttatcccaggtcttcccgaaatctagtacacatgcgcggagcatatcttctaggatttgatttagacgctcggtctgtccatctgtctgcgggtgataggcggtgctgaaattcaatcgagtacccaactcttcttggagcttcttccaaaagtgagaggtgaattggcttcccctatcagatacgattttcttgggaacgccgtggagactcacgatcctagcgaagtagagctccgctagtttgttccctccataggtggtcttcacaggaataaatcgagctaccttggttaatcgatccacaactacccatatagaatcatatccaccttgggtctttggaagtccagtgatgaaatccatcccaatttcatcccatttccattcgggtacttggagtggttggagaagtccggccggtcgttggtgctctgccttgacacgctggcacacatcacacagggccacaaactctgcaatttcccgcttcatgctaacccaccagtatttctccttcaagtctaagtacatctttgtactgcccgggtggatggaataaggactttcgtgagcttcctgaagtatcagctgtttaagttctctgttatctgggacgcatacccgatttccattc

SEQ ID NO: 27385 - DNA, 957 bp, Oryza sativa
caaccgggggcacggaggtctgatccccgcgtccgtgttgaggtgacactccggacgaggaggcaccctccgttgcgtgggtagcacgtcgaccattacgccggcgctcgataccgatgcgggcatctggccccccacgctgatcttcccgggtcagaggtgctgacgagggagtggcagccgaacggcgagcaacagccgccgctcgccgcgccctccgccttgacgacacggagccggtggtagcagcgccagaggtcttggtggcggaggaccgcccaccaacacctaggtgctgccgtgccgtcatgaccaagttggctacgtcatccagccaacgttgggctggagactccgggtcagggacgacgggcgggtgacgtaggagcgcgcccgcagcttggagcgcgccctggggcgtgctaccgtcgccgtagacgaggaggcgacgctccccatctcggcgcccttctccatcacccgtggatgtcgaagtcgcggatccttcgaccctctcgagcgcctcctcccgcctaggactttggcgtggagggggcggtggagtacgagctcgacggcgtgggttcggctccccgtcgtcaccgctaacactcggagagagcttgtgcgcttttgcttgtttagccattgggctgaacaggaaaagcttggcgcacacgaaagagtatgagagcttagaaaaacacacgcagaaccccctacatggcgcgtcagatgacggagcgtggggctcctcaccgggagaccgcgcaggtccccctttgccggttcggccgggggccctgggtgaggttctaagctcctagtctgtggaatgttcgcgaaagtggaaacacacaagacacgggcaatgtatacaggttcgggccgctgagaagcgtaataccctactcctgtgttctggtagatctgtgtacgaagaagctacaaagagct

SEQ ID NO: 27386 - DNA, 3924 bp, Oryza sativa
tcctgcagcccgttgcaaatagcaagtctgccaagctgtgagtgatcatgaacacttacccttactgtaattgcattgtttctgttttaattttctgtgttaattacgttgcaatcactcagatatggtagcgtcaaccacatagatgagaggtttcggcacagataccaggtttgttgttcaatatctttagtgtagttcatcataatgttactcatggtgttttaattgcttttttaccttttttttaaaaaaagaactgtgatattgactaacttcccaggtaaatcccaatgtggtgcaattatttgagaacaatgggcttcaggttgtaggcacagacaagaccggagaaattgtgcaggtacaagctgaagaacccagcttgcttgaacaaatttcaacttttcacttttccattattcatgcatgctgatgttattgtttgtccaattttctagatcgtcgaaatacccaatcatcgatttttcgttggcgttcaatttcaccccgagtttatgtcgagaccttcgaaaccttccgcactttttgtcggtaagctacttaaacctctgtaaacgacccaagggaagttgatatatatctttcttttgaaaaaaaaaaaagttagcgatgtaatatcaacataccgctttctcgagtaccgtcaaaatttctctttgacaatctgatcaacatgtataccgacctgcaggactaatcgctgcatcgtgtgggcaactggatggtgtgctgcaagatgcggcttgtaaccatgagccacagcagaatcagcgtgcagagaagcgtcctgctgctagtgatctaggagattgaacctgccgcagcaagcggcaagtgacggcgtgctctgattcaaatgaccctgatgaagcaccggatgtcaaaagctgttaattgtagttgccgtttcttgatatcattgttagtaagaattttgtaaaaagaaaaaaaataagtatgtgtagcagtgttcttataatggaaatgggggagaataatcctctcttttttaaaaaaaaaggaaaaaaaaagtaaaggtgtgcaacacatgaatacatgatgcattgcatcgtcaccagtagttcttcatgtcgagatacggactaggggtttttttgtccgaccttttctccgctcttcacaaaaaatctgggttttttgggaggtccgtggatgtttagaaaaaaaaaagtaagctcttctaggttaatcagcatatctactggaattcaagctaatgcaaccatcggattcttcaataaatatgtgtgctaaataggaactgttttacatttgctagcatcggaaggctacatgttactgctataattgacaataacgatcgcaacagactttgcagacaaaatgaagtcgctgtgataaccttatggtcctcactaatcctttgttcagtattttcaccgttatctggtcaggctcaataaagtcatccagaagttcagtttcatcagcaccgccactgttactagatcagaagttaatttttatagttgaaaccagtgcatcccttaataagatactcttactgtgtatttagtcatgaagacaatgaggaacaagcaatttgtttaattgtttgttgaaatcatcagtttgtcagattgagacacatactacaagttattcattggccgtcaagtgctttaattggaagtaaatttcaaactctttgggagatttctttggaactggatcggctgaaggacctgtggaggcgataccgaggcactgaggcagtgctggcccttggcgtagccctcccaatccatggcggcctccccctggcccctgggtaggttttaggcgcctggtggtggtggatcggtgccggtgggggatttgccgggtcggcgaaagaatgccgaccaaatttcattaagattgagagtaaaatacatgtattccgatattaaactgtcgagtcaaggcaaaagccttgaaacaaagtgagaaaaagaaaaggggaaaactatgccggtggggggattcagcgagttgaatgcggacaaggcggtttaataaccggaatcagggtacggttatgtatgggttatcccgatcaatcgtattcgtgtccaattccaaatggacaatgcgtgcctacttaaattaagtaaggcgcgtttaataaccaattaagacaaggggatatactacaggacatacagatcaatcatggcggcagtcttctgcggggacatgatcccggtaaagttgtggtgggagatcctgctcagggcaccaaccaaagacgtcgcccggtcaagctgcgtgtcaacgcagtggcgcggcatcgtcagcgacccctcctttcggaagctccaccatgacaggcatgccgtgcccaacctcaacgacggcatctccgacactttgctcgtcgccacgtctgacgtcgacggtgaaagcgtctccagcgtcttcccggctgcactggtctctccggcggtgacgggccaggcgcccatctgccgggtcaacaacccatacggctacagcctcaccaacgtctgcaatggattcctctgcttcgcctcctggagcagagccaaggtcatcgtgtgcaaccccgtcaccggcgagaagctggcgctccccagggctcctcaccttggactcgagaagcgtcgacgttactcgcggccggtcacgttcgccttggggttcagcccgaccaccggtgcgtacaagctgttccgctttgccgaccgcaggatggacgtgtacacgcttgccgctgctggcggttggcgccaacacccgtttcctcacccgtaccgcgtggtacaaaatacgccaactattgttgtaggtggtaagatatgcatgctgacagccaacccggcgtcgcatcagcacccaaacgatgttggcaaacccggtccggtgatggttgtcgatgtcgcaagcgaggagtaccgcacgtacaacccagcggactatgggtgcctgtgggccgacatggcagtgagcggctttgagctgcacggacggctatgcctggccatcaggtctgatacggaaatccatttctggaaaatgcctgttgaagaaatatccatgcgtgcttggctcgatggtgatacccacacgttgtgctacggagtggacaataagttgtactccaggtatgtcggcacaaccatgacgatgacaacatcgctggcggcacggtgtctttctccgaccgaggttatgtcatgggactgcaaaatccgtctccctacgactccaccgtggttagtgtcgtgcaactggaacatctacacgggataccgccccagcctgctctcgcctctcacctttgcgtcccagcaagataacaacgacgatgatgaagatgaaggcgacgagtcccgtccattcgtccgcagattgttgtgtgcactacgacaccagaaatcgcagaaacgccgcatgtctccaacatcaaccgatcataccaacggcaagagagtttgctatagaaatccatgcatatgctaatgtaaatatgtaattccccgatcctcgttgacaatattcacatagaaattgtattttaagcagtacaaacaatacataaacttatttatgtggtggattcaatcaatcctttccggcccaaaaaatatggcccacgtagaccacatccccttttaggcggcccatcgagctagcggccagaccgtacttgtaccgtctatttgaatttttttcatttttaaatttttttcttttaatatttacagaaataatctatggcgcaaaaaattacaaaaataaacagtagagggcggcaagctgacgtggcagacggcggctgccgccatctgcaaaaattacatttagccccttgccgccctctgtaagggttgcaaggggctaaatgcaattttc

SEQ ID NO: 27387 - DNA, 7475 bp, Oryza sativa
cagccaaaaagtattaggcccgggttggctttttttgcatgggagccccttgccggttttcgtcgaaaaaaaaaaccctccctctcccgtcaccgcccgtccctcccctatttgcaacgtcaccgcccgtccctcccctatttgcaacgtgcgcttgcccctcccctatttgcaacgtcagcttgccgcccgtctgccattaccgcctgtccctcccccgtttgccacgtcagcttacctctcccgtcaccgcccgtctgccgtcaccgcccgtccctcccctatttgcaacgtcagcttgccgcccatctgccgttaccgcccgtccctcacccgtttgccacgtcagcttgccgccctaatggagggcagtagggtctatttttgtaattttttgcgctgatggattatttctgtaaatattaaaagaaaaaaaattaaaaatgaaaaaaattcccgtcgctttcaactcgcagcgctgatacctggccgtctccgggggatcggtgaccactacggcgtcctggcgctgtggaacccgctccacgcgccgttacgcgacgtgcaccgtacagcggtgtggcccttgagatccaaaaggcatcaagacaggtaaccacaaccctctaaaaaagaaaaatatttggaaaatatttgccccttcgtgtgagagttctgtgtcgtcgtacgtacgtgcgtggtgacgtgtagactcggggagacgtgagacgagtcaacacagtacagatggggagacgtgagacgagtcgagacaggtacagatgtcacgttttgaactagctatacacaacctgttctgttgttcttgtgttcatcaagctgctagaaaagaggctacaggtactacagtcggatactctagtgtgcttctttcagaacaaacgctcagggacaacagatcgatacataacacgagtgaaggtacacaagctaatcggagcatcccgtgatatgctagcatactacttaaccgtcgtcaggcagaagcagcaaggccgtcgagtcgtcgctcaatcgctcatcagtgtgtcgtcatcaggtgaaaaccctcccggcgtgcgccgtagtcatcgccggcagatcaacctcccggagatcggtcttcaagcccttgccggcggcattcgccagcgggtggatgccgtgatccgggccgctcatgtacgctcggttctccctctccttgtcgaacgacacgctgaacttctcctccacacctgcaatgcacgcaccaatcaccaacacaagtagttaagctgtgacgactgacgatagattggagaaaaaaacacaattgaacatgaatgattttgcacgtacatttggcgagttcttggcggagctggccgtcgcgggtgagagccatcatgatctggggcaggccgagcgggagcgcgtcgccgcggtcgacctgccagaagtggatggtcttgccgtaggtcttgcacaccctctcgaggtcgcggcgctcgacgacgccggggacgccgggcatgaagaggacgccgcccttgacctcgaactcgtgggtgtgccacagcggcttctcgtcgtcggggagcgtgaggaacagcggctcggcgacgatgtactcgacgccgatgaggcgcgcgccggcgtcgggcccgtcgaagatgaggcactggcgcatgtcctcgttgaggtgggcgcagaagtggtgcgcctccacctgccgcgtcatgtcgtcggcgtagaagtggaacgcgcacaggtgctggtggatctggttcacggggccgaacccctggatgctccccgtcgccgcctccagcagcgccgtccccgtctccgtcggcttccccggcacctccacctcgtggcacgacgccgccattgctcaactactagaagctagcttggtgtgtgtgccgctggatggatgaacgagagagagactcgagtgcgagcgagctgttcttatggtgcgctgactcgcccatgcagttgcacacgtgtagttctggaggaggcacgtgtctcccgcgacagatgcttcgctgccgccggctgccacgagcgcccacgactcgaactatcggcacgaagcatatgggcctaagagcgatgaaattgaggtgtccattttcggcccgcggcccaataggattgtcagaattcagcccattttcctccgactaactccataaggtggtgggctagacgatctgggtttgaaacctcacccattctaattatttgatattagatccttctctaatattggcctttttttaagaggatttttagggtacattgtactgcaagtatatactagcagtatatatgatttaacggtgtagattcatctaatcttccgcccaatgagcctgcagtataaattgaatagggtatattagtttttttcatcttttgcgtggaggaatatttttgtattttcgcatttctttacttcttcgtcagatcccgctcgagcgaattccagttggagagttagagccgttccctttcctttgtcgcatgtttgaccgccgccgccgacaaccaccggaagcacgccgcgccccgcgccgccgcccccgggaatcgattctatttacgtcctcttttcatcctcttctatcattcccactcatccaaaaccttccttaactcctctattgacggctcgggtgtgcggagacggcattcaggcggagctgcatatgggtgccggctgctgggggcccaggccaaggcgcgcagctgcggcagtttgctccggcaaggctacacacaaggactgaacattaatgatgaacaggttcgaaaagggtacatatagagggcttcagatgttcaagatggctacgcaaaaaaatattttgatcctgttttggataagaatctgatactttcagtagtagcatgtaacattgaacgctcgacctcagtctttgtctctccctcaggaggcagaccgcatggaagtaacattttctgcaacaccagcagtccaaggaagcctacagaatcggcgacggccgggcatggagggcagaagatggggaggcagccggctatagcagcgcgccgcctcgccgcgagagggcacggaggctgatgctgggttccagccgccacgagagtagtgtacaaacacttcaccgccacgggttggggagtacaggagcagtgagactggaggtgggaagcggggggaggcagccagctcgtagcggtttgggaaaggctggagctgtgaggacggatgcggaggagaaagccacgcggggaggaatcgcgcagtcgtcaaacgaggagcctacaagcgcgtcgtcgtcagaacatgccccgaccgctcatgcgagatccaggcctccagggtactgtcgatggacggtattataaatctcaacttcaaatgactaataagcactttttaggtttttgacaaattcctattatacccataaatatactgctagtatatacttgcagtataatgtaccgtaaaagtcctcttttttttaagtgtcaccctgaagtctgaattctgtctgcgtagctgttagctctgaattctgatcagaaaagttcagtatatcttgcgcccacatgtattggtatcacagaaaccaaaacaaacaagatgactctggcataagcttaaaacgaaccgctgaccaagatggtaaaatctttgtacacgtacaagaagaatttttaccaagatggcagaggaggagcatatcgatctcatgtaaaaaaggaaaatggtaaaattctaaactatcaagccatattctaaatgatgataccgggttgatcaagatggccactgcagttagtcgatggaacttcagaaagctcaagcttccctgtccactcctctcccggtttcagagtgatttgtctctccgctgcagccgcatcaacgcacagcatctgtttgtactcctcatcgccgaagtccacgatgtttttcgatttcttttcccacggattccacacaactgggaggaataaagcgaatatgatggaaatttttcaagcaaagttaccatggttaggtggcaaagagaatattgtgtcttaccaacgtcaggcagtccttcctttcttatgacaaatgtgcgtttcttctcatggtccagaacagctattacatttggtgagctaacatagactcggtcaacctgcatatgtttgcacatagaccaggtgctaacaccgtaaatcttggactttatgatgtggcaagtaaatttttacaacaaaatgtcaaaacaagatttgcggaatcagtagatcaaagtatatagcgcatatgattattcaaacatttttcacctccgattcaaatgttatggcatctccttgttctgtaaaacgttctctctggctaagattatcgagataatcaagtgtctcaaggccttctatcctcacctcactggaattaacaagatatataatctgtcatcttcaaaatattatatggcaccaacaaaaagtggttgaagtacaaaaagaatgttgggtgaaatgcctgacctgatgtcagaaacagacagatatgtgtgataaccaaatgagaaactgaatggcttgccattaacatttctgatgcgtgatactagtgacaggttcccatcctttgtaagagaaactctcaggcggaactcaaaactgaaatcaaatattgcaggatcatacataaaatcaaattcagtcagcattaacaacgagatgaggtgcaaatgttcaacaacctccctgaaataaaatattctcctgactattatcatcaaaagtgccaggattaggctgttcaactaattacccccatgatgcagtacataacaaaactttgacatatggcccttactaacaaaaaggcgtgctataagagaaaaggaaatacatattggacaaaaacaaatgcatacccatgtggccagcacttcaggtcatcttcagatggctttagtataaggtcaacagaagctttgctgttgttatcattttgatttaatggtggatgctcctcatctagggcccatatcctgtttcttgcaaatccatgttgctccaatgttccagaatttccaaactgcagtgagtcttgtggatatcagaaaagaccaaaaagaagggaagctagcttccttatcaattggcatcctatttgtaacagtatataatacaaatcttcagtgcaatggaagactatgatacctgtggaaaacatatcgggattccaccacgcatcgcctttggtggcttgaagattgcctgcacgtcaagaaactgcgtgttgaagccagtgaaagagccatggaagagaatactgaagatttcttcagtttcccagatggaaacagtgaaacagttcaggtttttgtgtcttcagagcccgtctgaactgtccttccacaagtacagtttaatgttcagagtacacacttctcaaacagaatcaatccaagaacatatcccgcgagcgtacagtttgaattctactgcaatcaattgaacttgcgaaatacacttccctaggctaatcgcagtaatgtgaacccggttgcagagcactgaagaatcgaaaaatgaattgaaaaaaaaaaaacgtcaccttgctgctggtgaagagaagctcctcgccgcggtcgttcctccaggagaggacctgcccgccgtgcaggctcacctgcaaaacacacaccacgacgaagaaaacaaagccatcagaatcgcaccaaaccaaaccaaaggactcaatgccaacccgatcaaaatccattcgcaaagacctgctcacccgcgagtaggcgccccccggcgagcggagcacgacctggtagacgccgttccagtccctgaccacctccagctccgtcctcggatccgtcaggttggtgtagtgccccatgctcatcaacagccagccagccagcccgcgtgaagagagagtagaggagaaggagagacgcacacgagcgcgcgcacgtacgcgtacgagattttatggcgacgcgcgggaagcagtgggcggcgtcgccattgggacggttggggttgccacgacgttttacactgcgcgtctgcactttccttgtgagcgcaaaaaaaaaaaaaaaaaaaaaaaaaatgaacaccgcgcgagcgcgcgcgcggcctgaaacccgtgagccaccggccacaccagcgcagcctcagcggaagccaaagcttctgcaaccaaccaaaccaccggctcgctctcgctcggagcagcaaattcacaaggcacgccacggcaacaacaacaaacggatcggatgcagcgggaaatggaaatgcacgtggtggtcagaagcgcagcgcagggcaaccacctcgtcacgtcgccattggaagatcgagatgagggaggcgaggcgaggagagaagcacgagtgggtgaagctctagcttctctagtgcgcgaggaggatgagaggatccgaggctaggagaggagaggttgatgctgataccgatggcttcgtgcacccggcagagcccggaacccggtaaaaccaacccagcgccgcggccatggaggacacgtgcagtcgccgctttttcgttgagaaaaaactaagacaaaccgtgggggttcgaccactttgttgcactttgcaggtatagaaaagtctcaggaaagaaactgagaaaggaaaaaagggtttcatcgacgacgcaatgctgagtaggagaaagaaattttgaaggaagaacgaggaggagaattaacagattgttttggcttctgccttgtggataataatcggataaactcttgcagcttttctcgtgtcctgccttgagtctgcgtaatgtaatgcctgcattttaattttagccggttctttttaatttcgcggaggagcccacgctgcaacggtcaagttttctcctccaagtttttcaaaggcttttttggcgtttcttaagccttccgcttcgccatctctctttctttactcctttattataatctttattctcttctttaaagcagaacggcagattagtagtagctactataatcaacaagccttgttctaaacatggcgtctgttcaaacatcgaagtaatgtgttcttttgttttcggagaggacaaatttccagaaacaaacgattcttatgcgtgacacgatctctaaataactttgtttgcatgcacacataggccaggtatgctttgttcacagacagtgcagcgaaaggaacacttgcgttgcttcaggacctggaacttatccatggtcgccaaatgtacgagtgccgtgctctctgaaacctgcttagaacaggggcctctcatttacttacatcaacccagtgatttaactttttttaacttaaaaaagaactcaatgattcggacaaaaatggtgatccgaaaactgtttaagcgaatctttcggaaagggagaagtgcagcgagtgtaatccacaagtcag

SEQ ID NO: 27388 - DNA, 843 bp, Oryza sativa
atgcagcgctatcagtatgcaagaagctgcaaacaacacagacctcctgacgtatgcttcgggatgttgcgaaacagccctgcagaaacaaaatccaatgtcaaaatcgtaccacttggttataactaagaaagtctttaacacggaaatgcttgttttaggcttggcagacctagatctgatcatatcaagaagagctggggcaacaactgatccctttgtatgcattgccatgcaattgacacagacccagcatgtatatcaatttacctaggacaacaaagtccggattgagcaagtcaacaccatgtgatcttttatcatatccttgcataacagggagcataaaagcagcagcatataaaggaaatctgttttttgaccactctgtctgcaaatccttagcttttccaagaccccatttaggagattttcctgatttaacttgaccagatctagatggaacttctctttcataccggtgtgaccaattcagaagtgttcctgattctgagacttccctccaaggacctgcaccagcaggtccctgatcactaggaactagccaagagggagaggtgtcggatatcaagtttccatgccgcagctctctccttacaattttagtttccgcaagctcctgtgcggcctcagtcataacatcaataatcaaaatgcgctgacttacatccacgcttgatgagtacagcaacttggtgagaacatctaatgattcaaatgtgcaggttaccagcaaggcaactaatgccttctgtctcttttcttcagcagaatcttcctctccttccattgccacgtcagaacatcgaacatgcacaagtg

SEQ ID NO: 27389 - DNA, 6269 bp, Oryza sativa
aacctatctatatagggatgtgaatcagcgattggacctactatgaataaacaagaaaagggctgaccaaagcctttagtgtgccacgagaagcccacacaaccagagagtgaccagcattattcccaaccttacgacctatccttgacccaatccataacattaacccggttattttgaaagagaaaaaaaagaaggaaatttgagatcgtgataacaacattgaccgtaagggtgttgagattgatactgaagtggaggaaaccttctagcaatctaaccaatttgttgcagcacaagctgggctcatgttcatccatcactacgtataaaaaggtcatatcactctggcatgtcaagaatcaagatgctatcgctggccttatatcacattgctggcaaagctctggaatggagtacatcgtgcttttgctgctatgcttggcctacacaaaactgatgctccgctaatgcagcccacatgaagcctccagccccccactgccatgatcaacctatgttacaccccctcaagcccaccaccacacacctagcctttattgttgcaatcatgtcacaccgattatgcgttgcaatcatgctgcactaatcgtagccaaggacccataaggagaaaatatctcacttggaaacgacaaagatgaccaatgatgtaggaaaaaaatgggtaaatattaatttgtttgttgaagaagtataacttgtttttgtccaagattcgtttttgagataacagatggagatgggaaattatttctgttctccatcatgataaatcgactactacaactaagtttttaaagcaagtgcattgttttatatatgattgtaaatagaaactagatactatcaaccaggaaccaggaactacaatgaagctgaatggtgttctgaagaagcaatataaaggttgatgctatgaagaaattttagcacatcattaaaaagaacatgatacaccaaatgttgaaaggttcagagacatacctcaacaagggttataccctttggcccttgagcactgatcatatcatatatacagttttctaaagagagttccataatttggtcagttgcctgccctttcttgccaagtttgtagtttgaggtttgaatttttggcagaaactcatttggatcaaatttcttcaaaagacgtaaacagggaacaatctgaaaaagatgagcatttttatagcttatggtcaacaaggtatgtgaccgagtaaatgattaaagcatgagtgaggcacaccaggctgataactatgtcactacatgcctaacagatcaaattattgcatgttttcattgcagctgtgaaagaaaatatagcataagtgttgcagttgccaaacagatttggatggaactgctacagtcctgtaagcatgctagaaggacgagttcttagttgtctaaccatgtttcaagtaaaaacttgtgcactctgtttcagattattttaaataaaaaatagaactggaggcatagcctttttgttaaaaagaaaagagacatgaaatttggtaaaacaaatttcaacctgcatccaaaccagggtatgaaaccgtgctggcgatttctgaagaccgaaagattttcaaaacatgaaatcgattattttgaatttactgttcttgaccaaaaaaaccaccaataaccagaagtattaagaccaaatattagaaaaaggcatataactgaaaagactacaaagtgggaggaaagataatttcaccttatcatcaactttggcatcaaattcttcaacaaggtgtgcgtctctaagcctatgcagtacctggagaaaaggtgtcgcggtaacacccaaataagtgcaaccataaagtgtataacacaaacaggaagtgattacaaacaaactcaaatttctccatgctctatgcccaaatgtcatcctgtaattgagatcattttttatgtctgacacgacaagaacctataggaaatagttactgaaggttagaaaactggaaaaatgaaaaagaacaccgaacaaatgaacagaacaattgacccttccactagcttcttcgagtttgtcacaaatggctttcattgctggaagataatcatggatagatacatcattatcggagtttacaccaaaagtcccatcttgtagatcatctatgttggtctcttcattgctcaccaatagtccgggctttataatctcaattctctggtgtgaattcatacagtctttggcatatctagtgagatacaatgagttggtattggttactcgtttattctgtgaagcatcttccttctcagctccattgcctttaaactttataatagttgatcgtctaacaattaacttctgggactgaaggctttgcacaatataatggaagttgttcccttccatgccaaaacttttgcacaggtcattttgtgttacaccagaagtcctatgacaaatacatgatataagttattgcacacattatatcaaaggcactatacttagttagtctatgaacgtttgataatttgaccaaatgtcacacctgacacaccagatgataatttgatcaaatgtcacattgggtagatgttgtgaccaaatgccacaacagatgataatttagaccaaaaatgtcacaaaaccaggacgaacctgcttgccccgacacgttgtaaagccttcttctggacggcactcatctccgatttggagtgcctgagatcatacatgccaaggaagttgtccctgagcgcggcgctcgcaaccagccgcatgcccagccgctcggcgtcctccacgccgaccttgggatcgtcgacgaccggcccctccgcctccgcctccgcctcccccagcacgacgctgatgacggggagcacgatgaggcgggcccagacggcgcgcttgacagccggcccaattgggaggccggccgcctcgagcgcgccacggagcgccgcccagagatcggtcaccgggatgccggccgagaggcgggcgctcacctcctccagcgccgccgagacgagcgcgtccatcggctaccttccgctagggttttagctctagccgcatcggctaccttcggctctccacgagacgggaagagaggattgcttcgctatgggctatggcgagtcggcgaggtggaggcagcgcgcgacgatggccgcgcggcggcgccgcgcgcgcgaccgacggcgagatgaaccggtgttccgtgcggttcaggcgtgccacgttcacgcgctgttttgcgaataggcccttgaatttaaacaaaagtagtttccgtgttcttaactttttattgtagtccctatatgtccgctcgattttatttttatgttttgagttttgattttttaattttaaaataatcattctaaaacttattttaaaaatacttcttttaaccacatcaatcagtgggactaacatagcaaaacatcgctgccacactcatctaaggtagggatgaaaacggtcggaacgatcggaaaacagcctcaaccatttccgtaaccatatttttcttggaaacgaaattggaaacgataaagtcggaaacaaaaacgatatcggaaatatcggaaaaccggaaacggaacaatacggacggaaacatgtcggtacagatcggaaaccggtaacaaatacggaaacattaaactataaaaacatatatttaactttacataagtatgttatatatatatatacataaattcaagcttatactatataaattataaattaacttcattttagccatgtacaaaagttagagattttattgaagagtcattcaatctataagctgtgggttaagtatagacatgtcctataatatcgacatatttagaatacggtaattaccatattataagaaacggtaatttccgcgagaatacggtaaatacggaaacgatcggtataacagcaaaaccatttccgttttcatttccatattttttaccatttccatttttgtttcggtcgattaccatttccatatggctcggccggtagaaagtcgaaaacgaacgccggtcggccggtaattaccgttaccgttttcacccctaatctaaggccccgtttgatagatttacaactcctaaatttaactaccggagataagatctgaagtgaattgtagagtagcataacccaattccacctatctatttttttttataacgctccagctagctctattccgactttaggtggagttagagtcagagtagtgtcaaacaagacttaaatgaagtggcagcgttatttgatcacgccatgttaactaacgtgacaaaataaaactatcatgtccactacgggtgatgtaattttgtcatgctactgttttagaatgaatctctatctccactaatataaaaattaaagatatttttatcggtactttagtacgtcatccgtgtataagtcagttttaaggtcattcgcttatttaagtgagtttttaagttcgttcgcttttgaaaatattggagcgtataagaaatctcttttaaaatactcgcatgctaacttgagacgttcggactcctaattacagctcatgattttgtaaaaaaaaatattcaaggtaaattttaccttagctaaaccgtacaacaataataataaagattaaaatagtcttcgcccgttacaacacaccggcgttcttttctagttatttgaaaattaaaaagtaaaaaaaaaagttgaaataaattttatccgctccccaccaagccagccagccccactgcccgacggcacccggccgccgccgccgccgcctcctcgactcctccgccccgccgcgtcgcacccgacgaccggaccgccgtctccgcctgccgcccgcacggccgcacccggtgagtggctggatggatcctgtttagttctttgcttcctcggtatttgagtgaaaattttgttctttgatgggtttgggcgcgcgatttggtgggaggtgaactcttctagattctccactgctgccgaaattaagctgtgatcgatgttcatggtactctagaatgatacgcgagatgttagggtctaggttccccattgctgccaaattttagttgtgattgatgtccatggaactctagaatgatacacgtgagatgttagggttgtgcgattgcgcaaaactagttgtgtttgggcatattgtggatctgatgcagcaggtcataagactgagtgtgtgtgatctggaagcactcctcattctttttagtcttgcatatgctactgccgcttggttctgtgcttcactactgagtactatgcccattcatgtctattttcctgttgttgaaattaattaagctacatttgtggccagtcaaaactgctcaactggttgacttctaaatgatacagtttcttttttatcatagcactgtgttgatttcgtttattggatccctcggattgcaaaatgcttgccaaagggaggaaagttgctggaaggggtggagacatgtctgcacactatgcatttgggctgcaggaagatgatgcgatcattaaacgtaggcttctgaccaggacaacaactaccaggggtgaaccaccactaaagaagcttcagaagaagttcatgtcctttgccactgaggttgagaaggatgctgacaacataagtgactgtgagaggttgtacaaggcctttttacaggaaattaatgcttttgtgttgcctcttcttaagagcaaggccgtggttgatgcaaaccttagggagaaggagagcttcaacgagctgcaagacgagattcagcgacaaatcttgcaagctcagactgatattgaggaactcaaaaagaaactggaacagagcagaattgagaggctgtacaaagaggagtgcgaagcgatcagaaaaatgatttctttgcagcctccacgatcggaaacagagaagctcatcgcgggtcttgagaaggagattgctaatttggaggccgagaatacagcatgtataaggactctggaactaaggaagaagcagctttctcttcttcttcatgtggtgagtttattcgtcaggttccttttgcttttctgaatcatgccttttccctttctatatagagtggtaagaggatactcattggaatttattaatctgcatggtaagcttaaatgatatactacttttacaaacattgtttcccgcaagaccgcaacacaaaactacgtttaggaaaaatat

SEQ ID NO: 27390 - DNA, 805 bp, Oryza sativa
tacatccaaacatatgtacatagccgaatgttatgtatgttagattatgatatactcccactatttaattaaacaaaaatcaatattgtaatatgtaagtacttagaataacataatgaaagctatgagctttcgcgtacaaatgaatgaataaataaataagtctcattttttaagcaatatgctagctcttgatttgtttacttaaagccatgttcttgtggtggttgacgacagtatgtttacgaaaaagagagaaggggagactacttgggtcagactgttcaggtgccaaccacttctcctcaattcttcttaatttgtttttcaatttttggtaaatttaatatctacatttcttgaaaatccaaccaatcatcatttttttaaggttatcccacatattacaaatgagatacaagattggattgagcgtatcgcgatggttcccgttgatggtgaggtggatcctgccgatgtctatataatagagctcggtggcactataggtaacaagagacaattaaccagctgcattttattcttaacaaattcttagagttacataaatttttggacttacaagtcaatttaaaagctatatatcatgtctttattttcagtttattaacagtatttgttcgacactatgctgcaggcgatattgaatccacgcaatttattgaagcctttagtcaattctcctatcgtgttggtaaataaattgaattattgcataacagatattttaattttctccatggtgatatgataaccttatttgcatgttatttttggacaggtg

SEQ ID NO: 27391 - DNA, 1107 bp, Oryza sativa
cccacgattaccataattcttaaatttattactgctattaaattggttcattaaagttcaagttgcttaggcaaataaaataagacaggctccgacacagttatgccacacaccggcataaccatgccccacacgactcaacaagaagacaaacgaggaagaacacacgcgcaagcctactaactgctcgtctactgctgcgacgggccagggcggaaggtgagcaacagcgcatcctccgtgctaccaacgccggaggcttccccctcctggggaaccacgggcgcgggctcggcacgaggggtctcgacgaagcaggtccacgccagggactgacgaacaagctcaggcctggaggtgctcttgcgggcggtgatcttctggctgcggcagacgcggcgacgcttggggcggcagacctctccctgggcgatcttgagctgatgcagctgcgcctccaccgcgtcgaggtccttcttgagctgcaggttctcctggcgcagctccaggatcttcatgttgttctcgaccataccgcggcgcaccatctgatggaagtcgatacgagccgcgtcgtacgcctccaccatgcgtgccaggtgcacgatggtagcgtcatcctccgagctagcatcccggaaggtggcgtagtcgcgggctcctccgcgacgagggtggtagcggtagggcgagtgctgcaactcgtccgggtagcgctggtgaagggtgccgatggcgaggagagcggcgctctggcaagcggcggggaaggagtctccacccgcggtgactgccaacgaagcccgctcagaagagccggcgaggatcactgcggtgacctcccacccagcgtggggctccgcgtcgtctccctcctgatccggaagcggcctggcctggtagtccactccgtgtggataccccaagaccacgcacatgcctcgcaactccaagacgaagcagtcatgtccaaaccatgacgggtgacgctgccggccatctacaaacaaaaacaaaaagagaaacaacattttaaaggtcagattttgatgataagtgaagcagcaagacagagagagactagacagttttcacaaataacaaagg

SEQ ID NO: 27392 - DNA, 1232 bp, Oryza sativa
gaggtgtacatctttacccacaagacacatctttctcacgtgcaaccacgtgccacataccaccacggtatacagacgaaagacgtgacatagtttccaacccatcctagccatagacaagagtaccgacccaatcccgcctacggccggaacccccgggacaggcaggcagaactgagcccctcgcagcagggcaccaaccctgtgccatgacatctcgactaccgggccgcagctcgtgtagccttcatttgccctggagaatgtccatcgacccccgacttcatccatctccaatccgtgtacttttgtttataactagactgagccacaaactaagccttacccactagacatgtggaagtacggtagtgctttgcaacagaggcccgaagaccggtccttatatggccgaggtgctactatcaaaaccatgcaccccgagcccagcctaaaaccattttgggggcttttgaatagagggagcggtgtgaatccaattccacaataaaccaacaattccaaagtgcccaggtgatatgaatattcccaaagtctaaagttgtaaaaccacctaatgttacctaattaaattgcgaagcatctacctaaaatcatactagtgataccacgagtagagtgtccactagttggggttttgtttaatctagggtgaacaaggtaataataacaatagcaataataataaggtcataacaaaggtaaataggcatggctaaataaaacagtgataacgcgggaatttaaataaagcgataatgcaataatttaaatcaacataagtttataaactgggattcaatatgatcaagatgatgtgtcttgccttgctcgctttcccaaacaccgtcttcaacttccacgaagagcggatcttccgaagctacagcgtctacacgaccaacggaaaagaaaaggctcaaactgtcacgtcctgataaattcatcccaaaataaaaatcattttcaaaaaggaataatagaattaattaaaattcgaaaagaaattggcaaaccctaaaatacgtacaagaaaaattcaaatgtggcccggagaatttttgttaaattctccttggtctaaaaggagccctcaaattttagtggaattttcagagcacaaataataattgaaaagaaataaacaaagttgaaaaggtttataaaaagaaaaatccctaaaagtcttttttcccccccccttccttctt

SEQ ID NO: 27393 - DNA, 4014 bp, Oryza sativa
atgtcatatggcagagggttggtcccctgctgttaggggctcagtcctgcatgcctgtcccgggtgttccggccgtaggcgggattgggtcggtactcttgtctatggctaggatgggttggaaactatgtcacgtcttccgtctgtacaccgtggtggtatgtggcacgtggttacacgtgaggaagatgtgtcttgtgggtaaagatgtacccctctgatcagagtataatctattcgaatagccgcgccctcggttatgggcaagccgagcaatgtacccaagtcagtgtttcaattcttaaaatttgctcaacaactaaaatgtggaatggttggcctgggttggcttgggacgagctgggacccagggtcgggttgccagttcggtctgaatcatcgtaggccttgggttaaggcaggttcgtgagggttcacggccttgtttaataatactgtgtagctctaggattgtcttataaaatggctttggggcaactaagtgacttttaaatgctgtttactgcaaaacttaacccctatattattatccccttgtactcccttgcattaattatgcatctccggtgtggcttgctgagtactgtggttgtacttattcttgctcaatctttcccctcttcagtaagagaagctttggagaagatgtcttaggtggagtcctggcttataccccagttgagcgcctgtgaagattgagccgtaggcccgctagtccgctgctgtttatttttgattgtcaggccttaagtgcctttgtaataatgtaaatattatcgatataataaagatgtgtcttttataccatgtttgtgtggtgtaccccggcttttcctgggacggggattaatacactagcgttcgggaaaaggcaattttcccggtcgcgacacaaacactaataaattccacataacagcagaaacaaagcacaaaaatgggttcttcacttcttaaggaaaaattagagacttgaacggtccaattccgagttcaaatggccaagttatggccatttgaagtttatatgctctttaaatggatatttgcgaatttcttcatttaaattttaatttaaaaatcgaattattgcgtcagccgagagagagggcgcgcggaccgggtccacgggagtggggcccacgcgtcagcctctcggtccacggtggaccgggagcacgcggctggcggcggtcggcgccgtgggtcccacaagtcagccgcacccgcgggcgcgggcggctgacggccgggccccacctggcagccgcgggaggcggccgaaggcggcctcgccggcacggccgacgggaggcggcgcacccgctccccgatggtcaccgccggcgaccaccggcgcggcggagcggcgcccgagagagcggagagaagagggaaagcgaacggcggtcctcggctcaccccgggacgacgagggcggcggaaacgacgaccgaagcggcgagaggcggcggcgcggttcgggatgacgagggcgacggtgctccggcagtcggcgggcgaaacggaggagcggacggggtcgacgacgacgcggcgaagccgatggaggtggcgccgagtcgggaggaagtccggagtgacgacggcggcgaaccgaaggttggcggcgacggcggagagagaggaggacggcgctagcacgaatccgacggcgagagcgagcggcgagcggcggaaacggaggagagaggcacggggagcaaatatatagcgccgagagggggagagcgcggccggagagggaggaaacggccgcggagatctcggctccattgaagacaccggcgacgattgcgggattcaaatcggacgaatccgagggagagagagagggaaaagagggggaaacgggagagggaatcacggggagtgatttccccctctttaatgcgcgcggggacggcgggatgcggcggaatccgcggcggcggcggcgctagggcacgggcgggcggcggcgcggcgcgaggaggaagatgacaggcgggacccacccgtcagcgagggtggcgggcgggcccacccgtcagcggcgcgcgcgcggggaggagccgatgggccgcggggagaggagagaggggggggagttgggccgagccggcccaagaagggaaaaggggaggaaaaggacttcttttagggttttctttttttataaaccttttcaactttgtttatttcttctcaattattatttgtgctctgaaaattccactaaaatttgtttaagcattttaggcttttaggaaatatacaaaaatcctccaagcctcatttgacttttacatttgcacattttaattgttggaggctttcacatgaattttaattattctttgcacaatttcgaggatagattttagagtcgatttgggacgcgacacaagctaacacaacgatctaagacaacgacttaacaagtcattctagttcttccgagcataggaggtcgattgaaggctcgttcggctcatcttcctcatctttgatagctacccactcaaacttggaattgttgcgcttgggttcttcttcttcatcactacttatgatgatgaccggaggatttgctggggcaacttctttctccaccacgcggacctttggcgccaattgatagcgagggacaaacaaagctctcttccttgcggtaagacgaatcctagccttctgcggcggtgcttctcccttcaatgcggctaattccttctccaaacgatccaccttgtcttctagcttgcaaatcttaccacgattccgatcttcacgatcttgagctgctaacacagtctccgcacgactttcatccatagcccacaacatctcaaccaaatgtcttgtggtaacatcattctcaattccttcagtctcaaggtaactgccacggtcacttccctggggttggcgaggatgatagcgatactcagtgtcggccaactgatcactgtagcgatcacgaagctctcctatggcaatccttgccacctcctgacatgcatggatgtagtttcttcctccagcttcaaacatcactgaggggatatcttcactattgctgttcaaggtgactttgactcggcacttttcttcatgacgatcatgacgaatctgggcataaaaaggagcattcccaaatccaatgacaaaggacatcgtacgcaactcctggacaaaaccttcaactccaaacaggtactcaggcttgtaacacggcatctaaagacaagtgaaaggagagagttaagacatctatccaattaatagcacaagtttttggattaatttgaataaagtttgaaaatcaaagtaaaaaggtaagtaattaaagtaaaccaagctttgcgaaataaattaaaacagttggaaacgagatcataaattttgtaattttgaataactggtttcaaaagaaatgaaagaaaattataaaatcaacatggtaaatttattttattgcagcaagattaaataaaacaatattgtaaaacttttgctgataaatgagccattagtacagtaatagatgtacagtactaataacactggaataaatttttaatgagaaccaaaaaaaaattatgaagtgcatgtgccattagtttggttaattaaaagagaaagggaggagaacagttctacttttccaatatttttagagggcttctatgggtaaccatttggcataacctagggtcaaagaggctctgataccaacttgtcacgcccggaatttctatccaaaattccaaacgcttacatgtgtgtgaaccctcgtccaggaatcagccgaggcacacaataacaaattgataatagagtacaaatattactctaattaataagcgaatagaatgtcattacagaggtagatagttcctctcaatcaataaagttctaagcagcggaaaataaataaacggggtagacggcttcactccacaggcagcttgaccaaggctacacctaatc

SEQ ID NO: 27394 - DNA, 5879 bp, Oryza sativa
caatccctagccagggggatcctcctcgcatcagcagcatcagcagcagcagcaacgtcgcccagcgcaccgacctcaattcgtggtgcgcgtcccacagccgcagcagcatcagaatcagcaagggactcgtgcgccccgtcctcatacgccagctgtgcagcccgttcaaggccgcagggacgctcaaggtcagcagcgtctgtgcttcaactgcttcgagcccgggcactttgcggataaatgcccaaagccaaggcgtcagcaaggccaagcgcctccccgctccaacaacggcgggaaggatgtctgtcacgcccggaatttctatccaaaattccaaacgcttacatgtgtgtgaaccctcgtccaggaatcagccgaggcacacaataacaaattgataatagagtacaaatattactctaattaataagcgaatagaatgtcattacagaggtagatagttcctctcaatcaataaagttctaagcagcggaaaataaataaacggcgtagacggctccactccacaggcagcttgaccaaggctacacctaatcctccacaccatcagcctcattgtagaactcttcctctgatgaatgattgcaaggtgagtatatgacatactcagcaagccacgcagcaaatatgcaagtgcacaggataacaaaggatggcataatagggtttcatttgcaaaagcagcatttagcaaacatttgagaatttaacaaaacagttaagtaattaaacaatattaagccaacgctatacaacataccctgttgtataggcccaaccattctgaacaaccaccccggctgcacagttctatctccaaaccaggaatgtaccattccaaaccaggagctaatcaaattattaccagttatagcatcttttataatgatgagaggtgtgagactaatcacgaaagacattgttagacccgcccataaccgcgggcacggctattcgaatagttttactctgatcagaggtgtaccactgtacccacaagacacaaccccacatcatgtcaccatgtgcctcaataccaccacggtatctcggaaaggagttgtgacaatacccctcgcataacacaattcactgcagcgcaccttcctggatcataatcacccccttataaacaaggcatggactccccagcgacccccgtgggcttatctccgccacttctcagtctggtgccccgcaatgaaccatgctatacaaaagataaagccgttgcccatgctggcttgtggttggcacgataaatgtttcacaaccgaaactcgtgaaccggtccttaattgtcatgagcacgaccatcaaaaccatgtgctcacaacccaccattaccaggttttagttggcacaataattaattaactaatcacgattgaccatcgtgaactatcaataagccatcatgaaataatagtgaatcattagttatcccataagtgtactaatgtttctaagcagggctaagcaattatatctaatatctagttgaaccaatataaataaagctcaactagtcaaattaatataacccaaggtatcaaggaataaggtaatcaagtacgaaagggccataacaaagaataggtcaattccacccaatgacattcgaaaatagatgcaatagttgaatagaaacaatagctttaaataggatcaacatgctcaaagggttgtttgggatctgtgtgacttgccttgctggccttggaactcttcaaactcttcttccgcgaaaacggactctccggaaacgacggaatctaagcagaaaagagcaaaatcaccaaaacagcacataaacaagcatgaacagtacatgtggatatttttaatgtgtagatctcaattttagaaaaatttagagacttgaaccaactaaatcggagctaagatgaattagttatgaatttttaaagattaaatcggattaaaacacttaaatcggtttaaattgaattatgacgcaataatgaattatttttgaaaaggaaaaggggatttattgcgtcagcgggctagggtttggtggaccggcgcatgggcggcggttcacgctaacggacggccgagattgatccgatccaaatcggacggctgagattgatcgagtccacggcggttcacggcggacggccttgatgacgccagcaatgacgtcaccgacggcggcggcggctcggctaggcagacggctcgggcggcgcacgctcaccggcgaacggcggcgctacggcacgaacggaggacaccaacgggtagcggacggcacggcgaacacaccgacgaccaaaacgacggcggagaagcaacggacggcgacggcgacgagaaggaagcggcggctaccttcgggttgtcgacggcgacgaagctccagcgggttccgacggctgcgaaggggcggacgaggacggcggcgacttggcgatgacgacggcggtcttcccgagcggcggcgacagctggagcgacggcggagcacggctgaagcggcggcggcgacggcgaagctagggcacacggcgctagagctactccggcgacgagaggcgaaggcgagggctgcgacgggtagaggagacaccgggggtccttttaaaggggctcggaggcggcggcgaaggcccacggcgacggcaacggcgaaggaaactcgcggcttggaaagagggaaaaccgatccgaatcgaactcgattccaaagctttccaaagcgatttaaccaaagattccaaaggagaaaaggtagaggagatcccggagatcatttcccctctattgattcggccggagaaggaaagaggcggccggatttggaaagcggcggcgacggcagctcggcggcgcgaaactagggtttcggcccgaggaagacgacgactgacgggtgggccccacctgtcagcggccgaacgcgcgcgcgcggctgcggactgggccggctgggccgaggagagagagaagagaggttttgggccgactttcggcccaaagccaaaagaagactttttaaaacctttttcaattaaaattatttcttaaatgcaattccatttattaaaaatactttcttagctcaaataaatcccagaaaaatctaggaattatagaattaagcaaagtatttaatgaaattttatctggcccaattttatattggaatttattaattaaacatagattttcttttcaagacttttaaaattatttctaaaaattccatttaaacaacaatttatatattttgaattttcagggtgtgacaatgtcattcggggccgtgtgaatcatgtgacggccgaggacgtgctgacaactccagacgtcatcgttggtacgttcctcgttcattccatccctgctacaattttgtttgactctggagcttcccactcgtttatatctgtgcgattcgtggggagaaatcagttgggggtagaaaggcttagaaaccctctgctcatcaccacccctggaggggttatgacagcaaagtattatagccctgccgtccctatagaaattcaggggattccttttccctcggatctgattctgctagacaccaagaacttggatgtgattcttgggatgaattggttggcacaattccaaggagtagtggattgcgcgagacgcactgttactctgtaccgagggccagaacaaccggttgttttctttgcacccccaacctctgtcagaagttcagaacttcatcagatagaactgtcagaaattcccatcgtcagagagttcggagacgtgtttccggaagaactacccggtatgccgcctaagcgagagattgagttccgaatagatcttgctccaggaaccactcctctgcacaagcgaccctaccgtatggcagcaaatgaactagccgaagtaaagaaacagctggaagagttgaaagaaaaggggtacatacgtccgagtacttccccatggggtgctcctgtgatttttgtagagaagaaagacaagacgaagaggatgtgcgttgactacagagctctcaatgaagtcaccatcaaaaacaagtaccctcttccccggatcgatgatctgttcgatcagctcaaaggtgccactgtattctccaagattgatctccgttccggatatcaccaattacgtattcgtgaagaagatattccgaagaccgcattcaccacgcgatacgggctgtatgaattcacggtgatgtcgttcggtttgaccaatgcgcctgccttcttcatgaacttaatgaataaagtgttcatggaatacttggataagtttgttgtggttttcattgatgacattctgatatactcacaaccagaggaagaccatcagcaccatctccgtctggtgttgggaaagttgcgggaacatcaattgtatgccaagcttagcaagtgtgagttctggttgtccgaagtcaaattcttagggcacgtgatatctgctaaaggagttgctgtggatcccgaaacagtgaccgccgtcaccgattggaagcaacccaagacagtcactcaaattcgcagtttcttaggtttggcaggatactaccggaggttcatcgagaacttctccaaaatcgctcgacccatgacacagttgttgaagaaagaagagaaatttgtgtggagcccgcaatgcgagaaggcgtttcaaactctcaaggaaaagctggtttcctcgccagtgttaatcttgccggatacccgcaaggacttcatggtgtattgtgatgcttcgcgccaaggattggggtgcgtgctcatgcaggatggtcatgtggtagcctatgcctcacgtcagctacgacctcatgaaggcaactaccctacacatgacttggaattagccgcagtagttcatgctctaaaaatctggcggcactatctcattgggaatcgctgtgaaatctataccgaccataagagtctgaaatacatcttcactcagtcggacctgaatcttcggcaaaggagatggttagaactcatcaaggattatgatgtgggaattcactatcatcctggtaaggccaacgtggttgccgacgctctaagtcgaaagagtcattgcaacactcttaacgtccgtggcattccacccgaacttagtcaacaaatggaagccctgaacctaagcatagttggtcgtggattcttggctgcgttggaagccaagcctaccttgctcgatcaaatccgcgaggctcagaagaatgatccggacatgcatggactcctcaagaatatgaaacagggtaaagccgctggtttcacagaggatgaacacggaaccctatggaacggaaatcgggtatgcgttccagatagcagagaacttaaacagctgatacttcaggaagctcacgaaagtccttattcaatccaccctggcagtaccaagatgtacttagacttgaaggagaaatactggtgggttagcatgaagcgggaaattgcagagttcgtggctctgtgtgatgtgtgccagcgtgtcaaggcagagcaccagcgaccggccggactcctccaacctctccaagtgccagaatggaaatgggatgaaattgggatggatttcatcaccggacttccaaaaacccaaggcggatatgattctatatgggtagttgtggatcggttaaccaaggtggctcgattcattcctgtgaagaccacctatggagggaacaaactagcggagctctacttcgctaggatcgtgagtctccatggtattcccaagaaaatcgtatctgataggggaagccaattcacctctcacttttggaagaagctccaagaagagcttggtacccgatt

SEQ ID NO: 27395 - DNA, 1579 bp, Oryza sativa
cagctcggcggcgcgaaactagggtttcggcccgaggaagaggacgactgacgggtgggccccacctgtcaggggccgaacgcgcgcgcgcggctgcggactgggccggctgggccgaggagagagagaagagaggttttgggccgactttcggcccaaagccaaaagaagactttttaaaacctttttcaattaaaattatttcttaaatgcaattccatttattaaaaatactttcttagctcaaataaatcccagaaaaatctaggaattatagaattaagcaaagtatttaatgaaattttatctggcccaattttatattggaatttattaattaaacatagattttcttttcaagacttttaaaattatttctaaaaattccatttaaacaacaatttatatattttgaattttcagggtgtgacaaacctaccccccttaaacagaatctcgtcctcgagattcggaagaactggcgaacagaagcggatgagctgactttaattcatcttctcgttcccaagttgattcttcttccgagtgattactccattgaactttgcagaaacggataactcgattcctggttcttctctcatttgtttccagtatacggattggtttctcaacataagtcaaatcctcttggacttctatctggtcaatattagcttcttcggtaggtacccttaaacactttttcaattgcgacacatggaacacattatggactcctgccaaggattgaggtaactccaactgataagcaacctctcctcttctgctgacaatcttataaggtcccacaaaacgcggtgccaattttcctttggtctgaaaacgatgaactcctcgaagaggcgtgacacgaagatacacataatctccttcttcaaaactcaaatctctgcggcgattgtcggcataactcttatgacgagattgagccactcgcaatctttcttgaatgatctttaccttttcttctgcttcccttaggatatccgtcccgaaaacctgacgttctcccgtttgatcccacaaaagcggagtgcggcacttccgaccatacagtgcttcgtaaggagccatctgtagactagcttgataactgttgttgtacgaaaattctgcatagggtagattcttatcccaacttccaccgaaatctagagcacaagctctcaacatgtcttccaaaatttgattcaccctttcggtttgtccgtctgtctgcggatgataagcagtactaaagttcaacttagaacccatctcttcctgaagtttcttccaaaaatttgaagtaaactgactgcctcaatcagacacaatcttcttagggacgccatgcaaacacacaatccttgccatatacaattccgccaagcgacttccagaataggttgtctttaccggaatgaaatgagccactttggtaagtctgtcgactatcacccaaatagagtcatggcccgatgacgttctgggcaaaccagtgataaaatccatacctatttcttcccatttccattcaggaatcttcaaaggttgcaacaaaccgggctgcagg

SEQ ID NO: 27396 - DNA, 1159 bp, Oryza sativa
gtgcagtgcagtgatgaagagaaagtcatcttcgccgcccaccagctgcagggacccgcatctctatggtgggaccacttccaagctacgcagccagagggacagcctattacatgggctcgcttcaccgccgctttccggagaacccatgtgctcgccggagtcgtggccctcaagaaaagggaattccgagagttgaagcaaggcaaccgctccgtgatggagtatttgcatgagttcaacaacctggcccgttacgctccggaggatgtgcgggaagatgaggagaagcaagagaagttcctggcaggaatggaccccgagctgtccgtccgtctagtctctggggactatccggatttccaacgtctggtggacaagagcatccgcttggaagccaagcacaaggaactggagtcgcacaagcgccgcttggcgaatttccgcaatcaacagggtgctaaccaaagggtccgctacaccaatccctatccagggggatcctcctcgcagcagcaacaacagcagcagcaacctcgctccgcgcctcgacctcaattcgtggtgcgcgtcccacagccgcagcagcagcagaatcaacaagggactcgtgcgccccgtcctcctacgccagccgtgcagcctggtcaaggccacagggacgctcaaggtcagcagcgtctgtgcttcaactgctttgagcccgggcactttgcggataaatgcccgaagccaaggcgtcagcaaggccaagcgcctccccgctccaacaacggtggcaaggacgtcattcggggtcgtgtgaatcacgtgacggccgaggacgtgctgacaactccagacgtcatcgttggtacgttcctcgttcattccatccctgctaccattttgttcgactctggagcttcccactcgtttatatctgtgccattcgtggggagaaatcagttgggggtagaaaggcttaggaaccctctgctcatcaccacccctggaggggttatgacagcaaagtattatagccctgccgtccctatagaaattcaggggattccttttccctcggatctgattctgctagacaccaagaagttggatgtgatccttgggatgaattggttggctcaattccaaggagtagtggtttgcgcgagacgca

SEQ ID NO: 27397 - DNA, 1072 bp, Oryza sativa
attggcattctcttttttttttttcctcctatttggttcatatatagtttcactcatagttccatactaattgcattgactactgtatattttccccctgcaggtcttgcgtggacagtgcggacgtggtttcttacatacatgaccgtttatcggtggtgagtcttttctttccctcagtttgtcttcttggcaggacaagatatcttagtggtgttaatcatgctatctgttctaggaaatgacttcaatcaagcaatgtaaatatcctgattttctcttttcttttaaaaaaaaactgtgtaagccctaaacctcacaaaaccatttgttagtttagcactgaatatgcatgcctggctgacaaactgccatctgctttgacttcgattctttcgctgttaaaactgctgttaccaataatgctgtgaccaattaatattgctatgcaggagggtgcagagctgcgtgtcatctgtgaggaggttgttgagttcggcttggcatcgggcgagaacactaccgtcatcctggttcagttcaagcccggcgccttccagtaccagctggtggatcccgctggatttggcactgccgtctctaacattgccagcaccagtgctgcgccggctggtgccagcgacacaagcgacgagggcgtcgatgacgctgccactgccaggcccaccgttatgggctacgacgcggactccagcaccggcagcgccgatgccacggtcgacagcgacgaggtcgatcccaacgccacggctgacagctacaatcccagggggcacgctgagatcgttgccagccacaccgacgacgaggtctacaccagcggcagtgccagggttgagagcggcgagctcgccgtccccactcccagcgccaacaacaccgtcgcggatgatgtcaaggtcgacgccgctgtcgtcgccggcggcagtaccaccgccatggctgctgacgaagccaccgtggtgtcgttgttgtcgaccatcgtggataactactactccattaacaccagcgaggagccagcgaggaggttgatcccactgccactgtc

SEQ ID NO: 27398 - DNA, 2520 bp, Oryza sativa
ccattttgaatctctatacatgctgggtatgaactacttctctgttcccgattcgggatcaacaaacaaaactgtcctgatagtcctagatagcagcaatagcttcaaaggttcagagcgaacgaaaataattttcaatagtgctggcacatgttttttcagaaacatcgagtggtctcaagtctcaactcttcaaatcgaacaactgctttcttggatccacatcaacaaaataggatgtctacggtctacctaccaagatcagcgctagtatctacttcctccgtttcacaatgtaagttattttaacatttctcacatttatactgatatgaatgaatctagatatatatatctatctagattcattaacatcaatataaatgcggaaaatgctagaatgacttatattgtgaaacggagggagtacttccttgtcaaatcttcgtgccggtgtggaggccgacaccagcagagggaggtgacaagtggtggcgcgggcgtagagcacgggagtataggggatgtgccaccgtcgatccgtcgtgccggaaggtggatggaaaaaggaaggaggcgcggccgtcgcgccggctcgaagtacgcgaaaaaggaggaggaggagggagcgtcgtgccatgcgggctgtaggcattttgtgcctgaaatcggcccatggtctgaagtaggccgtagcgggctgcttcttgggtcacggttactctttcagctcggcaacagcaatagactcactcactcacactcacggtcacaccgatttctccctaggcgaccataccggaaaacccgcgactccccaactccgacgagaacgacatggacgccggcggcgaggaggcgaagcaggagcgccacctggtgctggctcacgagctcttcctcctctcccgccccgacctcgacgacctcgccaatgtcgccctccgctccgatgccctcgacgccgtcaagtccgatggcatggcgccgctgttcgagtcgctggccaccgcgggcgtgctgctcaagccggacgacgcagctgctcgccgagatgcgcgcgcggatcgacgaggaggtccgcaagctcgacgagaagtgagtggattcttcctctcttcgattttatttctagccccacaaaaaagaggtcgcccgttgctgtgttgcgtatgcctgcagtagtactatgtggggataggttttgtgataaataactctggtgttgatatgatccgtttgcctaaactaacctagcttgctctcggtgcggaacatggatgctaaagctggtagacagtggcgaagctagagcaaaatggaggggggttcgagattttgccacaagtatatcaatatatataacttcaagctacattttcgatagaaccgttgattaataattttttacatcaacagtagagacacacatgcatcaataaaataaaaaaagtgacaaacattgtttttcaaaattaagaaatccactaataacattgataattgagaattggttactaacccatgagcaaaagatgatctgcatatgcaaacataagcaaacaccattctatttcattatctcaacatcctcgacgatgatttgataacctaaaacaagttaacatcaaaatcagttctcatttttcaaataaaaagtagaatccagcgcacttagatacaatcattaccttcaatcatcatcaaatatgcgtccttgcattttcatgaagcgacgaacaacggcctcattggtgactttcttcatttcttctttctccacataacaaataaggctatcacttaagtactcatcaccaattttattgcacaaatatgttttcacattcttcatagctgaaaagcacctctcaactgtggcagtagcgacgggcaatacaagtacaagttttaaaagttgataaaccaatggataacaaagatgttttcttgtctccaccattatttgagaaagctcggcaatagtttgtatgttggagaatctaccatcatccctcacatcagcgatgtagagaccaagttggtggctaaggtccctcaaatttccagaattaaaatcactaggatacaattttgctaaactcatcaaattctctagattgaaatcatgaaatgagtctcttggactaaaagccgatgagcaaataagcaattgagagcttgtctcactgaagcgattgtcaagctcttgaagtatccaatcaataacatcattaaacaatccacttgatagtaatgcttgtttgtaattctagatttgtgcctacgcttcttgggatcaatatatgtatcttccatttccaatttgacaatatatacttgtcacaaaagtcagagacttcatctagaactttctcccacttttctcttctaagctcatccaaattgagcctagttgactttacacatttcatagcattcactatgtcttgatccttccgttgcaatgctagtgacaagctgtttgtgattgttaatatagtcaacatgagggctgca

SEQ ID NO: 27399 - DNA, 3551 bp, Oryza sativa
agagttttatagtgggaactccatcgagtatccccaggtctctgaagacattgctcttgattcaacccggttctagtttgaagttgcccacaacccaatgccttactcatttctgtaacattaatatctctaatcaaatcccttctcttagatgatccacccaccacattcagtaagatggaaatcttagtaaaaaaatcactaacgcctttatgttttctcacaatagccacaagaacctattggagttggtgagcaaaacagtgaacataataagctgaactattttccctcatgatcaatgattgcaaaccattgaactcacctcacatattgctagcaccgtcatatccttgccctctaacttgctttagacttagcttcagttctgcaaatagagcatcaatagaagacttgagataggcagaagttgtttcagtcacatggacaagaccaacaaatctctctctcacaattccatatttatcaacatatctcaagaccactgccatttgttctttgcaagaaacatctcttgattcatcaactagcaagcaaaaaacatcatgcccaatttcttctagaatagcatgtagcacttcctttgcaaaacatttcacaatatccctctgtatttcaggagcaaccaaaagactgttatctgatttttttgtacctattgcctttcttaaggatgggttttgctccgctgtgtaatcacgaaattccctgaagttgcctctgttgtagggctcctttgactcatcgtgacctcggaaaggcaatcctagctttactagcatcctagcaacatcaatggacccattcaatcgagtaagatagtccctcttaccagtttctctcacactatgaaaagcaacatcaatgtgctgtctttttttgtaataaatcatcacacttcttcattgcttgatagtgtgaaccaccgacatcacctacatgcaatttcaacctttcttttctatgaaaaccattccaaccatttttaacaaatgcttcatatccaccatccttcttttctctaaacaagaaatagaaaaaacaatatgctcgatttttggactcactgtattcaagccaacttccaaactcatcaaaccattccgggacaaaccttcttgaacctgtcataggaaaagcaaatgtgcgaggttgacaagggccattctccaagtatttccttctcaccctctctctgagattaggatggtactcatcaatttgttttcttaatcctggatcatatttaatctcatcttcccagtttatatcatccaaacatgaattacatgcattgttagcactattcggctctggcactttccttttgtaaaatcgttccatcaattaacctatcattagatgatttaggaggatgtaaatatatactgattttatcattcattcaagtacagaagtagaatgaaaattgatatgacttacatccaaatagcaccttcaactcaaattctcaaatttccccccaatctgcaattttattccaattctgaaggattccaaattgaaccctactggcctcctaattctacaatgtaaaaaaaaacaaccaataaaaattttaggcctttgtatctaataaatcaaattgattaaaaaagaaatagatgaagcatgctttcttaccttgtctctactaacgcacaatgtggctgtgtgctgatcagttgatggagatggatgatgtcattgttggcttcatggcttgtgaaagtgtggtctgacgcttgctcctggttagcttgttgcctggcgaccgccttcctgccttcctggctcctgcggctggagcgagcaacgtaggcactaagcaagcaggggcgacggcgacagcgacagtgagctgccgagggcgacggccgacggcggcgcgtcacgatgccgagatgggcaagtgttgtctgggagactgggattggctgattgcagagcagtggcgtggaagccaaacagatgcgaggcggagtcgtcaagattggcagcgacgggacgcggcatacgagaagtcgagaagagaaaagattgatctggattcgactctcctcatgggcttacaacgttaactggactgttgtttggactgtgggtgcactatattgggccaaggggggtgcatatagggccgagatatgggggtaataactaaaaattttgtttgaggggggttcatctgcacccacgggcctctattgggcttcgcccccgctggtagatccgtagatagcttgcatttgatttggtagttgtaaatttacgaattatgcttagggtcaattcacctctatataaatctgtactacataatactaataaactttctccacagttttgttttagattcatgtacatattgatgattttgtacattatctctgcaatgtgtaatttagcatgtagaaaagtaattgagattgctaaggatcacaatgcacaacatcccaactgatacgaataatttgtgtgtcccttttatccagaaaaaataccagtgtaaactaatgtgaaggaagaatggcatgttgaacttcgttagtaatatggtatcgatttccttggtcgctactttgttgtcctaggtaaattgttatacatgctcggtgtctgtatgaagtgcatggcaatgcatccggaagcatcagctgtcgccccatgtcttcttgatatgatcagatctaggtatgccaagcctaaaaaacatttccctgttaaggaattttattggtaagttaccattttgacatcaaattttgttctatacagctgtttcacaacatcctgaagcatcagaaggtctgtgttgtttgcagctttttgcatattgatagtgctgcacccattgtatgtctcatcagctcttatagaaggaaatcgggacatttcaactggtttggaattgatacacatatgggctcttcatgttgcagaagctgatcctgatacagaatgaatatcagtatgtactttggtcactatggggggatatatctgttatgaatcaccgatttgcattttgttcgtcaaagtagagcaattatagtacaataggctcagcacataatactaatagggtcatttttgaaccaacaaagaagtacagttgttcagggtaaacgttatatcaaattcatttgcatcgtctttgattttaacctgaaagaagagtattttcactgtgagataattcactatctgaaaataaagagctaataactcccaccttatgctttagtttcctgtaacgtacttctttctatcattccatttggtcttctattatactcaaccagtgatccagctcttttcagtaatgtgtagagtaaaaccagactagttttttgttcaactcataattagaaaaccatttcagtacactggaaactcagtaacttctcacattgtcatctaactcttccattgtcatgtttgtctccttgcaggcatcatgacctgtttgcaactctgttccgagatcttcagacatcatgagcactgaatcagtggatcgcagcatg

SEQ ID NO: 27400 - DNA, 891 bp, Oryza sativa
catcgcccgtgtcttgtgtgtttccactttcgcgaacattccacagactaggagcttagaacctcacccagggcccccggccgaaccggcaaagggggacctgcgcggtctcccggtgaggagccccacgctccgtcatctgacgcgccatgtagggggttctgcgtgtgtttttctaagctctcatactctttcgtgtgcgccaagcttttcctgttcagcccaatggctaaacaagcaaaagcgcacaagctctctccgagtgttagcggtgacgacggggagccgaacccacgccgtcgagctcgtactccaccgccccctccacgccaaagtcctaggcgggaggaggcgctcgagagggtcgaaggatccgcgacttcgacatccacgggtgatggagaagggcgccgagatggggagcgtcgcctcctcgtctacggcgacggtagcacgccccagggcgcgctccaagctgcgggcgcgctcctacgtcacccgcccgtcgtccctgacccggagtctccagcccaacgttggctggacgacgtagccaacttggtcatgacggcacggcagcacctaggtgttggtgggcggtcctccgccactgtcacgtcccaaatcgactctaaaatacatcctcgaaattgtgcaaagaataattaaaattcatgtgaaagcctccaacaattaaaatgtgcaaagataaaagtcaaatgaggcttggaggatttttgtatatttcctaaaagcctaaaatgcgtaaataaattttagtggaattttcagagcacaaataataattgaaaagaaataaacaaagttgaaaaggtttataaaaagaaaaatccctaaaagtcttctttccccccccttttccttcttggg

SEQ ID NO: 27401 - DNA, 1287 bp, Oryza sativa
gaggagcccaagactactccaccatccgggatgctagctcggaggatgacgctaccatcgtgcacgtggcacgcatggtggaggagtacgacgcggctagtatcgacttccatcagatggtacgccgcgggatggtcgagaacaacatgaagatcctggagctgcgccaggagaacctgcagctcaagaaggacctcgacgcagtggaggcgcagctgcatcagctcaagatcgcccagggagagatctgccgccccaagcgtcgccgtgtctgccgcagccagaagatcaccgcccgcaagagcacctccaggcctgagcttgtccgtcagtccctggcgtggacctgcttcgtcgagacccctcgtgccgagcctgcgcccgtggttccccaggagggggaagcctccggcgttggtagctcggagggtgcgctgttgctcaccttccgtcctggcccgtcgcagcggtagacgagcagttagtaggcttgcgcgtgtgttctttctcgtttgtcttttttggagtcgtgtggggcatggttatgccggtgtgtggtgtaactatgtcggagcctgtcttattttatttgcctaagcaacttgaacattaatgaaccaatttaatagcagtgataaatttaagaataatggtagtcgtgggtggatagttttaattgttagctccttctctgtttgctggttctgtgtggggttttcagatggtgacgaccaggagaaatgctgctaccggtgatggcaaccaacctgaaggcagcaaccacaaccaccagggcaacccacctccacctcctcctccgcctccgccaccaccaccagacaccaacgccattctcacccaaatcctcgcccagcaagccaacatgatgaccgctttcctccaccacctccaaaacccgccacaacagaatgctccaccaccacctccccaacactctaaactcgccgagttcctccgcatccgcccacctaccttctccagctccaacaaccccgtggatgctttggattggttgcatgccgtggggaaaaagttagacacggtgcagtgcagcgatgaggagaaagtcgtcttcgccgcccatcagctgcagggacccgcatctctctggtgggaccacttccaggctacgcagccagagggacagccgattacttgggctcgcttcaccgccgctttccggagaacccatgtgcccgctggagtcgtggctcttaagaaaagggaattccgagagttgaagcaaggcaaccgctccgtgatgga

SEQ ID NO: 27402 - DNA, 620 bp, Oryza sativa
acggcttcgacttccacgaagagcggatcttccgaagctgcagcgtctacacgaccaacggaaaagaaaaaggctttaacactaaataactccacataacagcagaaacaaagcacaaaaatgggttctttacatcttaaggaaaaattagagacttgaacggtccaattccgagttcaaatggccaagatatggccatttgaagtttatatgctctttaaatggatatttgcgaatttcttcatttaattttcaattaaaaatcctatttattgcgtcagccgagggagcagggcgcgcggaccgggtccacgggaagtggggcccacgcgtcagccccacggtccacggtggaccgggcgcacgcggctggcggcggtcggcgccgtgggtcccgcgcgtcagccgcacccgcgggcgcgggcggctgacagtcgggcccacttggcagccgcgagggcgcgcccgagggcggactcgccggcgcggtcgacggaagcggcgcgcccgcgccccgatggtcaccgccggcgaccaccggcgcggcggatcggcgcccgagagagaggagggaagggggaaggcgaacggcggtcctcggctcaccccgggacaacgac

SEQ ID NO: 27403 - DNA, 1228 bp, Oryza sativa
actctgtattgtatcaacttttggtgtaccttgcctcatgggacaaggaataatacacgcacgtcgggaacgcctgttgggtgatttccggtcgtgacagcttgcttgttttaagtttgtttgtgtgtgtgggtctcgcatgtgatttacatcagtggtgggatgtaagtgcatgcgtttgtttgcttttgagtgttaggaagtgggtgagtttagtggtgtgagagtcttcagtttgtaataatgaaactcagttaagatcaataaaagttaaagtaattctctgtcctaagtagtttcccccgttttctcttcttatcctgtccataccagatggtgaacactcgtagcaatgggaatggtcccaacaaccccaataataacaacaatggagagaatcccactctggcccaagttcttgctcaacagacacagcttatgaacatgatgatgcagcaatttcagaatcagcaaaaccaagggaataatcatgcacctccacagaacaagttagcagaatttcttcgtgtgaggccgcctgttttctctagtaccactaatcctgttgaagctagtgattggatacatgccatagagaagaagttggatttacttcagtgtactgatcaggagaaggtctcatttgcatcacatcagttgcatggccctgcctctgaatggtgggatcacttccgccttaacaggactactgctgaacctatcacttggcttgaattcaccgctgctttccgaaagacgcatataccatcgggagtagtgtctctcaagaagaaggagttcaggtcgcttacccagggatctcgctctgttacggagtatctgcacgagttcaatcgtcttgctcgttatgctccggaagatgtgcgcaatgatgaagagcgccaggagaagtttttgggaggacttaatgatgagctttcttacccacttatggttggagattaccctgatttccagaaattagtggataaggctattcgtcaggaggacaagtacaatcgcatggagcagaagaaacgtcggattgctcaattcaagacacaacagggaaataatcaaaaccgcgtcttaccttaggaccccagtccatgccacagggaggttatttgtctgttgttcgtccgcaacgtcagttcttcaacaccaatgctggcaacaacatccgtaatcaagctccacgtcctggtgcagctccagctcagcaaca

SEQ ID NO: 27404 - DNA, 796 bp, Oryza sativa
agaatatatttggaacctggaacaactccgatccataagagactttatcgaatggcagccaatgagttggcagaagttaagaggcaagtagatgatttgctacagaaaggatacatcagaccgagttcatcaccatgggagctccggttatttttgtggaaaagaaagaccatactcagagaatgtgtgtggactatcgtgcactaaacgatgtgactatcaagaataagtatccactacccaggattgatgatttgtttgatcagcttaaaggtgccactgttttctccaagatagatcttcgatcagggtattatcagttgagaatcaaagaggaagatatacctaagacagcttttaccactaggtatgggttgttcgaatgtactgttatgtcttttggacttaccaatgcccctgctttcttcatgaacttgatgaataaggtgtttatggaatacctagacaagttcgtggtggtctttattgatgatattcttatctactctcgaaccaaagaagagcatgaggaacatcttcgtcttgcattggagaagctacgagaacatcaactgtatgctaagtttagcaagtgtgaattttggttgtccgaagtgaaattccttggtcacgtcatctcagccggaggagttgccgtcgatcctagtaacgtggaatccgtaaccaattggaagcaaccaaagacagtttcagagattcgcagtttcctaggcctcgcaggatattaccggaggtttatagagaatttttccaagattgctaagcccatgacacg

SEQ ID NO: 27405 - DNA, 727 bp, Oryza sativa
aaagttttacatgaaagagaacttaagactggagatgaaaagttttacatgaagcctgatttgctaatattatttgcaggaaattgttgatgatatacactagataccgtgcagcacgtggagcaagatcttcccgtgtagattggaactctctctctgatcttccagcttcaccagcagcatgttgtagaaggatgtcagacttacgagcaaaaatgtacataagattagcagtgagccaaatctgcaaccttcttgggatacgttatgctaagcaccttgaaagggaaaggatatcaaaagcgaaaggattactttcccaagtctcagattctaacaaagagaactgtgtagattcagattctgagcaattaaattgggataattttgaagatcaggaaataagaggtgcgctcgatgaagtccttgagttcattcaactagaaaaaatggaccgaaccaagcaaatcagttctaagaatgaagtgagcaatgattctaatgctgacgaagctccaactgggcaggaacagacagtaagtaattatctctttatcctcaaccaacatatattttattcaatactgatttttccttggaatgatcagattatgcaatatgtaaccagctcaagcactgaagttccagaaagcggactccatgaacatgtaaaaccgtatagacatccaactgcaatccatgcacgtaaaaacatggaaaatttctt

SEQ ID NO: 27406 - DNA, 2576 bp, Oryza sativa
  unsure (1)..(2576): unsure at all n locations
agcccgacgcaggccgagttcgcgtcggcgctggcgttcgcgatcggcggcatcctgccgttgctgacgagcgggttcatcaagccgtggggccccagggtcggcgtcgtgtgctgccgcgatcagcgtcgggctggccggcttcggcgccgcggacgggtacctcggcggcgccaacatggtgaggtccggctctagggtcctcctcggcggatggctcgccatgctcatcacctacgccgtgctccggctgttcgcgacgatctttcacggcatgaacatctcgtcgtcggcgtgatgatgcgtgtgacgcagaaatcgatctatctggagatgaaaaagaaaataatccaggggttgtgctagctagctgtttaattaactactcttggtttgccagtagtgctgtacctagtggctgattattaactaccgaatccctggataccgaactgggaataatcagggggtgtaagtgtaatggttntttgatttgtgatgaggcaagaccaggcaaatggtctcaaatgagaatattggtgttaattattgtataccgattcccttctcactttgcctcccgtttgtttttgatttgtctgtgtctctgtgacagttcagaaactagctgatgctcttggttgcaatatccaggtgtgccactggcacgttgaattgtgtttggttgattggccagcaaatgccaaagaatgcgttgaaggtgcatccgggattgccaatggtcaaaggaacttgtaccaatggaaaagaacagtttagaacacagaaaacaagaacagtgcacagattgtcatatgccccctcagagagtccagtaaaaggcccagttcatcttgggcctatttatgccacgaaagcccatcttcataaggaatataggccttcttcttccacactaaagttcagatttctttatatagaattaaagttacagacttgcgaaacttacactacagaaaattacttttgaggtgtaaaaaaacaagcactcgaccgatccaacgaaaatatctggtgatcacagatctgatgatctgttagcctcgagatattctgcacctgatttctcgatcttatagcatagaaaattatcaatccagtgacccggttgcacaaatggaaggtagaataatataagaaaaaggacgatacagctggaacgttgacaaaagaaagataaacacggttgctttcactacaaattaaaatggtataatactactccactaccaataaaagttccgctacaaccgtacgcaatattcagatcttagcaaattgaactggagagcatttctcaaagaagaaaaccaaaaagcctaactgaaagtctgaaattcaactggaatggatctctcgacgaaagatttcattttcttttggagtcctgaaagccaaaagagagaggccgctggttttgcgagccatgagcccatgaaggctacgcttcccacgggatcgtctgattcgtctccctcctctcgtcggttcttcccaacctctcccaacttctttttctggattcttgtggccgccacgcgccaccgcggtttttgtaccaactggggtacgaacgagagacgacctcgcgcgcgcggcgcgaaagtcgcatgtgccaacggcatcgtgccggcctcttccaccggatccctctttttctctatctctcgtggcggccacacgcctcttgctaatttaagccccccaacttgcacgtcggattcgtcgcgatcccccggacagatcgcgttgtcgcatggcggccacgcgcccaccgggtagtttattcccatcgcgacgaatatttcggccatgtttccatctcggagcacgtaatccgggatgctttaggtgaactgctccacgcctccacgtaccaactaccacgccaacgccaaagccaacgccaaagctcaccgtggtgtgtggtggccctttcttgatgaaagtcgtctgctccctgtacagcagataataatatgctcgcggttttggcgcgccttatgtttaaaaagttttatctttgaagaacagataataatatgtttgaggtcgtggctggcgtgaggtttatggaaacattatgtttactcttggtcggcttatttttatatataagttgggacagctggattcttatgatatatctagattagtcgtcggtttgcttgttacatgtataatagtttaaggctcgtgagtcgtgatgtcctcgagcttagctcatgtgggcgtggctaaggctccaaatgagctaggatgagcatatatatgcaaaagttcatgagcttggttgtgtgatgcaaataaactataagattaggtacaaaactagtatttatctgcataataaaatagtatgtaggagtgtaaaatatctttcatagcatttttcttgtttgctaattttaaaatttaaattgtgttttcctcctttttatcatggattttttttctattggatacagatattatctcattaacaagctttcagccaagctcagatttcaaatatgttgagcttgagcttgcttggaagcttgagtattctatag
